United States Patent Application Publication US 2024/0066114 A1 - sequence listing, part 13

SEQ ID NO: 17828 - RNA, 5841 nt, Artificial Sequence
  SARS-CoV-2__MT821787.1__non-structural protein 3 (NSP3) CDS gc
auggcccccaccaaggugaccuucggcgacgacacggucaucgaggugcagggguacaagagcgugaacaucaccuucgagcuggacgagcgcaucgacaagguccucaacgagaagugcuccgccuacaccguggagcugggcaccgaggugaacgaguucgcgugcgucguggccgacgccgugaucaagacgcugcagccggucagcgagcuccugaccccccuggggaucgaccucgacgagugguccauggccaccuacuaccuguucgacgagagcggcgaguucaagcuggccucccacauguacugcagcuucuacccccccgacgaggacgaggaggagggggacugcgaggaggaggaguucgagccguccacccaguacgaguacggcacggaggacgacuaccagggcaagccccucgaguucggggcgaccagcgccgcccugcagcccgaggaggagcaggaggaggacuggcuggacgacgacucccagcagaccgugggccagcaggacgggagcgaggacaaccagaccacgaccauccagaccaucguggagguccagccccagcucgagauggagcugaccccgguggugcagacgaucgaggucaacuccuucagcggcuaccugaagcucaccgacaacguguacaucaagaacgccgacaucguggaggaggcgaagaaggucaagcccaccgugguggucaacgccgccaacguguaccugaagcacgggggcggcguggccggggcccugaacaaggcgaccaacaacgccaugcaggucgaguccgacgacuacaucgccacgaacggcccccucaagguggggggcagcugcguccuguccggccacaaccuggccaagcacugccuccacgugguggggcccaacgucaacaagggcgaggacauccagcugcugaagagcgccuacgagaacuucaaccagcacgaggugcuccuggcgccgcugcucuccgccgggaucuucggcgccgaccccauccacagccugcgggugugcgucgacaccgugcgcaccaacguguaccuggccgucuucgacaagaaccucuacgacaagcugguguccagcuuccuggagaugaagagcgagaagcagguggagcagaagaucgccgagauccccaaggaggaggucaagcccuucaucaccgaguccaagccgagcguggagcagcggaagcaggacgacaagaagaucaaggcgugcguggaggaggucacgaccacccucgaggagaccaaguuccugacggagaaccugcuccuguacaucgacaucaacgggaaccugcaccccgacuccgccacccucgugagcgacaucgacaucaccuuccugaagaaggacgcccccuacaucgugggcgacgucgugcaggagggcgugcugaccgccgucgugauccccacgaagaaggccgggggcaccaccgagaugcucgcgaaggcccugcgcaaggugccgaccgacaacuacaucacgaccuaccccgggcagggccugaacggguacaccgucgaggaggccaagaccgugcucaagaagugcaaguccgccuucuacauccugcccagcaucaucuccaacgagaagcaggagauccugggcaccgugagcuggaaccuccgggagaugcuggcgcacgccgaggagacgcgcaagcugaugcccgucugcguggagaccaaggccaucguguccaccauccagcggaaguacaagggcaucaagauccaggagggggucguggacuacggcgcccgcuucuacuucuacaccagcaagacgaccguggccucccugaucaacacccucaacgaccugaacgagacccuggucacgaugccgcucggguacgugacccacggccugaaccuggaggaggcggcccgguacaugcgcagccucaaggugcccgccaccgucuccgugagcucccccgacgccgugaccgccuacaacggguaccugacgagcuccagcaagacccccgaggagcacuucaucgagaccaucucccuggcgggcagcuacaaggacuggagcuacuccggccagagcacccagcucgggaucgaguuccugaagcggggcgacaaguccgucuacuacacgagcaacccgaccaccuuccaccuggacggggaggugaucaccuucgacaaccucaagacgcugcugucccuccgcgaggugcggaccaucaaggucuucaccaccguggacaacaucaaccugcacacgcagguggucgacaugagcaugaccuacggccagcaguucggccccaccuaccuggacggggccgacgugaccaagaucaagccccacaacucccacgagggcaagacguucuacgugcucccgaacgacgacacccugcgcgucgaggccuucgaguacuaccacaccaccgaccccagcuuccuggggcgguacauguccgcccucaaccacacgaagaaguggaaguacccccaggugaacggccugaccagcaucaagugggccgacaacaacugcuaccuggcgaccgcccuccugacccugcagcagaucgagcucaaguucaaccccccggcccugcaggacgccuacuaccgcgcgcgggccggggaggccgccaacuucugcgcccugauccucgcguacugcaacaagacggugggcgagcugggcgacguccgcgagaccauguccuaccuguuccagcacgccaaccucgacagcugcaagcgggugcugaacgucgugugcaagaccugcgggcagcagcagaccacccugaagggcguggaggccgucauguacauggggacgcucuccuacgagcaguucaagaagggcgugcagauccccugcaccugcgggaagcaggccaccaaguaccuggugcagcaggagagccccuucgucaugauguccgcccccccggcgcaguacgagcugaagcacggcaccuucacgugcgccagcgaguacaccggcaacuaccagugcgggcacuacaagcacaucaccuccaaggagacccucuacugcaucgacggcgcccugcugacgaagagcagcgaguacaaggggcccaucaccgacguguucuacaaggagaacuccuacaccaccacgaucaagcccgugaccuacaagcucgacggcgucgugugcaccgagaucgaccccaagcuggacaacuacuacaagaaggacaacagcuacuucaccgagcagccgaucgaccuggugcccaaccagcccuaccccaacgccaacuucgacaacuucaaguucgucugcgacaacaucaaguucgccgacgaccucaaccagcugacgggguacaagaagccggcgucccgcgagcugaaggugaccuucuuccccgaccucaacggcgacguggucgccaucgacuacaagcacuacacccccagcuucaagaagggcgccaagcugcugcacaagcccaucguguggcacgugaacaacgccaccaacaaggcgacguacaagccgaacaccuggugcauccggugccucugguccaccaagcccgucgagaccagcaacuccuucgacgugcugaagagcgaggacgcccaggggauggacaaccuggccugcgaggaccucaagcccguguccgaggaggucguggagaaccccacgauccagaaggacgugcuggagugcaacgucaagaccaccgagguggugggcgacaucauccugaagccggccaacaacagccucaagaucaccgaggaggucgggcacacggaccugauggccgcguacguggacaacuccagccugaccaucaagaagcccaacgagcucucccgcgugcugggccugaagacccucgccacccacgggcuggccgccgucaacagcgugcccugggacacgaucgccaacuacgcgaagccguuccugaacaagguggucuccaccaccaccaacaucgugacgcgcugccucaaccgggugugcaccaacuacaugcccuacuucuucacccugcugcuccagcugugcaccuucacccgcagcacgaacucccggaucaaggccagcaugcccaccaccaucgccaagaacaccgucaaguccgugggcaaguucugccuggaggccagcuucaacuaccucaagagccccaacuucuccaagcugaucaacaucaucaucugguuccugcuccugagcgugugccugggcucccucaucuacagcacggccgcgcuggggguccugauguccaaccucggcaugccgagcuacugcaccggguaccgcgagggcuaccugaacuccaccaacgugaccaucgccacguacugcaccggcagcauccccugcuccgugugccugagcgggcucgacucccuggacaccuaccccagccuggagaccauccagaucacgaucuccagcuucaagugggaccucaccgccuucggccuggucgccgagugguuccuggccuacauccucuucacccgguucuucuacgugcuggggcuggcggccaucaugcagcucuucuucuccuacuucgccgugcacuucaucagcaacuccuggcugauguggcugaucaucaaccugguccagauggcccccaucagcgcgauggugcgcauguacaucuucuucgccuccuucuacuacguguggaagagcuacguccacgugguggacggcugcaacagcuccaccugcaugaugugcuacaagcggaaccgcgccacgcgggucgagugcaccaccaucgugaacgggguccgccggagcuucuacguguacgccaacggcggcaagggguucugcaagcuccacaacuggaacugcgugaacugcgacaccuucugcgccggcuccacguucaucagcgacgaggucgcgcgcgaccugucccugcaguucaagcggccgaucaaccccaccgaccagagcuccuacaucguggacagcgugaccgucaagaacggguccauccaccucuacuucgacaaggccggccagaagaccuacgagcgccacagccugucccacuucgugaaccuggacaaccuccgggccaacaacacgaaggggagccugcccaucaacgugaucgucuucgacggcaaguccaagugcgaggagagcuccgccaagagcgccuccguguacuacagccagcugaugugccagcccauccuccugcuggaccaggcgcucguguccgacgucggcgacagcgccgagguggccgugaagauguucgacgccuacgucaacaccuucagcuccaccuucaacgugccgauggagaagcugaagacccugguggccacggcggaggccgagcucgccaagaacgucagccuggacaacgugcuguccaccuucaucagcgccgcgcgccagggguucguggacuccgacgucgagaccaaggacgugguggagugccucaagcugagccaccaguccgacaucgaggucaccggcgacagcugcaacaacuacaugcugacguacaacaagguggagaacaugaccccccgggaccucggggccugcaucgacugcuccgcccgccacaucaacgcccagguggccaagagccacaacaucgcgcugaucuggaacgucaaggacuucaugucccugagcgagcagcuccggaagcagauccgcuccgccgccaagaagaacaaccugcccuucaagcugaccugcgccaccacgcgccagguggugaacgucgugaccaccaagaucgcccucaagggcggguga

SEQ ID NO: 17829 - RNA, 5841 nt, Artificial Sequence
  SARS-CoV-2__MT810483.1__non-structural protein 3 (NSP3) CDS gc
auggcccccaccaaggugaccuucggcgacgacacggucaucgaggugcagggguacaagagcgugaacaucaccuucgagcuggacgagcgcaucgacaagguccucaacgagaagugcuccgccuacaccguggagcugggcaccgaggugaacgaguucgcgugcgucguggccgacgccgugaucaagacgcugcagccggucagcgagcuccugaccccccuggggaucgaccucgacgagugguccauggccaccuacuaccuguucgacgagagcggcgaguucaagcuggccucccacauguacugcagcuucuacccccccgacgaggacgaggaggagggggacugcgaggaggaggaguucgagccguccacccaguacgaguacggcacggaggacgacuaccagggcaagccccucgaguucggggcgaccagcgccgcccugcagcccgaggaggagcaggaggaggacuggcuggacgacgacucccagcagaccgugggccagcaggacgggagcgaggacaaccagaccacgaccauccagaccaucguggagguccagccccagcucgagauggagcugaccccgguggugcagacgaucgaggucaacuccuucagcggcuaccugaagcucaccgacaacguguacaucaagaacgccgacaucguggaggaggcgaagaaggucaagcccaccgugguggucaacgccgccaacguguaccugaagcacgggggcggcguggccggggcccugaacaaggcgaccaacaacgccaugcaggucgaguccgacgacuacaucgccacgaacggcccccucaagguggggggcagcugcguccuguccggccacaaccuggccaagcacugccuccacgugguggggcccaacgucaacaagggcgaggacauccagcugcugaagagcgccuacgagaacuucaaccagcacgaggugcuccuggcgccgcugcucuccgccgggaucuucggcgccgaccccauccacagccugcgggugugcgucgacaccgugcgcaccaacguguaccuggccgucuucgacaagaaccucuacgacaagcugguguccagcuuccuggagaugaagagcgagaagcagguggagcagaagaucgccgagauccccaaggaggaggucaagcccuucaucaccgaguccaagccgagcguggagcagcggaagcaggacgacaagaagaucaaggcgugcguggaggaggucacgaccacccucgaggagaccaaguuccugacggagaaccugcuccuguacaucgacaucaacgggaaccugcaccccgacuccgccacccucgugagcgacaucgacaucaccuuccugaagaaggacgcccccuacaucgugggcgacgucgugcaggagggcgugcugaccgccgucgugauccccacgaagaaggccgggggcaccaccgagaugcucgcgaaggcccugcgcaaggugccgaccgacaacuacaucacgaccuaccccgggcagggccugaacggguacaccgucgaggaggccaagaccgugcucaagaagugcaaguccgccuucuacauccugcccagcaucaucuccaacgagaagcaggagauccugggcaccgugagcuggaaccuccgggagaugcuggcgcacgccgaggagacgcgcaagcugaugcccgucugcguggagaccaaggccaucguguccaccauccagcggaaguacaagggcaucaagauccaggagggggucguggacuacggcgcccgcuucuacuucuacaccagcaagacgaccguggccucccugaucaacacccucaacgaccugaacgagacccuggucacgaugccgcucggguacgugacccacggccugaaccuggaggaggcggcccgguacaugcgcagccucaaggugcccgccaccgucuccgugagcucccccgacgccgugaccgccuacaacggguaccugacgagcuccagcaagacccccgaggagcacuucaucgagaccaucucccuggcgggcagcuacaaggacuggagcuacuccggccagagcacccagcucgggaucgaguuccugaagcggggcgacaaguccgucuacuacacgagcaacccgaccaccuuccaccuggacggggaggugaucaccuucgacaaccucaagacgcugcugucccuccgcgaggugcggaccaucaaggucuucaccaccguggacaacaucaaccugcacacgcagguggucgacaugagcaugaccuacggccagcaguucggccccaccuaccuggacggggccgacgugaccaagaucaagccccacaacucccacgagggcaagacguucuacgugcucccgaacgacgacacccugcgcgucgaggccuucgaguacuaccacaccaccgaccccagcuuccuggggcgguacauguccgcccucaaccacacgaagaaguggaaguacccccaggugaacggccugaccagcaucaagugggccgacaacaacugcuaccuggcgaccgcccuccugacccugcagcagaucgagcucaaguucaaccccccggcccugcaggacgccuacuaccgcgcgcgggccggggaggccgccaacuucugcgcccugauccucgcguacugcaacaagacggugggcgagcugggcgacguccgcgagaccauguccuaccuguuccagcacgccaaccucgacagcugcaagcgggugcugaacgucgugugcaagaccugcgggcagcagcagaccacccugaagggcguggaggccgucauguacauggggacgcucuccuacgagcaguucaagaagggcgugcagauccccugcaccugcgggaagcaggccaccaaguaccuggugcagcaggagagccccuucgucaugauguccgcccccccggcgcaguacgagcugaagcacggcaccuucacgugcgccagcguguacaccggcaacuaccagugcgggcacuacaagcacaucaccuccaaggagacccucuacugcaucgacggcgcccugcugacgaagagcagcgaguacaaggggcccaucaccgacguguucuacaaggagaacuccuacaccaccacgaucaagcccgucaccuacaagcucgacggcguggugugcaccgagaucgaccccaagcuggacaacuacuacaagaaggacaacagcuacuucaccgagcagccgaucgaccugguccccaaccagcccuaccccaacgccuccuucgacaacuucaaguucgugugcgacaacaucaaguucgccgacgaccucaaccagcugacgggguacaagaagccggcgagccgcgagcugaaggugaccuucuuccccgaccucaacggcgacgucguggccaucgacuacaagcacuacacccccuccuucaagaagggcgccaagcugcugcacaagcccaucguguggcacgucaacaacgccaccaacaaggcgacguacaagccgaacaccuggugcauccggugccucuggagcaccaagcccguggagaccuccaacagcuucgacgugcugaaguccgaggacgcccaggggauggacaaccuggccugcgaggaccucaagcccgucagcgaggaggugguggagaaccccacgauccagaaggacguccuggagugcaacgugaagaccaccgagguggucggcgacaucauccugaagccggccaacaacucccucaagaucaccgaggagguggggcacacggaccugauggccgcguacguggacaacagcucccugaccaucaagaagcccaacgagcucagccgcguccugggccugaagacccucgccacccacgggcuggccgccgugaacuccgugcccugggacacgaucgccaacuacgcgaagccguuccugaacaaggucgugagcaccaccaccaacaucgugacgcgcugccucaaccgggucugcaccaacuacaugcccuacuucuucacccugcugcuccagcugugcaccuucacccgcuccacgaacagccggaucaaggccuccaugcccaccaccaucgccaagaacaccgugaagagcgugggcaaguucugccuggaggccagcuucaacuaccucaagucccccaacuucagcaagcugaucaacaucaucaucugguuccugcuccuguccgucugccugggcagccucaucuacuccacggccgcgcugggggugcugaugagcaaccucggcaugccguccuacugcaccggguaccgcgagggcuaccugaacagcaccaacgugaccaucgccacguacugcaccggcuccauccccugcagcgucugccuguccgggcucgacagccuggacaccuaccccucccuggagaccauccagaucacgaucagcuccuucaagugggaccucaccgccuucggccugguggccgagugguuccuggccuacauccucuucacccgguucuucuacgugcuggggcuggcggccaucaugcagcucuucuucagcuacuucgccguccacuucaucuccaacagcuggcugauguggcugaucaucaaccuggugcagauggcccccaucuccgcgauggugcgcauguacaucuucuucgccagcuucuacuacgucuggaagagcuacgugcacguggucgacggcugcaacuccagcaccugcaugaugugcuacaagcggaaccgcgccacgcggguggagugcaccaccaucgucaacggggugcgccgguccuucuacguguacgccaacggcggcaagggguucugcaagcuccacaacuggaacugcgucaacugcgacaccuucugcgccggcagcacguucaucuccgacgagguggcgcgcgaccugagccugcaguucaagcggccgaucaaccccaccgaccaguccagcuacaucguggacuccgucaccgugaagaacgggagcauccaccucuacuucgacaaggccggccagaagaccuacgagcgccacucccugagccacuucgugaaccuggacaaccuccgggccaacaacacgaaggggucccugcccaucaacgucaucguguucgacggcaagagcaagugcgaggaguccagcgccaaguccgccagcguguacuacucccagcugaugugccagcccauccuccugcuggaccaggcgcucgucagcgacgugggcgacagcgccgagguggccgucaagauguucgacgccuacgugaacaccuucuccagcaccuucaacgugccgauggagaagcugaagacccuggucgccacggcggaggccgagcucgccaagaacgugucccuggacaacgugcugagcaccuucaucuccgccgcgcgccagggguucgucgacagcgacguggagaccaaggacguggucgagugccucaagcugucccaccagagcgacaucgaggugaccggcgacuccugcaacaacuacaugcugacguacaacaagguggagaacaugaccccccgggaccucggggccugcaucgacugcagcgcccgccacaucaacgcccaggucgccaagucccacaacaucgcgcugaucuggaacgugaaggacuucaugagccuguccgagcagcuccggaagcagauccgcagcgccgccaagaagaacaaccugcccuucaagcugaccugcgccaccacgcgccagguggucaacguggugaccaccaagaucgcccucaagggcggguga

SEQ ID NO: 17830 - RNA, 5841 nt, Artificial Sequence
  SARS-CoV-2__MT810493.1__non-structural protein 3 (NSP3) CDS gc
auggcccccaccaaggugaccuucggcgacgacacggucaucgaggugcagggguacaagagcgugaacaucaccuucgagcuggacgagcgcaucgacaagguccucaacgagaagugcuccgccuacaccguggagcugggcaccgaggugaacgaguucgcgugcgucguggccgacgccgugaucaagacgcugcagccggucagcgagcuccugaccccccuggggaucgaccucgacgagugguccauggccaccuacuaccuguucgacgagagcggcgaguucaagcuggccucccacauguacugcagcuucuacccccccgacgaggacgaggaggagggggacugcgaggaggaggaguucgagccguccacccaguacgaguacggcacggaggacgacuaccagggcaagccccucgaguucggggcgaccagcgccgcccugcagcccgaggaggagcaggaggaggacuggcuggacgacgacucccagcagaccgugggccagcaggacgggagcgaggacaaccagaccacgaccauccagaccaucguggagguccagccccagcucgagauggagcugaccccgguggugcagacgaucgaggucaacuccuucagcggcuaccugaagcucaccgacaacguguacaucaagaacgccgacaucguggaggaggcgaagaaggucaagcccaccgugguggucaacgccgccaacguguaccugaagcacgggggcggcguggccgggacccugaacaaggccacgaacaacgcgaugcaggucgaguccgacgacuacaucgccaccaacggcccccucaagguggggggcagcugcguccuguccggccacaaccuggccaagcacugccuccacgugguggggcccaacgucaacaagggcgaggacauccagcugcugaagagcgccuacgagaacuucaaccagcacgaggugcuccuggccccgcugcucuccgcggggaucuucggcgccgaccccauccacagccugcgggugugcgucgacaccgugcgcaccaacguguaccuggccgucuucgacaagaaccucuacgacaagcugguguccagcuuccuggagaugaagagcgagaagcagguggagcagaagaucgccgagauccccaaggaggaggucaagcccuucaucacggaguccaagccgagcguggagcagcggaagcaggacgacaagaagaucaaggccugcguggaggaggucaccaccacccucgaggagacgaaguuccugaccgagaaccugcuccuguacaucgacaucaacgggaaccugcaccccgacuccgcgacccucgugagcgacaucgacaucaccuuccugaagaaggacgcccccuacaucgugggcgacgucgugcaggagggcgugcugacggccgucgugauccccaccaagaaggccgggggcaccaccgagaugcucgccaaggcgcugcgcaaggugccgacggacaacuacaucaccaccuaccccgggcagggccugaacggguacaccgucgaggaggccaagaccgugcucaagaagugcaaguccgccuucuacauccugcccagcaucaucuccaacgagaagcaggagauccugggcacggugagcuggaaccuccgggagaugcuggcccacgcggaggagacccgcaagcugaugcccgucugcguggagaccaaggccaucguguccaccauccagcggaaguacaagggcaucaagauccaggagggggucguggacuacggcgcccgcuucuacuucuacacgagcaagaccaccguggccucccugaucaacacccucaacgaccugaacgagacgcuggucaccaugccgcucggguacgugacccacggccugaaccuggaggaggccgcgcgguacaugcgcagccucaaggugcccgccaccgucuccgugagcucccccgacgccgugacggccuacaacggguaccugaccagcuccagcaagacccccgaggagcacuucaucgagaccaucucccuggccggcagcuacaaggacuggagcuacuccggccagagcacgcagcucgggaucgaguuccugaagcggggcgacaaguccgucuacuacaccagcaacccgaccaccuuccaccuggacggggaggugaucacguucgacaaccucaagacccugcugucccuccgcgaggugcggaccaucaaggucuucaccacgguggacaacaucaaccugcacacccagguggucgacaugagcaugaccuacggccagcaguucggccccaccuaccuggacggggcggacgugacgaagaucaagccccacaacucccacgagggcaagaccuucuacgugcucccgaacgacgacacccugcgcgucgaggccuucgaguacuaccacaccacggaccccagcuuccuggggcgguacauguccgcccucaaccacaccaagaaguggaaguacccccaggugaacggccugaccagcaucaagugggccgacaacaacugcuaccuggccaccgcgcuccugacgcugcagcagaucgagcucaaguucaaccccccggcccugcaggacgccuacuaccgcgcccgggcgggggaggccgccaacuucugcgcccugauccucgccuacugcaacaagaccgugggcgagcugggcgacguccgcgagaccauguccuaccuguuccagcacgcgaaccucgacagcugcaagcgggugcugaacgucgugugcaagaccugcgggcagcagcagaccacgcugaagggcguggaggccgucauguacauggggacccucuccuacgagcaguucaagaagggcgugcagauccccugcaccugcgggaagcaggccaccaaguaccuggugcagcaggagagccccuucgucaugauguccgcccccccggcccaguacgagcugaagcacggcacguucaccugcgcgagcgaguacaccggcaacuaccagugcgggcacuacaagcacaucaccuccaaggagacgcucuacugcaucgacggcgcccugcugaccaagagcagcgaguacaaggggcccaucaccgacguguucuacaaggagaacuccuacaccacgaccaucaagcccgugaccuacaagcucgacggcgucgugugcaccgagaucgaccccaagcuggacaacuacuacaagaaggacaacagcuacuucacggagcagccgaucgaccuggugcccaaccagcccuaccccaacgccuccuucgacaacuucaaguucgucugcgacaacaucaaguucgccgacgaccucaaccagcugaccggguacaagaagccggccagccgcgagcugaaggugaccuucuuccccgaccucaacggcgacguggucgcgaucgacuacaagcacuacacccccuccuucaagaagggcgccaagcugcugcacaagcccaucguguggcacgugaacaacgccacgaacaaggccaccuacaagccgaacaccuggugcauccggugccucuggagcaccaagcccgucgagacguccaacagcuucggggugcugaaguccgaggacgcgcagggcauggacaaccuggccugcgaggaccucaagcccgugagcgaggaggucguggagaaccccaccauccagaaggacgugcuggagugcaacgucaagaccaccgagguggugggggacaucauccugaagccggccaacaacucccucaagaucacggaggaggucggccacaccgaccugauggccgccuacguggacaacagcucccugaccaucaagaagcccaacgagcucagccgcgugcuggggcugaagacccucgcgacgcacggccuggccgccgucaacuccgugcccugggacaccaucgccaacuacgccaagccguuccugaacaagguggucagcaccaccacgaacaucgugacccgcugccucaaccgggugugcaccaacuacaugcccuacuucuucacccugcugcuccagcugugcaccuucacgcgcuccaccaacagccggaucaaggcguccaugcccaccaccaucgccaagaacacggucaagagcgugggcaaguucugccuggaggccagcuucaacuaccucaagucccccaacuucagcaagcugaucaacaucaucaucugguuccugcuccuguccgugugccuggggagccucaucuacuccaccgccgcccugggcguccugaugagcaaccucgggaugccguccuacugcaccggcuaccgcgagggcuaccugaacagcaccaacgugacgaucgcgaccuacugcaccggguccauccccugcagcgugugccuguccggccucgacagccuggacaccuaccccucccuggagacgauccagaucaccaucagcuccuucaagugggaccucaccgccuucgggcuggucgccgagugguuccuggccuacauccucuucacccgguucuucuacgugcugggccuggccgcgaucaugcagcucuucuucagcuacuucgccgugcacuucaucuccaacagcuggcugauguggcugaucaucaaccugguccagauggcccccaucuccgccauggugcgcauguacaucuucuucgcgagcuucuacuacguguggaagagcuacguccacgugguggacgggugcaacuccagcacgugcaugaugugcuacaagcggaaccgcgccacccgggucgagugcaccaccaucgugaacggcguccgccgguccuucuacguguacgccaacggcgggaagggcuucugcaagcuccacaacuggaacugcgugaacugcgacacguucugcgccgggagcaccuucaucuccgacgaggucgcccgcgaccugagccugcaguucaagcggccgaucaaccccaccgaccaguccagcuacaucguggacuccgugaccgucaagaacggcagcauccaccucuacuucgacaaggcggggcagaagacguacgagcgccacucccugagccacuucgugaaccuggacaaccuccgggccaacaacaccaagggcucccugcccaucaacgugaucgucuucgacggcaagagcaagugcgaggaguccagcgccaaguccgccagcguguacuacucccagcugaugugccagcccauccuccugcuggaccaggcccucgugagcgacgucggggacagcgcggagguggccgugaagauguucgacgccuacgucaacaccuucuccagcaccuucaacgugccgauggagaagcugaagacgcugguggccaccgccgaggcggagcucgccaagaacgucucccuggacaacgugcugagcaccuucaucuccgccgcccgccagggcuucguggacagcgacgucgagaccaaggacgugguggagugccucaagcugucccaccagagcgacaucgaggucacgggggacuccugcaacaacuacaugcugaccuacaacaagguggagaacaugaccccccgggaccucggcgcgugcaucgacugcagcgcccgccacaucaacgcccagguggccaagucccacaacaucgcccugaucuggaacgucaaggacuucaugagccuguccgagcagcuccggaagcagauccgcagcgcggccaagaagaacaaccugcccuucaagcugaccugcgccacgacccgccagguggugaacgucgugaccaccaagaucgcccucaaggggggcuga

SEQ ID NO: 17831 - RNA, 5841 nt, Artificial Sequence
  SARS-CoV-2__MT810511.1__non-structural protein 3 (NSP3) CDS gc
auggcccccaccaaggugaccuucggcgacgacacggucaucgaggugcagggguacaagagcgugaacaucaccuucgagcuggacgagcgcaucgacaagguccucaacgagaagugcuccgccuacaccguggagcugggcaccgaggugaacgaguucgcgugcgucguggccgacgccgugaucaagacgcugcagccggucagcgagcuccugaccccccuggggaucgaccucgacgagugguccauggccaccuacuaccuguucgacgagagcggcgaguucaagcuggccucccacauguacugcagcuucuacccccccgacgaggacgaggaggagggggacugcgaggaggaggaguucgagccguccacccaguacgaguacggcacggaggacgacuaccagggcaagccccucgaguucggggcgaccagcgccgcccugcagcccgaggaggagcaggaggaggacuggcuggacgacgacucccagcagaccgugggccagcaggacgggagcgaggacaaccagaccacgaccauccagaccaucguggagguccagccccagcucgagauggagcugaccccgguggugcagacgaucgaggucaacuccuucagcggcuaccugaagcucaccgacaacguguacaucaagaacgccgacaucguggaggaggcgaagaaggucaagcccaccgugguggucaacgccgccaacguguaccugaagcacgggggcggcguggccggggcccugaacaaggcgaccaacaacgccaugcaggucgaguccgacgacuacaucgccacgaacggcccccucaagguggggggcagcugcguccuguccggccacaaccuggccaagcacugccuccacgugguggggcccaacgucaacaagggcgaggacauccagcugcugaagagcgccuacgagaacuucaaccagcacgaggugcuccuggcgccgcugcucuccgccgggaucuucggcgccgaccccauccacagccugcgggugugcgucgacaccgugcgcaccaacguguaccuggccgucuucgacaagaaccucuacgacaagcugguguccagcuuccuggagaugaagagcgagaagcagguggagcagaagaucgccgagauccccaaggaggaggucaagcccuucaucaccgaguccaagccgagcguggagcagcggaagcaggacgacaagaagaucaaggcgugcguggaggaggucacgaccacccucgaggagaccaaguuccugacggagaaccugcuccuguacaucgacaucaacgggaaccugcaccccgacuccgccacccucgugagcgacaucgacaucaccuuccugaagaaggacgcccccuacaucgugggcgacgucgugcaggagggcgugcugaccgccgucgugauccccacgaagaaggccgggggcaccaccgagaugcucgcgaaggcccugcgcaaggugccgaccgacaacuacaucacgaccuaccccgggcagggccugaacggguacaccgucgaggaggccaagaccgugcucaagaagugcaaguccgccuucuacauccugcccagcaucaucuccaacgagaagcaggagauccugggcaccgugagcuggaaccuccgggagaugcuggcgcacgccgaggagacgcgcaagcugaugcccgucugcguggagaccaaggccaucguguccaccauccagcggaaguacaagggcaucaagauccaggagggggucguggacuacggcgcccgcuucuacuucuacaccagcaagacgaccguggccucccugaucaacacccucaacgaccugaacgagacccuggucacgaugccgcucggguacgugacccacggccugaaccuggaggaggcggcccgguacaugcgcagccucaaggugcccgccaccgucuccgugagcucccccgacgccgugaccgccuacaacggguaccugacgagcuccagcaagacccccgaggagcacuucaucgagaccaucucccuggcgggcagcuacaaggacuggagcuacuccggccagagcacccagcucgggaucgaguuccugaagcggggcgacaaguccgucuacuacacgagcaacccgaccaccuuccaccuguacggggaggugaucaccuucgacaaccucaagacgcugcugucccuccgcgaggugcggaccaucaaggucuucaccaccguggacaacaucaaccugcacacgcagguggucgacaugagcaugaccuacggccagcaguucggccccaccuaccuggacggggccgacgugaccaagaucaagccccacaacucccacgagggcaagacguucuacgugcucccgaacgacgacacccugcgcgucgaggccuucgaguacuaccacaccaccgaccccagcuuccuggggcgguacaucuccgcccucaaccacacgaagaaguggaaguacccccaggugaacggccugaccagcaucaagugggccgacaacaacugcuaccuggcgaccgcccuccugacccugcagcagaucgagcucaaguucaaccccccggcccugcaggacgccuacuaccgcgcgcgggccggggaggccgccaacuucugcgcccugauccucgcguacugcaacaagacggugggcgagcugggcgacguccgcgagaccauguccuaccuguuccagcacgccaaccucgacagcugcaagcgggugcugaacgucgugugcaagaccugcgggcagcagcagaccacccugaagggcguggaggccgucauguacauggggacgcucuccuacgagcaguucaagaagggcgugcagauccccugcaccugcgggaagcaggccaccaaguaccuggugcagcaggagagccccuucgucaugauguccgcccccccggcgcaguacgagcugaagcacggcaccuucacgugcgccagcgaguacaccggcaacuaccagugcgggcacuacaagcacaucaccuccaaggagacccucuacugcaucgacggcgcccugcugacgaagagcagcgaguacaaggggcccaucaccgacguguucuacaaggagaacuccuacaccaccacgaucaagcccgugaccuacaagcucgacggcgucgugugcaccgagaucgaccccaagcuggacaacuacuacaagaaggacaacagcuacuucaccgagcagccgaucgaccuggugcccaaccagcccuaccccaacgccuccuucgacaacuucaaguucgucugcgacaacaucaaguucgccgacgaccucaaccagcugacgggguacaagaagccggcgagccgcgagcugaaggugaccuucuuccccgaccucaacggcgacguggucgccaucgacuacaagcacuacacccccuccuucaagaagggcgccaagcugcugcacaagcccaucguguggcacgugaacaacgccaccaacaaggcgacguacaagccgaacaccuggugcauccggugccucuggagcaccaagcccgucgagaccuccaacagcuucgacgugcugaaguccgaggacgcccaggggauggacaaccuggccugcgaggaccucaagcccgugagcgaggaggucguggagaaccccacgauccagaaggacgugcuggagugcaacgucaagaccaccgagguggugggcgacaucauccugaagccggccaacaacucccucaagaucaccgaggaggucgggcacacggaccugauggccgcguacguggacaacagcucccugaccaucaagaagcccaacgagcucagccgcgugcugggccugaagacccucgccacccacgggcuggccgccgucaacuccgugcccugggacacgaucgccaacuacgcgaagccguuccugaacaagguggucagcaccaccaccaacaucgugacgcgcugccucaaccgggugugcaccaacuacaugcccuacuucuucacccugcugcuccagcugugcaccuucacccgcuccacgaacagccggaucaaggccuccaugcccaccaccaucgccaagaacaccgucaagagcgugggcaaguucugccuggaggccagcuucaacuaccucaagucccccaacuucagcaagcugaucaacaucaucaucugguuccugcuccuguccgugugccugggcagccucaucuacuccacggccgcgcuggggguccugaugagcaaccucggcaugccguccuacugcaccggguaccgcgagggcuaccugaacagcaccaacgugaccaucgccacguacugcaccggcuccauccccugcagcgugugccuguccgggcucgacagccuggacaccuaccccucccuggagaccauccagaucacgaucagcuccuucaagugggaccucaccgccuucggccuggucgccgagugguuccuggccuacauccucuucacccgguucuucuacgugcuggggcuggcggccaucaugcagcucuucuucagcuacuucgccgugcacuucaucuccaacagcuggcugauguggcugaucaucaaccugguccagauggcccccaucuccgcgauggugcgcauguacaucuucuucgccagcuucuacuacguguggaagagcuacguccacgugguggacggcugcaacuccagcaccugcaugaugugcuacaagcggaaccgcgccacgcgggucgagugcaccaccaucgugaacgggguccgccgguccuucuacguguacgccaacggcggcaagggguucugcaagcuccacaacuggaacugcgugaacugcgacaccuucugcgccggcagcacguucaucuccgacgaggucgcgcgcgaccugagccugcaguucaagcggccgaucaaccccaccgaccaguccagcuacaucguggacuccgugaccgucaagaacgggagcauccaccucuacuucgacaaggccggccagaagaccuacgagcgccacucccugagccacuucgugaaccuggacaaccuccgggccaacaacacgaaggggucccugcccaucaacgugaucgucuucgacggcaagagcaagugcgaggaguccagcgccaaguccgccagcguguacuacucccagcugaugugccagcccauccuccugcuggaccaggcgcucgugagcgacgucggcgacagcgccgagguggccgugaagauguucgacgccuacgucaacaccuucuccagcaccuucaacgugccgauggagaagcugaagacccugguggccacggcggaggccgagcucgccaagaacgucucccuggacaacgugcugagcaccuucaucuccgccgcgcgccagggguucguggacagcgacgucgagaccaaggacgugguggagugccucaagcugucccaccagagcgacaucgaggucaccggcgacuccugcaacaacuacaugcugacguacaacaagguggagaacaugaccccccgggaccucggggccugcaucgacugcagcgcccgccacaucaacgcccagguggccaagucccacaacaucgcgcugaucuggaacgucaaggacuucaugagccuguccgagcagcuccggaagcagauccgcagcgccgccaagaagaacaaccugcccuucaagcugaccugcgccaccacgcgccagguggugaacgucgugaccaccaagaucgcccucaagggcggguga

SEQ ID NO: 17832 - RNA, 5841 nt, Artificial Sequence
  SARS-CoV-2__MT810529.1__non-structural protein 3 (NSP3) CDS gc
auggcccccaccaaggugaccuucggcgacgacacggucaucgaggugcagggguacaagagcgugaacaucaccuucgagcuggacgagcgcaucgacaagguccucaacgagaagugcuccgccuacaccguggagcugggcaccgaggugaacgaguucgcgugcgucguggccgacgccgugaucaagacgcugcagccggucagcgagcuccugaccccccuggggaucgaccucgacgagugguccauggccaccuacuaccuguucgacgagagcggcgaguucaagcuggccucccacauguacugcagcuucuacccccccgacgaggacgaggaggagggggacugcgaggaggaggaguucgagccguccacccaguacgaguacggcacggaggacgacuaccagggcaagccccucgaguucggggcgaccagcgccgcccugcagcccgaggaggagcaggaggaggacuggcuggacgacgacucccagcagaccgugggccagcaggacgggagcgaggacaaccagaccacgaccauccagaccaucguggagguccagccccagcucgagauggagcugaccccgguggugcagacgaucgaggucaacuccuucagcggcuaccugaagcucaccgacaacguguacaucaagaacgccgacaucguggaggaggcgaagaaggucaagcccaccgugguggucaacgccgccaacguguaccugaagcacgggggcggcguggccggggcccugaacaaggcgaccaacaacgccaugcaggucgaguccgacgacuacaucgccacgaacggcccccucaagguggggggcagcugcguccuguccggccacaaccuggccaagcacugccuccacgugguggggcccaacgucaacaagggcgaggacauccagcugcugaagagcgccuacgagaacuucaaccagcacgaggugcuccuggcgccgcugcucuccgccgggaucuucggcgccgaccccauccacagccugcgggugugcgucgacaccgugcgcaccaacguguaccuggccgucuucgacaagaaccucuacgacaagcugguguccagcuuccuggagaugaagagcgagaagcagguggagcagaagaucgccgagauccccaaggaggaggucaagcccuucaucaccgaguccaagccgagcguggagcagcggaagcaggacgacaagaagaucaaggcgugcguggaggaggucacgaccacccucgaggagaccaaguuccugacggagaaccugcuccuguacaucgacaucaacgggaaccugcaccccgacuccgccacccucgugagcgacaucgacaucaccuuccugaagaaggacgcccccuacaucgugggcgacgucgugcaggagggcgugcugaccgccgucgugauccccacgaagaaggccgggggcaccaccgagaugcucgcgaaggcccugcgcaaggugccgaccgacaacuacaucacgaccuaccccgggcagggccugaacggguacaccgucgaggaggccaagaccgugcucaagaagugcaaguccgccuucuacauccugcccagcaucaucuccaacgagaagcaggagauccugggcaccgugagcuggaaccuccgggagaugcuggcgcacgccgaggagacgcgcaagcugaugcccgucugcguggagaccaaggccaucguguccaccauccagcggaaguacaagggcaucaagauccaggagggggucguggacuacggcgcccgcuucuacuucuacaccagcaagacgaccguggccucccugaucaacacccucaacgaccugaacgagacccuggucacgaugccgcucggguacgugacccacggccugaaccuggaggaggcggcccgguacaugcgcagccucaaggugcccgccaccgucuccgugagcucccccgacgccgugaccgccuacaacggguaccugacgagcuccagcaagacccccgaggagcacuucaucgagaccaucucccuggcgggcagcuacaaggacuggagcuacuccggccagagcacccagcucgggaucgaguuccugaagcggggcgacaaguccgucuacuacacgagcaacccgaccaccuuccaccuggacggggaggugaucaccuucgacaaccucaagacgcugcugucccuccgcgaggugcggaccaucaaggucuucaccaccguggacaacaucaaccugcacacgcagguggucgacaugagcaugaccuacggccagcaguucggccccaccuaccuggacggggccgacgugaccaagaucaagccccacaacucccacgagggcaagacguucuacgugcucccgaacgacgacacccugcgcgucgaggccuucgaguacuaccacaccaccgaccccagcuuccuggggcgguacauguccgcccucaaccacacgaagaaguggaaguacccccaggugaacggccugaccagcaucaagugggccgacaacaacugcuaccuggcgaccgcccuccugacccugcagcagaucgagcucaaguucaaccccccggcccugcaggacgccuacuaccgcgcgcgggccggggaggccgccaacuucugcgcccugauccucgcguacugcaacaagacggugggcgagcugggcgacguccgcgagaccauguccuaccuguuccagcacgccaaccucgacagcugcaagcgggugcugaacgucgugugcaagaccugcgggcagcagcagaccacccugaagggcguggaggccgucauguacauggggacgcucuccuacgagcaguucaagaagggcgugcagauccccugcaccugcgggaagcaggccaccaaguaccuggugcagcaggagagccccuucgucaugauguccgcccccccggcgcaguacgagcugaagcacggcaccuucacgugcgccagcgaguacaccggcaacuaccagugcgggcacuacaagcacaucaccuccaaggagacccucuacugcaucgacggcgcccugcugacgaagagcagcgaguacaaggggcccaucaccgacguguucuacaaggagaacuccuacaccaccacgaucaagcccgugaccuacaagcucgacggcgucgugugcaccgagaucgaccccaagcuggacaacuacuacaagaaggacaacagcuacuucaccgagcagccgaucgaccuggugcccaaccagcccuaccccaacgccuccuucgacaacuucaaguucgucugcgacaacaucaaguucgccgacgaccucaaccagcugacgggguacaagaagccggcgagccgcgagcugaaggugaccuucuuccccgaccucaacggcgacguggucgccaucgacuacaagcacuacacccccuccuucaagaagggcgccaagcugcugcacaagcccaucguguggcacgugaacaacgccaccaacaaggcgacguacaagccgaacaccuggugcauccggugccucuggagcaccaagcccgucgagaccuccaacagcuucgacgugcugaaguccgaggacgcccaggggauggacaaccuggccugcgaggaccucaagcccgugagcgaggaggucguggagaaccccacgauccagaaggacgugcuggagugcaacgucaagaccaccgagguggugggcgacaucauccugaagccggccaacaacucccucaagaucaccgaggaggucgggcacacggaccugauggccgcguacguggacaacagcucccugaccaucaagaagcccaacgagcucagccgcgugcugggccugaagacccucgccacccacgggcuggccgccgucaacuccgugcccugggacacgaucgccaacuacgcgaagccguuccugaacaagguggucagcaccaccaccaacaucgugacgcgcugccucaaccgggugugcaccaacuacaugcccuacuucuucacccugcugcuccagcugugcaccuucacccgcuccacgaacagccggaucaaggccuccaugcccaccaccaucgccaagaacaccgucaagagcgugggcaaguucugccuggaggccagcuucaacuaccucaagucccccaacuucagcaagcugaucaacaucaucaucugguuccugcuccuguccgugugccugggcagccucaucuacuccacggccgcgcuggggguccugaugagcaaccucggcaugccguccuacugcaccggguaccgcgagggcuaccugaacagcaccaacgugaccaucgccacguacugcaccggcuccauccccugcagcgugugccuguccgggcucgacagccuggacaccuaccccucccuggagaccauccagaucacgaucagcuccuucaagugggaccucaccgccuucggccuggucgccgagugguuccuggccuacauccucuucacccgguucuucuacgugcuggggcuggcggccaucaugcagcucuucuucagcuacuucgccgugcacuucaucuccaacagcuggcugauguggcugaucaucaaccugguccagauggcccccaucuccgcgauggugcgcauguacaucuucuucgccagcuucuacuacguguggaagagcuacguccacgugguggacggcugcaacuccagcaccugcaugaugugcuacaagcggaaccgcgccacgcgggucgagugcaccaccaucgugaacgggguccgccgguccuucuacguguacgccaacggcggcaagggguucugcaagcuccacaacuggaacugcgugaacugcgacaccuucugcgccggcagcacguucaucuccgacgaggucgcgcgcgaccugagccugcaguucaagcggccgaucaaccccaccgaccaguccagcuacaucguggacuccgugaccgucaagaacgggagcauccaccucuacuucgacaaggccggccagaagaccuacgagcgccacucccugagccacuucgugaaccuggacaaccuccgggccaacaacacgaaggggucccugcccaucaacgugaucgucuucgacggcaagagcaagugcgaggaguccagcgccaagcuggccuccguguacuacagccagcucaugugccagcccauccugcugcucgaccaggcgcugguguccgacgucggcgacagcgccgagguggccgugaagauguucgacgccuacgucaacaccuucagcuccaccuucaacgugccgauggagaagcugaagacccucguggccacggcggaggccgagcuggccaagaacgucagccuggacaacgugcucuccaccuucaucagcgccgcgcgccagggguucguggacuccgacgucgagaccaaggacgugguggagugccugaagcugagccaccaguccgacaucgaggucaccggcgacagcugcaacaacuacaugcucacguacaacaagguggagaacaugaccccccgggaccugggggccugcaucgacugcuccgcccgccacaucaacgcccagguggccaagagccacaacaucgcgcugaucuggaacgucaaggacuucaugucccucagcgagcagcugcggaagcagauccgcuccgccgccaagaagaacaaccugcccuucaagcucaccugcgccaccacgcgccagguggugaacgucgugaccaccaagaucgcccugaagggcggguga

SEQ ID NO: 17833 - RNA, 5841 nt, Artificial Sequence
  SARS-CoV-2__MT810532.1__non-structural protein 3 (NSP3) CDS gc
auggcccccaccaaggugaccuucggcgacgacacggucaucgaggugcagggguacaagagcgugaacaucaccuucgagcuggacgagcgcaucgacaagguccucaacgagaagugcuccgccuacaccguggagcugggcaccgaggugaacgaguucgcgugcgucguggccgacgccgugaucaagacgcugcagccggucagcgagcuccugaccccccuggggaucgaccucgacgagugguccauggccaccuacuaccuguucgacgagagcggcgaguucaagcuggccucccacauguacugcagcuucuacccccccgacgaggacgaggaggagggggacugcgaggaggaggaguucgagccguccacccaguacgaguacggcacggaggacgacuaccagggcaagccccucgaguucggggcgaccagcgccgcccugcagcccgaggaggagcaggaggaggacuggcuggacgacgacucccagcagaccgugggccagcaggacgggagcgaggacaaccagaccacgaccauccagaccaucguggagguccagccccagcucgagauggagcugaccccgguggugcagacgaucgaggucaacuccuucagcggcuaccugaagcucaccgacaacguguacaucaagaacgccgacaucguggaggaggcgaagaaggucaagcccaccgugguggucaacgccgccaacguguaccugaagcacgggggcggcguggccggggcccugaacaaggcgaccaacaacgccaugcaggucgaguccgacgacuacaucgccacgaacggcccccucaagguggggggcagcugcguccuguccggccacaaccuggccaagcacugccuccacgugguggggcccaacgucaacaagggcgaggacauccagcugcugaagagcgccuacgagaacuucaaccagcacgaggugcuccuggcgccgcugcucuccgccgggaucuucggcgccgaccccauccacagccugcgggugugcgucgacaccgugcgcaccaacguguaccuggccgucuucgacaagaaccucuacgacaagcugguguccagcuuccuggagaugaagagcgagaagcagguggagcagaagaucgccgagauccccaaggaggaggucaagcccuucaucaccgaguccaagccgagcguggagcagcggaagcaggacgacaagaagaucaaggcgugcguggaggaggucacgaccacccucgaggagaccaaguuccugacggagaaccugcuccuguacaucgacaucaacgggaaccugcaccccgacuccgccacccucgugagcgacaucgacaucaccuuccugaagaaggacgcccccuacaucgugggcgacgucgugcaggagggcgugcugaccgccgucgugauccccacgaagaaggccgggggcaccaccgagaugcucgcgaaggcccugcgcaaggugccgaccgacaacuacaucacgaccuaccccgggcagggccugaacggguacaccgucgaggaggccaagaccgugcucaagaagugcaaguccgccuucuacauccugcccagcaucaucuccaacgagaagcaggagauccugggcaccgugagcuggaaccuccgggagaugcuggcgcacgccgaggagacgcgcaagcugaugcccgucugcguggagaccaaggccaucguguccaccauccagcggaaguacaagggcaucaagauccaggagggggucguggacuacggcgcccgcuucuacuucuacaccagcaagacgaccguggccucccugaucaacacccucaacgaccugaacgagacccuggucacgaugccgcucggguacgugacccacggccugaaccuggaggaggcggcccgguacaugcgcagccucaaggugcccgccaccgucuccgugagcucccccgacgccgugaccgccuacaacggguaccugacgagcuccagcaagacccccgaggagcacuucaucgagaccaucucccuggcgggcagcuacaaggacuggagcuacuccggccagagcacccagcucgggaucgaguuccugaagcggggcgacaaguccgucuacuacacgagcaacccgaccaccuuccaccuggacggggaggugaucaccuucgacaaccucaagacgcugcugucccuccgcgaggugcggaccaucaaggucuucaccaccguggacaacaucaaccugcacacgcagguggucgacaugagcaugaccuacggccagcaguucggccccaccuaccuggacggggccgacgugaccaagaucaagccccacaacucccacgagggcaagacguucuacgugcucccgaacgacgacacccugcgcgucgaggccuucgaguacuaccacaccaccgaccccagcuuccuggggcgguacauguccgcccucaaccacacgaagaaguggaaguacccccaggugaacggccugaccagcaucaagugggccgacaacaacugcuaccuggcgaccgcccuccugacccugcagcagaucgagcucaaguucaaccccccggcccugcaggacgccuacuaccgcgcgcgggccggggaggccgccaacuucugcgcccugauccucgcguacugcaacaagacggugggcgagcugggcgacguccgcgagaccauguccuaccuguuccagcacgccaaccucgacagcugcaagcgggugcugaacgucgugugcaagaccugcgggcagcagcagaccacccugaagggcguggaggccgucauguacauggggacgcucuccuacgagcaguucaagaagggcgugcagauccccugcaccugcgggaagcaggccaccaaguaccuggugcagcaggagagccccuucgucaugauguccgcccccccggcgcaguacgagcugaagcacggcaccuucacgugcgccagcgaguacaccggcaacuaccagugcgggcacuacaagcacaucaccuccaaggagacccucuacugcaucgacggcgcccugcugacgaagagcagcgaguacaaggggcccaucaccgacguguucuacaaggagaacuccuacaccaccacgaucaagcccgugaccuacaagcucgacggcgucgugugcaccgagaucgaccccaagcuggacaacuacuacaagaaggacaacagcuacuucaccgagcagccgaucgaccuggugcccaaccagcccuaccccaacgccuccuucgacaacuucaaguucgucugcgacaacaucaaguucgccgacgaccucaaccagcugacgggguacaagaagccggcgagccgcgagcugaaggugaccuucuuccccgaccucaacggcgacguggucgccaucgacuacaagcacuacacccccuccuucaagaagggcgccaagcugcugcacaagcccaucguguggcacgugaacaacgccaccaacaaggcgacguacaagccgaacaccuggugcauccggugccucuggagcaccaagcccgucgagaccuccaacagcuucgacgugcugaaguccgaggacgcccaggggauggacaaccuggccugcgaggaccucaagcccgugagcgaggaggucguggagaaccccacgauccagaaggacgugcuggagugcaacgucaagaccaccgagguggugggcgacaucauccugaagccggccaacaacucccucaagaucaccgaggaggucgggcacacggaccugauggccgcguacguggacaacagcucccugaccaucaagaagcccaacgagcucagccgcgugcugggccugaagacccucgccacccacgggcuggccgccgucaacuccgugcccugggacacgaucgccaacuacgcgaagccguuccugaacaagguggucagcaccaccaccaacaucgugacgcgcugccucaaccgggugugcaccaacuacaugcccuacuucuucacccugcugcuccagcugugcaccuucacccgcuccacgaacagccggaucaaggccuccaugcccaccaccaucgccaagaacaccgucaagagcgugggcaaguucugccuggaggccagcuucaacuaccucaagucccccaacuucagcaagcugaucaacaucaucaucugguuccugcuccuguccgugugccugggcagccucaucuacuccacggccgcgcuggggguccugaugagcaaccucggcaugccguccuacugcaccggguaccgcgagggcuaccugaacagcaccaacgugaccaucgccacguacugcaccggcuccauccccugcagcgugugccuguccgggcucgacagccuggacaccuaccccucccuggagaccauccagaucacgaucagcuccuucaagugggaccucaccgccuucggccuggucgccgagugguuccuggccuacauccucuucacccgguucuucuacgugcuggggcuggcggccaucaugcagcucuucuucagcuacuucgccgugcacuucaucuccaacagcuggcugauguggcugaucaucaaccugguccagauggcccccaucuccgcgauggugcgcauguacaucuucuucgccagcuucuacuacguguggaagagcuacguccacgugguggacggcugcaacuccagcaccugcaugaugugcuacaagcggaaccgcgccacgcgggucgagugcaccaccaucgugaacgggguccgccgguccuucuacguguacgccaacggcggcaagggguucugcaagcuccacaacuggaacugcgugaacugcgacaccuucugcgccggcagcacguucaucuccgacgaggucgcgcgcgaccugagccugcaguucaagcggccgaucaaccccaccgaccaguccagcuacaucguggacuccgugaccgucaagaacgggagcauccaccucuacuucgacaaggccggccagaagaccuacgagcgccacucccugagccacuucgugaaccuggacaaccuccgggccaacaacacgaaggggucccugcccaucaacgugaucgucuucgacggcaagagcaagugcgaggaguccagcgccaaguccgccagcguguacuacucccagcugaugugccagcccauccuccugcuggaccaggcgcucgugagcgacgucggcgacagcgccgagguggccgugaagauguucgacgccuacgucaacaccuucuccagcaccuucaacgugccgauggagaagcugaagacccugguggccacggcggaggccgagcucgccaagaacgucucccuggacaacgugcugagcaccuucaucuccgccgcgcgccagggguucguggacagcgacgucgagaccaaggacgugguggagugccucaagcugucccaccagagcgacgucgaggugaccggcgacuccugcaacaacuacaugcugacguacaacaagguggagaacaugaccccccgggaccucggggccugcaucgacugcagcgcccgccacaucaacgcccaggucgccaagucccacaacaucgcgcugaucuggaacgugaaggacuucaugagccuguccgagcagcuccggaagcagauccgcagcgccgccaagaagaacaaccugcccuucaagcugaccugcgccaccacgcgccagguggucaacguggugaccaccaagaucgcccucaagggcggguga

SEQ ID NO: 17834 - RNA, 5841 nt, Artificial Sequence
  SARS-CoV-2__MT810534.1__non-structural protein 3 (NSP3) CDS gc
auggcccccaccaaggugaccuucggcgacgacacggucaucgaggugcagggguacaagagcgugaacaucaccuucgagcuggacgagcgcaucgacaagguccucaacgagaagugcuccgccuacaccguggagcugggcaccgaggugaacgaguucgcgugcgucguggccgacgccgugaucaagacgcugcagccggucagcgagcuccugaccccccuggggaucgaccucgacgagugguccauggccaccuacuaccuguucgacgagagcggcgaguucaagcuggccucccacauguacugcagcuucuacccccccgacgaggacgaggaggagggggacugcgaggaggaggaguucgagccguccacccaguacgaguacggcacggaggacgacuaccagggcaagccccucgaguucggggcgaccagcgccgcccugcagcccgaggaggagcaggaggaggacuggcuggacgacgacucccagcagaccgugggccagcaggacgggagcgaggacaaccagaccacgaccauccagaccaucguggagguccagccccagcucgagauggagcugaccccgguggugcagacgaucgaggucaacuccuucagcggcuaccugaagcucaccgacaacguguacaucaagaacgccgacaucguggaggaggcgaagaaggucaagcccaccgugguggucaacgccgccaacguguaccugaagcacgggggcggcguggccggggcccugaacaaggcgaccaacaacgccaugcaggucgaguccgacgacuacaucgccacgaacggcccccucaagguggggggcagcugcguccuguccggccacaaccuggccaagcacugccuccacgugguggggcccaacgucaacaagggcgaggacauccagcugcugaagagcgccuacgagaacuucaaccagcacgaggugcuccuggcgccgcugcucuccgccgggaucuucggcgccgaccccauccacagccugcgggugugcgucgacaccgugcgcaccaacguguaccuggccgucuucgacaagaaccucuacgacaagcugguguccagcuuccuggagaugaagagcgagaagcagguggagcagaagaucgccgagauccccaaggaggaggucaagcccuucaucaccgaguccaagccgagcguggagcagcggaagcaggacgacaagaagaucaaggcgugcguggaggaggucacgaccacccucgaggagaccaaguuccugacggagaaccugcuccuguacaucgacaucaacgggaaccugcaccccgacuccgccacccucgugagcgacaucgacaucaccuuccugaagaaggacgcccccuacaucgugggcgacgucgugcaggagggcgugcugaccgccgucgugauccccacgaagaaggccgggggcaccaccgagaugcucgcgaaggcccugcgcaaggugccgaccgacaacuacaucacgaccuaccccgggcagggccugaacggguacaccgucgaggaggccaagaccgugcucaagaagugcaaguccgccuucuacauccugcccagcaucaucuccaacgagaagcaggagauccugggcaccgugagcuggaaccuccgggagaugcuggcgcacgccgaggagacgcgcaagcugaugcccgucugcguggagaccaaggccaucguguccaccauccagcggaaguacaagggcaucaagauccaggagggggucguggacuacggcgcccgcuucuacuucuacaccagcaagacgaccguggccucccugaucaacacccucaacgaccugaacgagacccuggucacgaugccgcucggguacgugacccacggccugaaccuggaggaggcggcccgguacaugcgcagccucaaggugcccgccaccgucuccgugagcucccccgacgccgugaccgccuacaacggguaccugacgagcuccagcaagacccccgaggagcacuucaucgagaccaucucccuggcgggcagcuacaaggacuggagcuacuccggccagagcacccagcucgggaucgaguuccugaagcggggcgacaaguccgucuacuacacgagcaacccgaccaccuuccaccuggacggggaggugaucaccuucgacaaccucaagacgcugcugucccuccgcgaggugcggaccaucaaggucuucaccaccguggacaacaucaaccugcacacgcagguggucgacaugagcaugaccuacggccagcaguucggccccaccuaccuggacggggccgacgugaccaagaucaagccccacaacucccacgagggcaagacguucuacgugcucccgaacgacgacacccugcgcgucgaggccuucgaguacuaccacaccaccgaccccagcuuccuggggcgguacauguccgcccucaaccacacgaagaaguggaaguacccccaggugaacggccugaccagcaucaagugggccgacaacaacugcuaccuggcgaccgcccuccugacccugcagcagaucgagcucaaguucaaccccccggcccugcaggacgccuacuaccgcgcgcgggccggggaggccgccaacuucugcgcccugauccucgcguacugcaacaagacggugggcgagcugggcgacguccgcgagaccauguccuaccuguuccagcacgccaaccucgacagcugcaagcgggugcugaacgucgugugcaagaccugcgggcagcagcagaccacccugaagggcguggaggccgucauguacauggggacgcucuccuacgagcaguucaagaagggcgugcagauccccugcaccugcgggaagcaggccaccaaguaccuggugcagcaggagagccccuucgucaugauguccgcccccccggcgcaguacgagcugaagcacggcaccuucacgugcgccagcgaguacaccggcaacuaccagugcgggcacuacaagcacaucaccuccaaggagacccucuacugcaucgacggcgcccugcugacgaagagcagcgaguacaaggggcccaucaccgacguguucuacaaggagaacuccuacaccaccacgaucaagcccgugaccuacaagcucgacggcgucgugugcaccgagaucgaccccaagcuggacaacuacuacaagaaggacaacagcuacuucaccgagcagccgaucgaccuggugcccaaccagcccuaccccaacgccuccuucgacaacuucaaguucgucugcgacaacaucaaguucgccgacgaccucaaccagcugacgggguacaagaagccggcgagccgcgagcugaaggugaccuucuuccccgaccucaacggcgacgugguccccaucgacuacaagcacuacacccccuccuucaagaagggcgccaagcugcugcacaagccgaucguguggcacgugaacaacgccaccaacaaggccacguacaagcccaacaccuggugcauccggugccucuggagcaccaagcccgucgagaccuccaacagcuucgacgugcugaaguccgaggacgcgcaggggauggacaaccuggccugcgaggaccucaagcccgugagcgaggaggucguggagaacccgacgauccagaaggacgugcuggagugcaacgucaagaccaccgagguggugggcgacaucauccugaagcccgccaacaacucccucaagaucaccgaggaggucgggcacacggaccugauggccgccuacguggacaacagcucccugaccaucaagaagcccaacgagcucagccgcgugcugggccugaagacccucgcgacccacgggcuggccgccgucaacuccgugccgugggacacgaucgccaacuacgccaagcccuuccugaacaagguggucagcaccaccaccaacaucgugacgcgcugccucaaccgggugugcaccaacuacaugcccuacuucuucacccugcugcuccagcugugcaccuucacccgcuccacgaacagccggaucaaggcguccaugcccaccaccaucgccaagaacaccgucaagagcgugggcaaguucugccuggaggccagcuucaacuaccucaaguccccgaacuucagcaagcugaucaacaucaucaucugguuccugcuccuguccgugugccugggcagccucaucuacuccacggccgcccuggggguccugaugagcaaccucggcaugcccuccuacugcaccggguaccgcgagggcuaccugaacagcaccaacgugaccaucgcgacguacugcaccggcuccauccccugcagcgugugccuguccgggcucgacagccuggacaccuaccccucccuggagaccauccagaucacgaucagcuccuucaagugggaccucaccgccuucggccuggucgccgagugguuccuggccuacauccucuucacccgguucuucuacgugcuggggcuggccgcgaucaugcagcucuucuucagcuacuucgccgugcacuucaucuccaacagcuggcugauguggcugaucaucaaccugguccagauggccccgaucuccgccauggugcgcauguacaucuucuucgcgagcuucuacuacguguggaagagcuacguccacgugguggacggcugcaacuccagcaccugcaugaugugcuacaagcggaaccgcgccacgcgggucgagugcaccaccaucgugaacgggguccgccgguccuucuacguguacgccaacggcggcaagggguucugcaagcuccacaacuggaacugcgugaacugcgacaccuucugcgccggcagcacguucaucuccgacgaggucgcccgcgaccugagccugcaguucaagcggcccaucaaccccaccgaccaguccagcuacaucguggacuccgugaccgucaagaacgggagcauccaccucuacuucgacaaggcgggccagaagaccuacgagcgccacucccugagccacuucgugaaccuggacaaccuccgggccaacaacacgaaggggucccugcccaucaacgugaucgucuucgacggcaagagcaagugcgaggaguccagcgccaaguccgccagcguguacuacucccagcugaugugccagccgauccuccugcuggaccaggcccucgugagcgacgucggcgacagcgcggagguggccgugaagauguucgacgccuacgucaacaccuucuccagcaccuucaacgugcccauggagaagcugaagacccugguggccacggccgaggcggagcucgccaagaacgucucccuggacaacgugcugagcaccuucaucuccgccgcccgccagggguucguggacagcgacgucgagaccaaggacgugguggagugccucaagcugucccaccagagcgacaucgaggucaccggcgacuccugcaacaacuacaugcugacguacaacaagguggagaacaugaccccccgggaccucggggcgugcaucgacugcagcgcccgccacaucaacgcccagguggccaagucccacaacaucgcccugaucuggaacgucaaggacuucaugagccuguccgagcagcuccggaagcagauccgcagcgcggccaagaagaacaaccugcccuucaagcugaccugcgccaccacgcgccagguggugaacgucgugaccaccaagaucgcccucaagggcggguga

SEQ ID NO: 17835 - RNA, 5841 nt, Artificial Sequence
  SARS-CoV-2__MT810570.1__non-structural protein 3 (NSP3) CDS gc
auggcccccaccaaggugaccuucggcgacgacacggucaucgaggugcagggguacaagagcgugaacaucaccuucgagcuggacgagcgcaucgacaagguccucaacgagaagugcuccgccuacaccguggagcugggcaccgaggugaacgaguucgcgugcgucguggccgacgccgugaucaagacgcugcagccggucagcgagcuccugaccccccuggggaucgaccucgacgagugguccauggccaccuacuaccuguucgacgagagcggcgaguucaagcuggccucccacauguacugcagcuucuacccccccgacgaggacgaggaggagggggacugcgaggaggaggaguucgagccguccacccaguacgaguacggcacggaggacgacuaccagggcaagccccucgaguucggggcgaccagcgccgcccugcagcccgaggaggagcaggaggaggacuggcuggacgacgacucccagcagaccgugggccagcaggacgggagcgaggacaaccagaccacgaccauccagaccaucguggagguccagccccagcucgagauggagcugaccccgguggugcagacgaucgaggucaacuccuucagcggcuaccugaagcucaccgacaacguguacaucaagaacgccgacaucguggaggaggcgaagaaggucaagcccaccgugguggucaacgccgccaacguguaccugaagcacgggggcggcguggccggggcccugaacaaggcgaccaacaacgccaugcaggucgaguccgacgacuacaucgccacgaacggcccccucaagguggggggcagcugcguccuguccggccacaaccuggccaagcacugccuccacgugguggggcccaacgucaacaagggcgaggacauccagcugcugaagagcgccuacgagaacuucaaccagcacgaggugcuccuggcgccgcugcucuccgccgggaucuucggcgccgaccccauccacagccugcgggugugcgucgacaccgugcgcaccaacguguaccuggccgucuucgacaagaaccucuacgacaagcugguguccagcuuccuggagaugaagagcgagaagcagguggagcagaagaucgccgagauccccaaggaggaggucaagcccuucaucaccgaguccaagccgagcguggagcagcggaagcaggacgacaagaagaucaaggcgugcguggaggaggucacgaccacccucgaggagaccaaguuccugacggagaaccugcuccuguacaucgacaucaacgggaaccugcaccccgacuccgccacccucgugagcgacaucgacaucaccuuccugaagaaggacgcccccuacaucgugggcgacgucgugcaggagggcgugcugaccgccgucgugauccccacgaagaaggccgggggcaccaccgagaugcucgcgaaggcccugcgcaaggugccgaccgacaacuacaucacgaccuaccccgggcagggccugaacggguacaccgucgaggaggccaagaccgugcucaagaagugcaaguccgccuucuacauccugcccagcaucaucuccaacgagaagcaggagauccugggcaccgugagcuggaaccuccgggagaugcuggcgcacgccgaggagacgcgcaagcugaugcccgucugcguggagaccaaggccaucguguccaccauccagcggaaguacaagggcaucaagauccaggagggggucguggacuacggcgcccgcuucuacuucuacaccagcaagacgaccguggccucccugaucaacacccucaacgaccugaacgagacccuggucacgaugccgcucggguacgugacccacggccugaaccuggaggaggcggcccgguacaugcgcagccucaaggugcccgccaccgucuccgugagcucccccgacgccgugaccgccuacaacggguaccugacgagcuccagcaagacccccgaggagcacuucaucgagaccaucucccuggcgggcagcuacaaggacuggagcuacuccggccagagcacccagcucgggaucgaguuccugaagcggggcgacaaguccgucuacuacacgagcaacccgaccaccuuccaccuggacggggaggugaucaccuucgacaaccucaagacgcugcugucccuccgcgaggugcggaccaucaaggucuucaccaccguggacaacaucaaccugcacacgcagguggucgacaugagcaugaccuacggccagcaguucggccccaccuaccuggacggggccgacgugaccaagaucaagccccacaacucccacgagggcaagacguucuacgugcucccgaacgacgacacccugcgcgucgaggccuucgaguacuaccacaccaccgaccccagcuuccuggggcgguacauguccgcccucaaccacacgaagaaguggaaguacccccaggugaacggccugaccagcaucaagugggccgacaacaacugcuaccuggcgaccgcccuccugacccugcagcagaucgagcucaaguucaaccccccggcccugcaggacgccuacuaccgcgcgcgggccggggaggccgccaacuucugcgcccugauccucgcguacugcaacaagacggugggcgagcugggcgacguccgcgagaccauguccuaccuguuccagcacgccaaccucgacagcugcaagcgggugcugaacgucgugugcaagaccugcgggcagcagcagaccacccugaagggcguggaggccgucauguacauggggacgcucuccuacgagcaguucaagaagggcgugcagauccccugcaccugcgggaagcaggccaccaaguaccuggugcagcaggagagccccuucgucaugauguccgcccccccggcgcaguacgagcugaagcacggcaccuucacgugcgccagcgaguacaccggcaacuaccagugcgggcacuacaagcacaucaccuccaaggagacccucuacugcaucgacggcgcccugcugacgaagagcagcgaguacaaggggcccaucaccgacguguucuacaaggagaacuccuacaccaccacgaucaagcccgugaccuacaagcucgacggcgucgugugcaccgagaucgaccccaagcuggacaacuacuacaagaaggacaacagcuacuucaccgagcagccgaucgaccuggugcccaaccagcccuaccccaacgccuccuucgacaacuucaaguucgucugcgacaacaucaaguucgccgacgaccucaaccagcugacgggguacaagaagccggcgagccgcgagcugaaggugaccuucuuccccgaccucaacggcgacguggucgccaucgacuacaagcacuacacccccuccuucaagaagggcgccaagcugcugcacaagcccaucguguggcacgugaacaacgccaccaacaaggcgacguacaagccgaacaccuggugcauccggugccucuggagcaccaagcccgucgagaccuccaacagcuucgacgugcugaaguccgaggacgcccaggggauggacaaccuggccugcgaggaccucaagcuggugagcgaggaggucguggagaaccccacgauccagaaggacgugcuggagugcaacgucaagaccaccgagguggugggcgacaucauccucaagcccgccaacaacucccugaagaucaccgaggaggucgggcacacggaccugauggccgcguacguggacaacagcucccucaccaucaagaagccgaacgagcugagccgcgugcugggccucaagacccuggccacccacgggcuggccgccgucaacuccgugcccugggacacgaucgccaacuacgcgaagcccuuccucaacaagguggucagcaccaccaccaacaucgugacgcgcugccugaaccgggugugcaccaacuacaugccguacuucuucacccugcuccugcagcugugcaccuucacccgcuccacgaacagccggaucaaggccuccaugcccaccaccaucgccaagaacaccgucaagagcgugggcaaguucugccucgaggccagcuucaacuaccugaagucccccaacuucagcaagcugaucaacaucaucaucugguuccuccugcuguccgugugccucggcagccugaucuacuccacggccgcgcuggggguccucaugagcaaccugggcaugcccuccuacugcaccggguaccgcgagggcuaccugaacagcaccaacgugaccaucgccacguacugcaccggcuccaucccgugcagcgugugccucuccgggcuggacagccuggacaccuaccccucccucgagaccauccagaucacgaucagcuccuucaagugggaccugaccgccuucggccuggucgccgagugguuccucgccuacauccuguucacccgguucuucuacgugcuggggcucgcggccaucaugcagcuguucuucagcuacuucgccgugcacuucaucuccaacagcuggcugauguggcugaucaucaaccucguccagauggcccccaucuccgcgauggugcgcauguacaucuucuucgccagcuucuacuacguguggaagagcuacguccacgugguggacggcugcaacuccagcaccugcaugaugugcuacaagcggaaccgcgccacgcgggucgagugcaccaccaucgugaacgggguccgccgguccuucuacguguacgccaacggcggcaagggguucugcaagcugcacaacuggaacugcgugaacugcgacaccuucugcgccggcagcacguucaucuccgacgaggucgcgcgcgaccugagccuccaguucaagcggcccaucaacccgaccgaccaguccagcuacaucguggacuccgugaccgucaagaacgggagcauccaccuguacuucgacaaggccggccagaagaccuacgagcgccacucccugagccacuucgugaaccucgacaaccugcgggccaacaacacgaaggggucccugcccaucaacgugaucgucuucgacggcaagagcaagugcgaggaguccagcgccaaguccgccagcguguacuacucccagcucaugugccagcccauccugcugcucgaccaggcgcuggugagcgacgucggcgacagcgccgagguggccgugaagauguucgacgccuacgucaacaccuucuccagcaccuucaacgugcccauggagaagcugaagacccucguggccacggcggaggccgagcuggccaagaacgucucccuggacaacgugcucagcaccuucaucuccgccgcgcgccagggguucguggacagcgacgucgagaccaaggacgugguggagugccugaagcugucccaccagagcgacaucgaggucaccggcgacuccugcaacaacuacaugcucacguacaacaagguggagaacaugaccccgcgggaccugggggccugcaucgacugcagcgcccgccacaucaacgcccagguggccaagucccacaacaucgcgcugaucuggaacgucaaggacuucaugagccucuccgagcagcugcggaagcagauccgcagcgccgccaagaagaacaaccugcccuucaagcucaccugcgccaccacgcgccagguggugaacgucgugaccaccaagaucgcccugaagggcggguga

SEQ ID NO: 17836 - RNA, 5841 nt, Artificial Sequence
  SARS-CoV-2__MT810589.1__non-structural protein 3 (NSP3) CDS gc
auggcccccaccaaggugaccuucggcgacgacacggucaucgaggugcagggguacaagagcgugaacaucaccuucgagcuggacgagcgcaucgacaagguccucaacgagaagugcuccgccuacaccguggagcugggcaccgaggugaacgaguucgcgugcgucguggccgacgccgugaucaagacgcugcagccggucagcgagcuccugaccccccuggggaucgaccucgacgagugguccauggccaccuacuaccuguucgacgagagcggcgaguucaagcuggccucccacauguacugcagcuucuacccccccgacgaggacgaggaggagggggacugcgaggaggaggaguucgagccguccacccaguacgaguacggcacggaggacgacuaccagggcaagccccucgaguucggggcgaccagcgccgcccugcagcccgaggaggagcaggaggaggacuggcuggacgacgacucccagcagaccgugggccagcaggacgggagcgaggacaaccagaccacgaccauccagaccaucguggagguccagccccagcucgagauggagcugaccccgguggugcagacgaucgaggucaacuccuucagcggcuaccugaagcucaccgacaacguguacaucaagaacgccgacaucguggaggaggcgaagaaggucaagcccaccgugguggucaacgccgccaacguguaccugaagcacgggggcggcguggccggggcccugaacaaggcgaccaacaacgccaugcaggucgaguccgacgacuacaucgccacgaacggcccccucaagguggggggcagcugcguccuguccggccacaaccuggccaagcacugccuccacgugguggggcccaacgucaacaagggcgaggacauccagcugcugaagagcgccuacgagaacuucaaccagcacgaggugcuccuggcgccgcugcucuccgccgggaucuucggcgccgaccccauccacagccugcgggugugcgucgacaccgugcgcaccaacguguaccuggccgucuucgacaagaaccucuacgacaagcugguguccagcuuccuggagaugaagagcgagaagcagguggagcagaagaucgccgagauccccaaggaggaggucaagcccuucaucaccgaguccaagccgagcguggagcagcggaagcaggacgacaagaagaucaaggcgugcguggaggaggucacgaccacccucgaggagaccaaguuccugacggagaaccugcuccuguacaucgacaucaacgggaaccugcaccccgacuccgccacccucgugagcgacaucgacaucaccuuccugaagaaggacgcccccuacaucgugggcgacgucgugcaggagggcgugcugaccgccgucgugauccccacgaagaaggccgggggcaccaccgagaugcucgcgaaggcccugcgcaaggugccgaccgacaacuacaucacgaccuaccccgggcagggccugaacggguacaccgucgaggaggccaagaccgugcucaagaagugcaaguccgccuucuacauccugcccagcaucaucuccaacgagaagcaggagauccugggcaccgugagcuggaaccuccgggagaugcuggcgcacgccgaggagacgcgcaagcugaugcccgucugcguggagaccaaggccaucguguccaccauccagcggaaguacaagggcaucaagauccaggagggggucguggacuacggcgcccgcuucuacuucuacaccagcaagacgaccguggccucccugaucaacacccucaacgaccugaacgagacccuggucacgaugccgcucggguacgugacccacggccugaaccuggaggaggcggcccgguacaugcgcagccucaaggugcccgccaccgucuccgugagcucccccgacgccgugaccgccuacaacggguaccugacgagcuccagcaagacccccgaggagcacuucaucgagaccaucucccuggcgggcagcuacaaggacuggagcuacuccggccagagcacccagcucgggaucgaguuccugaagcggggcgacaaguccgucuacuacacgagcaacccgaccaccuuccaccuggacggggaggugaucaccuucgacaaccucaagacgcugcugucccuccgcgaggugcggaccaucaaggucuucaccaccguggacaacaucaaccugcacacgcagguggucgacaugagcaugaccuacggccagcaguucggccccaccuaccuggacggggccgacgugaccaagaucaagccccacaacucccacgagggcaagacguucuacgugcucccgaacgacgacacccugcgcgucgaggccuucgaguacuaccacaccaccgaccccagcuuccuggggcgguacauguccgcccucaaccacacgaagaaguggaaguacccccaggugaacggccugaccagcaucaagugggccgacaacaacugcuaccuggcgaccgcccuccugacccugcagcagaucgagcucaaguucaaccccccggcccugcaggacgccuacuaccgcgcgcgggccggggaggccgccaacuucugcgcccugauccucgcguacugcaacaagacggugggcgagcugggcgacguccgcgagaccauguccuaccuguuccagcacgccaaccucgacagcugcaagcgggugcugaacgucgugugcaagaccugcgggcagcagcagaccacccugaagggcguggaggccgucauguacauggggacgcucuccuacgagcaguucaagaagggcgugcagauccccugcaccugcgggaagcaggccaccaaguaccuggugcagcaggagagccccuucgucaugauguccgcccccccggcgcaguacgagcugaagcacggcaccuucacgugcgccagcgaguacaccggcaacuaccagugcgggcacuacaagcacaucaccuccaaggagacccucuacugcaucgacggcgcccugcugacgaagagcagcgaguacaaggggcccaucaccgacguguucuacaaggagaacuccuacaccaccacgaucaagcccgugaccuacaagcucgacggcgucgugugcaccgagaucgaccccaagcuggacaacuacuacaagaaggacaacagcuacuucaccgagcagccgaucgaccuggugcccaaccagcccuaccccaacgccuccuucgacaacuucaaguucgucugcgacaacaucaaguucgccgacgaccucaaccagcugacgggguacaagaagccggcgagccgcgagcugaaggugaccuucuuccccgaccucaacggcgacguggucgccaucgacuacaagcacuacacccccuccuucaagaagggcgccaagcugcugcacaagcccaucguguggcacgugaacaacgccaccaacaaggcgacguacaagccgaacaccuggugcauccggugccucuggagcaccaagcccgucgagaccuccaacagcuucgacgugcugaaguccgaggacgcccaggggauggacaaccuggccugcgaggaccucaagcccgugagcgaggaggucguggagaaccccacgauccagaaggacgugcuggagugcaacgucaagaccaccgagguggugggcgacaucauccugaagccggccaacaacucccucaagaucaccgaggaggucgggcacacggaccugauggccgcguacguggacaacagcucccugaccaucaagaagcccaacgagcucagccgcgugcugggccugaagacccucgccauccacgggcuggccgccgucaacuccgugcccugggacaccaucgccaacuacgcgaagccguuccugaacaagguggucagcacgaccaccaacaucgugacccgcugccucaaccgggugugcacgaacuacaugcccuacuucuucacccugcugcuccagcugugcaccuucacccgcuccaccaacagccggaucaaggccuccaugcccacgaccaucgccaagaacaccgucaagagcgugggcaaguucugccuggaggccagcuucaacuaccucaagucccccaacuucagcaagcugaucaacaucaucaucugguuccugcuccuguccgugugccugggcagccucaucuacuccaccgccgcgcuggggguccugaugagcaaccucggcaugccguccuacugcacgggguaccgcgagggcuaccugaacagcaccaacgugaccaucgccaccuacugcacgggcuccauccccugcagcgugugccuguccgggcucgacagccuggacaccuaccccucccuggagaccauccagaucaccaucagcuccuucaagugggaccucacggccuucggccuggucgccgagugguuccuggccuacauccucuucacccgguucuucuacgugcuggggcuggcggccaucaugcagcucuucuucagcuacuucgccgugcacuucaucuccaacagcuggcugauguggcugaucaucaaccugguccagauggcccccaucuccgcgauggugcgcauguacaucuucuucgccagcuucuacuacguguggaagagcuacguccacgugguggacggcugcaacuccagcaccugcaugaugugcuacaagcggaaccgcgccacccgggucgagugcacgaccaucgugaacgggguccgccgguccuucuacguguacgccaacggcggcaagggguucugcaagcuccacaacuggaacugcgugaacugcgacaccuucugcgccggcagcaccuucaucuccgacgaggucgcgcgcgaccugagccugcaguucaagcggccgaucaaccccacggaccaguccagcuacaucguggacuccgugaccgucaagaacgggagcauccaccucuacuucgacaaggccggccagaagaccuacgagcgccacucccugagccacuucgugaaccuggacaaccuccgggccaacaacaccaaggggucccugcccaucaacgugaucgucuucgacggcaagagcaagugcgaggaguccagcgccaaguccgccagcguguacuacucccagcugaugugccagcccauccuccugcuggaccaggcgcucgugagcgacgucggcgacagcgccgagguggccgugaagauguucgacgccuacgucaacacguucuccagcaccuucaacgugccgauggagaagcugaagacccugguggccaccgcggaggccgagcucgccaagaacgucucccuggacaacgugcugagcacguucaucuccgccgcgcgccagggguucguggacagcgacgucgagaccaaggacgugguggagugccucaagcugucccaccagagcgacaucgaggucaccggcgacuccugcaacaacuacaugcugaccuacaacaagguggagaacaugacgccccgggaccucggggccugcaucgacugcagcgcccgccacaucaacgcccagguggccaagucccacaacaucgcgcugaucuggaacgucaaggacuucaugagccuguccgagcagcuccggaagcagauccgcagcgccgccaagaagaacaaccugcccuucaagcugaccugcgccaccacccgccagguggugaacgucgugacgaccaagaucgcccucaagggcggguga

SEQ ID NO: 17837 - RNA, 5841 nt, Artificial Sequence
  SARS-CoV-2__MT810599.1__non-structural protein 3 (NSP3) CDS gc
auggcccccaccaaggugaccuucggcgacgacacggucaucgaggugcagggguacaagagcgugaacaucaccuucgagcuggacgagcgcaucgacaagguccucaacgagaagugcuccgccuacaccguggagcugggcaccgaggugaacgaguucgcgugcgucguggccgacgccgugaucaagacgcugcagccggucagcgagcuccugaccccccuggggaucgaccucgacgagugguccauggccaccuacuaccuguucgacgagagcggcgaguucaagcuggccucccacauguacugcagcuucuacccccccgacgaggacgaggaggagggggacugcgaggaggaggaguucgagccguccacccaguacgaguacggcacggaggacgacuaccagggcaagccccucgaguucggggcgaccagcgccgcccugcagcccgaggaggagcaggaggaggacuggcuggacgacgacucccagcagaccgugggccagcaggacgggagcgaggacaaccagaccacgaccauccagaccaucguggagguccagccccagcucgagauggagcugaccccgguggugcagacgaucgaggucaacuccuucagcggcuaccugaagcucaccgacaacguguacaucaagaacgccgacaucguggaggaggcgaagaaggucaagcccaccgugguggucaacgccgccaacguguaccugaagcacgggggcggcguggccggggcccugaacaaggcgaccaacaacgccaugcaggucgaguccgacgacuacaucgccacgaacggcccccucaagguggggggcagcugcguccuguccggccacaaccuggccaagcacugccuccacgugguggggcccaacgucaacaagggcgaggacauccagcugcugaagagcgccuacgagaacuucaaccagcacgaggugcuccuggcgccgcugcucuccgccgggaucuucggcgccgaccccauccacagccugcgggugugcgucgacaccgugcgcaccaacguguaccuggccgucuucgacaagaaccucuacgacaagcugguguccagcuuccuggagaugaagagcgagaagcagguggagcagaagaucgccgagauccccaaggaggaggucaagcccuucaucaccgaguccaagccgagcguggagcagcggaagcaggacgacaagaagaucaaggcgugcguggaggaggucacgaccacccucgaggagaccaaguuccugacggagaaccugcuccuguacaucgacaucaacgggaaccugcaccccgacuccgccacccucgugagcgacaucgacaucaccuuccugaagaaggacgcccccuacaucgugggcgacgucgugcaggagggcgugcugaccgccgucgugauccccacgaagaaggccgggggcaccaccgagaugcucgcgaaggcccugcgcaaggugccgaccgacaacuacaucacgaccuaccccgggcagggccugaacggguacaccgucgaggaggccaagaccgugcucaagaagugcaaguccgccuucuacauccugcccagcaucaucuccaacgagaagcaggagauccugggcaccgugagcuggaaccuccgggagaugcuggcgcacgccgaggagacgcgcaagcugaugcccgucugcguggagaccaaggccaucguguccaccauccagcggaaguacaagggcaucaagauccaggagggggucguggacuacggcgcccgcuucuacuucuacaccagcaagacgaccguggccucccugaucaacacccucaacgaccugaacgagacccuggucacgaugccgcucggguacgugacccacggccugaaccuggaggaggcggcccgguacaugcgcagccucaaggugcccgccaccgucuccgugagcucccccgacgccgugaccgccuacaacggguaccugacgagcuccagcaagacccccgaggagcacuucaucgagaccaucucccuggcgggcagcuacaaggacuggagcuacuccggccagagcacccagcucgggaucgaguuccugaagcggggcgacaaguccgucuacuacacgagcaacccgaccaccuuccaccuggacggggaggugaucaccuucgacaaccucaagacgcugcugucccuccgcgaggugcggaccaucaaggucuucaccaccguggacaacaucaaccugcacacgcagguggucgacaugagcaugaccuacggccagcaguucggccccaccuaccuggacggggccgacgugaccaagaucaagccccacaacucccacgagggcaagacguucuacgugcucccgaacgacgacacccugcgcgucgaggccuucgaguacuaccacaccaccgaccccagcuuccuggggcgguacauguccgcccucaaccacacgaagaaguggaaguaccugcaggugaacggccugaccagcaucaagugggccgacaacaacugcuaccucgcgaccgcccugcugacccuccagcagaucgagcugaaguucaacccccccgcccugcaggacgccuacuaccgcgcgcgggccggggaggccgccaacuucugcgcccucauccuggcguacugcaacaagacggugggcgagcugggcgacguccgcgagaccauguccuaccucuuccagcacgccaaccuggacagcugcaagcgggugcugaacgucgugugcaagaccugcgggcagcagcagaccacccucaagggcguggaggccgucauguacauggggacgcuguccuacgagcaguucaagaagggcgugcagaucccgugcaccugcgggaagcaggccaccaaguaccuggugcagcaggagagccccuucgucaugauguccgccccccccgcgcaguacgagcucaagcacggcaccuucacgugcgccagcgaguacaccggcaacuaccagugcgggcacuacaagcacaucaccuccaaggagacccuguacugcaucgacggcgcccugcucacgaagagcagcgaguacaaggggccgaucaccgacguguucuacaaggagaacuccuacaccaccacgaucaagcccgugaccuacaagcuggacggcgucgugugcaccgagaucgaccccaagcuggacaacuacuacaagaaggacaacagcuacuucaccgagcagcccaucgaccucgugccgaaccagcccuaccccaacgccuccuucgacaacuucaaguucgucugcgacaacaucaaguucgccgacgaccugaaccagcugacgggguacaagaagcccgcgagccgcgagcucaaggugaccuucuucccggaccugaacggcgacguggucgccaucgacuacaagcacuacacccccuccuucaagaagggcgccaagcugcuccacaagcccaucguguggcacgugaacaacgccaccaacaaggcgacguacaagcccaacaccuggugcauccggugccuguggagcaccaagccggucgagaccuccaacagcuucgacgugcugaaguccgaggacgcccaggggauggacaaccucgccugcgaggaccugaagcccgugagcgaggaggucguggagaaccccacgauccagaaggacgugcuggagugcaacgucaagaccaccgagguggugggcgacaucauccucaagcccgccaacaacucccugaagaucaccgaggaggucgggcacacggaccugauggccgcguacguggacaacagcucccucaccaucaagaagccgaacgagcugagccgcgugcugggccucaagacccuggccacccacgggcuggccgccgucaacuccgugcccugggacacgaucgccaacuacgcgaagcccuuccucaacaagguggucagcaccaccaccaacaucgugacgcgcugccugaaccgggugugcaccaacuacaugccguacuucuucacccugcuccugcagcugugcaccuucacccgcuccacgaacagccggaucaaggccuccaugcccaccaccaucgccaagaacaccgucaagagcgugggcaaguucugccucgaggccagcuucaacuaccugaagucccccaacuucagcaagcugaucaacaucaucaucugguuccuccugcuguccgugugccucggcagccugaucuacuccacggccgcgcuggggguccucaugagcaaccugggcaugcccuccuacugcaccggguaccgcgagggcuaccugaacagcaccaacgugaccaucgccacguacugcaccggcuccaucccgugcagcgugugccucuccgggcuggacagccuggacaccuaccccucccucgagaccauccagaucacgaucagcuccuucaagugggaccugaccgccuucggccuggucgccgagugguuccucgccuacauccuguucacccgguucuucuacgugcuggggcucgcggccaucaugcagcuguucuucagcuacuucgccgugcacuucaucuccaacagcuggcugauguggcugaucaucaaccucguccagauggcccccaucuccgcgauggugcgcauguacaucuucuucgccagcuucuacuacguguggaagagcuacguccacgugguggacggcugcaacuccagcaccugcaugaugugcuacaagcggaaccgcgccacgcgggucgagugcaccaccaucgugaacgggguccgccgguccuucuacguguacgccaacggcggcaagggguucugcaagcugcacaacuggaacugcgugaacugcgacaccuucugcgccggcagcacguucaucuccgacgaggucgcgcgcgaccugagccuccaguucaagcggcccaucaacccgaccgaccaguccagcuacaucguggacuccgugaccgucaagaacgggagcauccaccuguacuucgacaaggccggccagaagaccuacgagcgccacucccugagccacuucgugaaccucgacaaccugcgggccaacaacacgaaggggucccugcccaucaacgugaucgucuucgacggcaagagcaagugcgaggaguccagcgccaaguccgccagcguguacuacucccagcucaugugccagcccauccugcugcucgaccaggcgcuggugagcgacgucggcgacagcgccgagguggccgugaagauguucgacgccuacgucaacaccuucuccagcaccuucaacgugcccauggagaagcugaagacccucguggccacggcggaggccgagcuggccaagaacgucucccuggacaacgugcucagcaccuucaucuccgccgcgcgccagggguucguggacagcgacgucgagaccaaggacgugguggagugccugaagcugucccaccagagcgacaucgaggucaccggcgacuccugcaacaacuacaugcucacguacaacaagguggagaacaugaccccgcgggaccugggggccugcaucgacugcagcgcccgccacaucaacgcccagguggccaagucccacaacaucgcgcugaucuggaacgucaaggacuucaugagccucuccgagcagcugcggaagcagauccgcagcgccgccaagaagaacaaccugcccuucaagcucaccugcgccaccacgcgccagguggugaacgucgugaccaccaagaucgcccugaagggcggguga

SEQ ID NO: 17838 - RNA, 5841 nt, Artificial Sequence
  SARS-CoV-2__MT810624.1__non-structural protein 3 (NSP3) CDS gc
auggcccccaccaaggugaccuucggcgacgacacggucaucgaggugcagggguacaagagcgugaacaucaccuucgagcuggacgagcgcaucgacaagguccucaacgagaagugcuccgccuacaccguggagcugggcaccgaggugaacgaguucgcgugcgucguggccgacgccgugaucaagacgcugcagccggucagcgagcuccugaccccccuggggaucgaccucgacgagugguccauggccaccuacuaccuguucgacgagagcggcgaguucaagcuggccucccacauguacugcagcuucuacccccccgacgaggacgaggaggagggggacugcgaggaggaggaguucgagccguccacccaguacgaguacggcacggaggacgacuaccagggcaagccccucgaguucggggcgaccagcgccgcccugcagcccgaggaggagcaggaggaggacuggcuggacgacgacucccagcagaccgugggccagcaggacgggagcgaggacaaccagaccacgaccauccagaccaucguggagguccagccccagcucgagauggagcugaccccgguggugcagacgaucgaggucaacuccuucagcggcuaccugaagcucaccgacaacguguacaucaagaacgccgacaucguggaggaggcgaagaaggucaagcccaccgugguggucaacgccgccaacguguaccugaagcacgggggcggcguggccggggcccugaacaaggcgaccaacaacgccaugcaggucgaguccgacgacuacaucgccacgaacggcccccucaagguggggggcagcugcguccuguccggccacaaccuggccaagcacugccuccacgugguggggcccaacgucaacaagggcgaggacauccagcugcugaagagcgccuacgagaacuucaaccagcacgaggugcuccuggcgccgcugcucuccgccgggaucuucggcgccgaccccauccacagccugcgggugugcgucgacaccgugcgcaccaacguguaccuggccgucuucgacaagaaccucuacgacaagcugguguccagcuuccuggagaugaagagcgagaagcagguggagcagaagaucgccgagauccccaaggaggaggucaagcccuucaucaccgaguccaagccgagcguggagcagcggaagcaggacgacaagaagaucaaggcgugcguggaggaggucacgaccacccucgaggagaccaaguuccugacggagaaccugcuccuguacaucgacaucaacgggaaccugcaccccgacuccgccacccucgugagcgacaucgacaucaccuuccugaagaaggacgcccccuacaucgugggcgacgucgugcaggagggcgugcugaccgccgucgugauccccacgaagaaggccgggggcaccaccgagaugcucgcgaaggcccugcgcaaggugccgaccgacaacuacaucacgaccuaccccgggcagggccugaacggguacaccgucgaggaggccaagaccgugcucaagaagugcaaguccgccuucuacauccugcccagcaucaucuccaacgagaagcaggagauccugggcaccgugagcuggaaccuccgggagaugcuggcgcacgccgaggagacgcgcaagcugaugcccgucugcguggagaccaaggccaucguguccaccauccagcggaaguacaagggcaucaagauccaggagggggucguggacuacggcgcccgcuucuacuucuacaccagcaagacgaccguggccucccugaucaacacccucaacgaccugaacgagacccuggucacgaugccgcucggguacgugacccacggccugaaccuggaggaggcggcccgguacaugcgcagccucaaggugcccgccaccgucuccgugagcucccccgacgccgugaccgccuacaacggguaccugacgagcuccagcaagacccccgaggagcacuucaucgagaccaucucccuggcgggcagcuacaaggacuggagcuacuccggccagagcacccagcucgggaucgaguuccugaagcggggcgacaaguccgucuacuacacgagcaacccgaccaccuuccaccuggacggggaggugaucaccuucgacaaccucaagacgcugcugucccuccgcgaggugcggaccaucaaggucuucaccaccguggacaacaucaaccugcacacgcagguggucgacaugagcaugaccuacggccagcaguucggccccaccuaccuggacggggccgacgugaccaagaucaagccccacaacucccacgagggcaagacguucuacgugcucccgaacgacgacacccugcgcgucgaggccuucgaguacuacuacaccaccgaccccagcuuccuggggcgguacauguccgcccucaaccacacgaagaaguggaaguacccccaggugaacggccugaccagcaucaagugggccgacaacaacugcuaccuggcgaccgcccuccugacccugcagcagaucgagcucaaguucaaccccccggcccugcaggacgccuacuaccgcgcgcgggccggggaggccgccaacuucugcgcccugauccucgcguacugcaacaagacggugggcgagcugggcgacguccgcgagaccauguccuaccuguuccagcacgccaaccucgacagcugcaagcgggugcugaacgucgugugcaagaccugcgggcagcagcagaccacccugaagggcguggaggccgucauguacauggggacgcucuccuacgagcaguucaagaagggcgugcagauccccugcaccugcgggaagcaggccaccaaguaccuggugcagcaggagagccccuucgucaugauguccgcccccccggcgcaguacgagcugaagcacggcaccuucacgugcgccagcgaguacaccggcaacuaccagugcgggcacuacaagcacaucaccuccaaggagacccucuacugcaucgacggcgcccugcugacgaagagcagcgaguacaaggggcccaucaccgacguguucuacaaggagaacuccuacaccaccacgaucaagcccgugaccuacaagcucgacggcgucgugugcaccgagaucgaccccaagcuggacaacuacuacaagaaggacaacagcuacuucaccgagcagccgaucgaccuggugcccaaccagcccuaccccaacgccuccuucgacaacuucaaguucgucugcgacaacaucaaguucgccgacgaccucaaccagcugacgggguacaagaagccggcgagccgcgagcugaaggugaccuucuuccccgaccucaacggcgacguggucgccaucgacuacaagcacuacacccccuccuucaagaagggcgccaagcugcugcacaagcccaucguguggcacgugaacaacgccaccaacaaggcgacguacaagccgaacaccuggugcauccggugccucuggagcaccaagcccgucgagaccuccaacagcuucgacgugcugaaguccgaggacgcccaggggauggacaaccuggccugcgaggaccucaagcccgugagcgaggaggucguggagaaccccacgauccagaaggacgugcuggagugcaacgucaagaccaccgagguggugggcgacaucauccugaagccggccaacaacucccucaagaucaccgaggaggucgggcacacggaccugauggccgcguacguggacaacagcucccugaccaucaagaagcccaacgagcucagccgcgugcugggccugaagacccucgccacccacgggcuggccgccgucaacuccgugcccugggacacgaucgccaacuacgcgaagccguuccugaacaagguggucagcaccaccaccaacaucgugacgcgcugccucaaccgggugugcaccaacuacaugcccuacuucuucacccugcugcuccagcugugcaccuucacccgcuccacgaacagccggaucaaggccuccaugcccaccaccaucgccaagaacaccgucaagagcgugggcaaguucugccuggaggccagcuucaacuaccucaagucccccaacuucagcaagcugaucaacaucaucaucugguuccugcuccuguccgugugccugggcagccucaucuacuccacggccgcgcuggggguccugaugagcaaccucggcaugccguccuacugcaccggguaccgcgagggcuaccugaacagcaccaacgugaccaucgccacguacugcaccggcuccauccccugcagcgugugccuguccgggcucgacagccuggacaccuaccccucccuggagaccauccagaucacgaucagcuccuucaagugggaccucaccgccuucggccuggucgccgagugguuccuggccuacauccucuucacccgguucuucuacgugcuggggcuggcggccaucaugcagcucuucuucagcuacuucgccgugcacuucaucuccaacagcuggcugauguggcugaucaucaaccugguccagauggcccccaucuccgcgauggugcgcauguacaucuucuucgccagcuucuacuacguguggaagagcuacguccacgugguggacggcugcaacuccagcaccugcaugaugugcuacaagcggaaccgcgccacgcgggucgagugcaccaccaucgugaacgggguccgccgguccuucuacguguacgccaacggcggcaagggguucugcaagcuccacaacuggaacugcgugaacugcgacaccuucugcgccggcagcacguucaucuccgacgaggucgcgcgcgaccugagccugcaguucaagcggccgaucaaccccaccgaccaguccagcuacaucguggacuccgugaccgucaagaacgggagcauccaccucuacuucgacaaggccggccagaagaccuacgagcgccacucccugagccacuucgugaaccuggacaaccuccgggccaacaacacgaaggggucccugcccaucaacgugaucgucuucgacggcaagagcaagugcgaggaguccagcgccaaguccgccagcguguacuacucccagcugaugugccagcccauccuccugcuggaccaggcgcucgugagcgacgucggcgacagcgccgagguggccgugaagauguucgacgccuacgucaacaccuucuccagcaccuucaacgugccgauggagaagcugaagacccugguggccacggcggaggccgagcucgccaagaacgucucccuggacaacgugcugagcaccuucaucuccgccgcgcgccagggguucguggacagcgacgucgagaccaaggacgugguggagugccucaagcugucccaccagagcgacaucgaggucaccggcgacuccugcaacaacuacaugcugacguacaacaagguggagaacaugaccccccgggaccucggggccugcaucgacugcagcgcccgccacaucaacgcccagguggccaagucccacaacaucgcgcugaucuggaacgucaaggacuucaugagccuguccgagcagcuccggaagcagauccgcagcgccgccaagaagaacaaccugcccuucaagcugaccugcgccaccacgcgccagguggugaacgucgugaccaccaagaucgcccucaagggcggguga

SEQ ID NO: 17839 - RNA, 5841 nt, Artificial Sequence
  SARS-CoV-2__MT810634.1__non-structural protein 3 (NSP3) CDS gc
auggcccccaccaaggugaccuucggcgacgacacggucaucgaggugcagggguacaagagcgugaacaucaccuucgagcuggacgagcgcaucgacaagguccucaacgagaagugcuccgccuacaccguggagcugggcaccgaggugaacgaguucgcgugcgucguggccgacgccgugaucaagacgcugcagccggucagcgagcuccugaccccccuggggaucgaccucgacgagugguccauggccaccuacuaccuguucgacgagagcggcgaguucaagcuggccucccacauguacugcagcuucuacccccccgacgaggacgaggaggagggggacugcgaggaggaggaguucgagccguccacccaguacgaguacggcacggaggacgacuaccagggcaagccccucgaguucggggcgaccagcgccgcccugcagcccgaggaggagcaggaggaggacuggcuggacgacgacucccagcagaccgugggccagcaggacgggagcgaggacaaccagaccacgaccauccagaccaucguggagguccagccccagcucgagauggagcugaccccgguggugcagacgaucgaggucaacuccuucagcggcuaccugaagcucaccgacaacguguacaucaagaacgccgacaucguggaggaggcgaagaaggucaagcccaccgugguggucaacgccgccaacguguaccugaagcacgggggcggcguggccggggcccugaacaaggcgaccaacaacgccaugcaggucgaguccgacgacuacaucgccacgaacggcccccucaagguggggggcagcugcguccuguccggccacaaccuggccaagcacugccuccacgugguggggcccaacgucaacaagggcgaggacauccagcugcugaagagcgccuacgagaacuucaaccagcacgaggugcuccuggcgccgcugcucuccgccgggaucuucggcgccgaccccauccacagccugcgggugugcgucgacaccgugcgcaccaacguguaccuggccgucuucgacaagaaccucuacgacaagcugguguccagcuuccuggagaugaagagcgagaagcagguggagcagaagaucgccgagauccccaaggaggaggucaagcccuucaucaccgaguccaagccgagcguggagcagcggaagcaggacgacaagaagaucaaggcgugcguggaggaggucacgaccacccucgaggagaccaaguuccugacggagaaccugcuccuguacaucgacaucaacgggaaccugcaccccgacuccgccacccucgugagcgacaucgacaucaccuuccugaagaaggacgcccccuacaucgugggcgacgucgugcaggagggcgugcugaccgccgucgugauccccacgaagaaggccgggggcaccaccgagaugcucgcgaaggcccugcgcaaggugccgaccgacaacuacaucacgaccuaccccgggcagggccugaacggguacaccgucgaggaggccaagaccgugcucaagaagugcaaguccgccuucuacauccugcccagcaucaucuccaacgagaagcaggagauccugggcaccgugagcuggaaccuccgggagaugcuggcgcacgccgaggagacgcgcaagcugaugcccgucugcguggagaccaaggccaucguguccaccauccagcggaaguacaagggcaucaagauccaggagggggucguggacuacggcgcccgcuucuacuucuacaccagcaagacgaccguggccucccugaucaacacccucaacgaccugaacgagacccuggucacgaugccgcucggguacgugacccacggccugaaccuggaggaggcggcccgguacaugcgcagccucaaggugcccgccaccgucuccgugagcucccccgacgccgugaccgccuacaacggguaccugacgagcuccagcaagacccccgaggagcacuucaucgagaccaucucccuggcgggcagcuacaaggacuggagcuacuccggccagagcacccagcucgggaucgaguuccugaagcggggcgacaaguccgucuacuacacgagcaacccgaccaccuuccaccuguacggggaggugaucaccuucgacaaccucaagacgcugcugucccuccgcgaggugcggaccaucaaggucuucaccaccguggacaacaucaaccugcacacgcagguggucgacaugagcaugaccuacggccagcaguucggccccaccuaccuggacggggccgacgugaccaagaucaagccccacaacucccacgagggcaagacguucuacgugcucccgaacgacgacacccugcgcgucgaggccuucgaguacuaccacaccaccgaccccagcuuccuggggcgguacaucuccgcccucaaccacacgaagaaguggaaguacccccaggugaacggccugaccagcaucaagugggccgacaacaacugcuaccuggcgaccgcccuccugacccugcagcagaucgagcucaaguucaaccccccggcccugcaggacgccuacuaccgcgcgcgggccggggaggccgccaacuucugcgcccugauccucgcguacugcaacaagacggugggcgagcugggcgacguccgcgagaccauguccuaccuguuccagcacgccaaccucgacagcugcaagcgggugcugaacgucgugugcaagaccugcgggcagcagcagaccacccugaagggcguggaggccgucauguacauggggacgcucuccuacgagcaguucaagaagggcgugcagauccccugcaccugcgggaagcaggccaccaaguaccuggugcagcaggagagccccuucgucaugauguccgcccccccggcgcaguacgagcugaagcacggcaccuucacgugcgccagcgaguacaccggcaacuaccagugcgggcacuacaagcacaucaccuccaaggagacccucuacugcaucgacggcgcccugcugacgaagagcagcgaguacaaggggcccaucaccgacguguucuacaaggagaacuccuacaccaccacgaucaagcccgugaccuacaagcucgacggcgucgugugcaccgagaucgaccccaagcuggacaacuacuacaagaaggacaacagcuacuucaccgagcagccgaucgaccuggugcccaaccagcccuaccccaacgccuccuucgacaacuucaaguucgucugcgacaacaucaaguucgccgacgaccucaaccagcugacgggguacaagaagccggcgagccgcgagcugaaggugaccuucuuccccgaccucaacggcgacguggucgccaucgacuacaagcacuacacccccuccuucaagaagggcgccaagcugcugcacaagcccaucguguggcacgugaacaacgccaccaacaaggcgacguacaagccgaacaccuggugcauccggugccucuggagcaccaagcccgucgagaccuccaacagcuucgacgugcugaaguccgaggacgcccaggggauggacaaccuggccugcgaggaccucaagcccgugagcgaggaggucguggagaaccccacgauccagaaggacgugcuggagugcaacgucaagaccaccgagguggugggcgacaucauccugaagccggccaacaacucccucaagaucaccgaggaggucgggcacacggaccugauggccgcguacguggacaacagcucccugaccaucaagaagcccaacgagcucagccgcgugcugggccugaagacccucgccacccacgggcuggccgccgucaacggcgugcccugggacacgaucgccaacuacgcgaagccguuccugaacaagguggucuccaccaccaccaacaucgugacgcgcugccucaaccgggugugcaccaacuacaugcccuacuucuucacccugcugcuccagcugugcaccuucacccgcagcacgaacucccggaucaaggccagcaugcccaccaccaucgccaagaacaccgucaaguccgugggcaaguucugccuggaggccagcuucaacuaccucaagagccccaacuucuccaagcugaucaacaucaucaucugguuccugcuccugagcgugugccuggggucccucaucuacagcacggccgcgcugggcguccugauguccaaccucgggaugccgagcuacugcaccggcuaccgcgagggcuaccugaacuccaccaacgugaccaucgccacguacugcaccgggagcauccccugcuccgugugccugagcggccucgacucccuggacaccuaccccagccuggagaccauccagaucacgaucuccagcuucaagugggaccucaccgccuucgggcuggucgccgagugguuccuggccuacauccucuucacccgguucuucuacgugcugggccuggcggccaucaugcagcucuucuucuccuacuucgccgugcacuucaucagcaacuccuggcugauguggcugaucaucaaccugguccagauggcccccaucagcgcgauggugcgcauguacaucuucuucgccuccuucuacuacguguggaagagcuacguccacgugguggacgggugcaacagcuccaccugcaugaugugcuacaagcggaaccgcgccacgcgggucgagugcaccaccaucgugaacggcguccgccggagcuucuacguguacgccaacggcgggaagggcuucugcaagcuccacaacuggaacugcgugaacugcgacaccuucugcgccggguccacguucaucagcgacgaggucgcgcgcgaccugucccugcaguucaagcggccgaucaaccccaccgaccagagcuccuacaucguggacagcgugaccgucaagaacggcuccauccaccucuacuucgacaaggccgggcagaagaccuacgagcgccacagccugucccacuucgugaaccuggacaaccuccgggccaacaacacgaagggcagccugcccaucaacgugaucgucuucgacggcaaguccaagugcgaggagagcuccgccaagagcgccuccguguacuacagccagcugaugugccagcccauccuccugcuggaccaggcgcucguguccgacgucggggacagcgccgagguggccgugaagauguucgacgccuacgucaacaccuucagcuccaccuucaacgugccgauggagaagcugaagacccugguggccacggcggaggccgagcucgccaagaacgucagccuggacaacgugcuguccaccuucaucagcgccgcgcgccagggcuucguggacuccgacgucgagaccaaggacgugguggagugccucaagcugagccaccaguccgacaucgaggucaccggggacagcugcaacaacuacaugcugacguacaacaagguggagaacaugaccccccgggaccucggcgccugcaucgacugcuccgcccgccacaucaacgcccagguggccaagagccacaacaucgcgcugaucuggaacgucaaggacuucaugucccugagcgagcagcuccggaagcagauccgcuccgccgccaagaagaacaaccugcccuucaagcugaccugcgccaccacgcgccagguggugaacgucgugaccaccaagaucgcccucaaggggggcuga

SEQ ID NO: 17840 - RNA, 5841 nt, Artificial Sequence
  SARS-CoV-2__MT810640.1__non-structural protein 3 (NSP3) CDS gc
auggcccccaccaaggugaccuucggcgacgacacggucaucgaggugcagggguacaagagcgugaacaucaccuucgagcuggacgagcgcaucgacaagguccucaacgagaagugcuccgccuacaccguggagcugggcaccgaggugaacgaguucgcgugcgucguggccgacgccgugaucaagacgcugcagccggucagcgagcuccugaccccccuggggaucgaccucgacgagugguccauggccaccuacuaccuguucgacgagagcggcgaguucaagcuggccucccacauguacugcagcuucuacccccccgacgaggacgaggaggagggggacugcgaggaggaggaguucgagccguccacccaguacgaguacggcacggaggacgacuaccagggcaagccccucgaguucggggcgaccagcgccgcccugcagcccgaggaggagcaggaggaggacuggcuggacgacgacucccagcagaccgugggccagcaggacgggagcgaggacaaccagaccacgaccauccagaccaucguggagguccagccccagcucgagauggagcugaccccgguggugcagacgaucgaggucaacuccuucagcggcuaccugaagcucaccgacaacguguacaucaagaacgccgacaucguggaggaggcgaagaaggucaagcccaccgugguggucaacgccgccaacguguaccugaagcacgggggcggcguggccggggcccugaacaaggcgaccaacaacgccaugcaggucgaguccgacgacuacaucgccacgaacggcccccucaagguggggggcagcugcguccuguccggccacaaccuggccaagcacugccuccacgugguggggcccaacgucaacaagggcgaggacauccagcugcugaagagcgccuacgagaacuucaaccagcacgaggugcuccuggcgccgcugcucuccgccgggaucuucggcgccgaccccauccacagccugcgggugugcgucgacaccgugcgcaccaacguguaccuggccgucuucgacaagaaccucuacgacaagcugguguccagcuuccuggagaugaagagcgagaagcagguggagcagaagaucgccgagauccccaaggaggaggucaagcccuucaucaccgaguccaagccgagcguggagcagcggaagcaggacgacaagaagaucaaggcgugcguggaggaggucacgaccacccucgaggagaccaaguuccugacggagaaccugcuccuguacaucgacaucaacgggaaccugcaccccgacuccgccacccucgugagcgacaucgacaucaccuuccugaagaaggacgcccccuacaucgugggcgacgucgugcaggagggcgugcugaccgccgucgugauccccacgaagaaggccgggggcaccaccgagaugcucgcgaaggcccugcgcaaggugccgaccgacaacuacaucacgaccuaccccgggcagggccugaacggguacaccgucgaggaggccaagaccgugcucaagaagugcaaguccgccuucuacauccugcccagcaucaucuccaacgagaagcaggagauccugggcaccgugagcuggaaccuccgggagaugcuggcgcacgccgaggagacgcgcaagcugaugcccgucugcguggagaccaaggccaucguguccaccauccagcggaaguacaagggcaucaagauccaggagggggucguggacuacggcgcccgcuucuacuucuacaccagcaagacgaccguggccucccugaucaacacccucaacgaccugaacgagacccuggucacgaugccgcucggguacgugacccacggccugaaccuggaggaggcggcccgguacaugcgcagccucaaggugcccgccaccgucuccgugagcucccccgacgccgugaccgccuacaacggguaccugacgagcuccagcaagacccccgaggagcacuucaucgagaccaucucccuggcgggcagcuacaaggacuggagcuacuccggccagagcacccagcucgggaucgaguuccugaagcggggcgacaaguccgucuacuacacgagcaacccgaccaccuuccaccuguacggggaggugaucaccuucgacaaccucaagacgcugcugucccuccgcgaggugcggaccaucaaggucuucaccaccguggacaacaucaaccugcacacgcagguggucgacaugagcaugaccuacggccagcaguucggccccaccuaccuggacggggccgacgugaccaagaucaagccccacaacucccacgagggcaagacguucuacgugcucccgaacgacgacacccugcgcgucgaggccuucgaguacuaccacaccaccgaccccagcuuccuggggcgguacaucuccgcccucaaccacacgaagaaguggaaguacccccaggugaacggccugaccagcaucaagugggccgacaacaacugcuaccuggcgaccgcccuccugacccugcagcagaucgagcucaaguucaaccccccggcccugcaggacgccuacuaccgcgcgcgggccggggaggccgccaacuucugcgcccugauccucgcguacugcaacaagacggugggcgagcugggcgacguccgcgagaccauguccuaccuguuccagcacgccaaccucgacagcugcaagcgggugcugaacgucgugugcaagaccugcgggcagcagcagaccacccugaagggcguggaggccgucauguacauggggacgcucuccuacgagcaguucaagaagggcgugcagauccccugcaccugcgggaagcaggccaccaaguaccuggugcagcaggagagccccuucgucaugauguccgcccccccggcgcaguacgagcugaagcacggcaccuucacgugcgccagcgaguacaccggcaacuaccagugcgggcacuacaagcacaucaucuccaaggagacccucuacugcaucgacggcgcccugcugaccaagagcagcgaguacaaggggcccaucacggacguguucuacaaggagaacuccuacaccaccaccaucaagcccgugacguacaagcucgacggcgucgugugcaccgagaucgaccccaagcuggacaacuacuacaagaaggacaacagcuacuucaccgagcagccgaucgaccuggugcccaaccagcccuaccccaacgccuccuucgacaacuucaaguucgucugcgacaacaucaaguucgccgacgaccucaaccagcugaccggguacaagaagccggcgagccgcgagcugaaggugacguucuuccccgaccucaacggcgacguggucgccaucgacuacaagcacuacacccccuccuucaagaagggcgccaagcugcugcacaagcccaucguguggcacgugaacaacgccaccaacaaggcgaccuacaagccgaacacguggugcauccggugccucuggagcaccaagcccgucgagaccuccaacagcuucgacgugcugaaguccgaggacgcccaggggauggacaaccuggccugcgaggaccucaagcccgugagcgaggaggucguggagaaccccaccauccagaaggacgugcuggagugcaacgucaagacgaccgagguggugggcgacaucauccugaagccggccaacaacucccucaagaucaccgaggaggucgggcacaccgaccugauggccgcguacguggacaacagcucccugacgaucaagaagcccaacgagcucagccgcgugcugggccugaagacccucgccacccacgggcuggccgccgucaacuccgugcccugggacaccaucgccaacuacgcgaagccguuccugaacaagguggucagcacgaccaccaacaucgugacccgcugccucaaccgggugugcacgaacuacaugcccuacuucuucacccugcugcuccagcugugcaccuucacccgcuccaccaacagccggaucaaggccuccaugcccacgaccaucgccaagaacaccgucaagagcgugggcaaguucugccuggaggccagcuucaacuaccucaagucccccaacuucagcaagcugaucaacaucaucaucugguuccugcuccuguccgugugccugggcagccucaucuacuccaccgccgcgcuggggguccugaugagcaaccucggcaugccguccuacugcacgggguaccgcgagggcuaccugaacagcaccaacgugaccaucgccaccuacugcacgggcuccauccccugcagcgugugccuguccgggcucgacagccuggacaccuaccccucccuggagaccauccagaucaccaucagcuccuucaagugggaccucacggccuucggccuggucgccgagugguuccuggccuacauccucuucacccgguucuucuacgugcuggggcuggcggccaucaugcagcucuucuucagcuacuucgccgugcacuucaucuccaacagcuggcugauguggcugaucaucaaccugguccagauggcccccaucuccgcgauggugcgcauguacaucuucuucgccagcuucuacuacguguggaagagcuacguccacgugguggacggcugcaacuccagcaccugcaugaugugcuacaagcggaaccgcgccacccgggucgagugcacgaccaucgugaacgggguccgccgguccuucuacguguacgccaacggcggcaagggguucugcaagcuccacaacuggaacugcgugaacugcgacaccuucugcgccggcagcaccuucaucuccgacgaggucgcgcgcgaccugagccugcaguucaagcggccgaucaaccccacggaccaguccagcuacaucguggacuccgugaccgucaagaacgggagcauccaccucuacuucgacaaggccggccagaagaccuacgagcgccacucccugagccacuucgugaaccuggacaaccuccgggccaacaacaccaaggggucccugcccaucaacgugaucgucuucgacggcaagagcaagugcgaggaguccagcgccaaguccgccagcguguacuacucccagcugaugugccagcccauccuccugcuggaccaggcgcucgugagcgacgucggcgacagcgccgagguggccgugaagauguucgacgccuacgucaacacguucuccagcaccuucaacgugccgauggagaagcugaagacccugguggccaccgcggaggccgagcucgccaagaacgucucccuggacaacgugcugagcacguucaucuccgccgcgcgccagggguucguggacagcgacgucgagaccaaggacgugguggagugccucaagcugucccaccagagcgacaucgaggucaccggcgacuccugcaacaacuacaugcugaccuacaacaagguggagaacaugacgccccgggaccucggggccugcaucgacugcagcgcccgccacaucaacgcccagguggccaagucccacaacaucgcgcugaucuggaacgucaaggacuucaugagccuguccgagcagcuccggaagcagauccgcagcgccgccaagaagaacaaccugcccuucaagcugaccugcgccaccacccgccagguggugaacgucgugacgaccaagaucgcccucaagggcggguga

SEQ ID NO: 17841 - RNA, 5841 nt, Artificial Sequence
  SARS-CoV-2__MT810661.1__non-structural protein 3 (NSP3) CDS gc
auggcccccaccaaggugaccuucggcgacgacacggucaucgaggugcagggguacaagagcgugaacaucaccuucgagcuggacgagcgcaucgacaagguccucaacgagaagugcuccgccuacaccguggagcugggcaccgaggugaacgaguucgcgugcgucguggccgacgccgugaucaagacgcugcagccggucagcgagcuccugaccccccuggggaucgaccucgacgagugguccauggccaccuacuaccuguucgacgagagcggcgaguucaagcuggccucccacauguacugcagcuucuacccccccgacgaggacgaggaggagggggacugcgaggaggaggaguucgagccguccacccaguacgaguacggcacggaggacgacuaccagggcaagccccucgaguucggggcgaccagcgccgcccugcagcccgaggaggagcaggaggaggacuggcuggacgacgacucccagcagaccgugggccagcaggacgggagcgaggacaaccagaccacgaccauccagaccaucguggagguccagccccagcucgagauggagcugaccccgguggugcagacgaucgaggucaacuccuucagcggcuaccugaagcucaccgacaacguguacaucaagaacgccgacaucguggaggaggcgaagaaggucaagcccaccgugguggucaacgccgccaacguguaccugaagcacgggggcggcguggccggggcccugaacaaggcgaccaacaacgccaugcaggucgaguccgacgacuacaucgccacgaacggcccccucaagguggggggcagcugcguccuguccggccacaaccuggccaagcacugccuccacgugguggggcccaacgucaacaagggcgaggacauccagcugcugaagagcgccuacgagaacuucaaccagcacgaggugcuccuggcgccgcugcucuccgccgggaucuucggcgccgaccccauccacagccugcgggugugcgucgacaccgugcgcaccaacguguaccuggccgucuucgacaagaaccucuacgacaagcugguguccagcuuccuggagaugaagagcgagaagcagguggagcagaagaucgccgagauccccaaggaggaggucaagcccuucaucaccgaguccaagccgagcguggagcagcggaagcaggacgacaagaagaucaaggcgugcguggaggaggucacgaccacccucgaggagaccaaguuccugacggagaaccugcuccuguacaucgacaucaacgggaaccugcaccccgacuccgccacccucgugagcgacaucgacaucaccuuccugaagaaggacgcccccuacaucgugggcgacgucgugcaggagggcgugcugaccgccgucgugauccccacgaagaaggccgggggcaccaccgagaugcucgcgaaggcccugcgcaaggugccgaccgacaacuacaucacgaccuaccccgggcagggccugaacggguacaccgucgaggaggccaagaccgugcucaagaagugcaaguccgccuucuacauccugcccagcaucaucuccaacgagaagcaggagauccugggcaccgugagcuggaaccuccgggagaugcuggcgcacgccgaggagacgcgcaagcugaugcccgucugcguggagaccaaggccaucguguccaccauccagcggaaguacaagggcaucaagauccaggagggggucguggacuacggcgcccgcuucuacuucuacaccagcaagacgaccguggccucccugaucaacacccucaacgaccugaacgagacccuggucacgaugccgcucggguacgugacccacggccugaaccuggaggaggcggcccgguacaugcgcagccucaaggugcccgccaccgucuccgugagcucccccgacgccgugaccgccuacaacggguaccugacgagcuccagcaagacccccgaggagcacuucaucgagaccaucucccuggcgggcagcuacaaggacuggagcuacuccggccagagcacccagcucgggaucgaguuccugaagcggggcgacaaguccgucuacuacacgagcaacccgaccaccuuccaccuggacggggaggugaucaccuucgacaaccucaagacgcugcugucccuccgcgaggugcggaccaucaaggucuucaccaccguggacaacaucaaccugcacacgcagguggucgacaugagcaugaccuacggccagcaguucggccccaccuaccuggacggggccgacgugaccaagaucaagccccacaacucccacgagggcaagacguucuacgugcucccgaacgacgacacccugcgcgucgaggccuucgaguacuaccacaccaccgaccccagcuuccuggggcgguacauguccgcccucaaccacacgaagaaguggaaguacccccaggugaacggccugaccagcaucaagugggccgacaacaacugcuaccuggcgaccgcccuccugacccugcagcagaucgagcucaaguucaaccccccggcccugcaggacgccuacuaccgcgcgcgggccggggaggccgccaacuucugcgcccugauccucgcguacugcaacaagacggugggcgagcugggcgacguccgcgagaccauguccuaccuguuccagcacgccaaccucgacagcugcaagcgggugcugaacgucgugugcaagaccugcgggcagcagcagaccacccugaagggcguggaggccgucauguacauggggacgcucuccuacgagcaguucaagaagggcgugcagauccccugcaccugcgggaagcaggccaccaaguaccuggugcagcaggagagccccuucgucaugauguccgcccccccggcgcaguacgagcugaagcacggcaccuucacgugcgccagcgaguacaccggcaacuaccagugcgggcacuacaagcacaucaccuccaaggagacccucuacugcaucgacggcgcccugcugacgaagagcagcgaguacaaggggcccaucaccgacguguucuacaaggagaacuccuacaccaccacgaucaagcccgugaccuacaagcucgacggcgucgugugcaccgagaucgaccccaagcuggacaacuacuacaagaaggacaacagcuacuucaccgagcagccgaucgaccugcuccccaaccagcccuaccccaacgccuccuucgacaacuucaaguucgugugcgacaacaucaaguucgccgacgaccugaaccagcugacgggguacaagaagccggcgagccgcgagcucaaggucaccuucuuccccgaccugaacggcgacgugguggccaucgacuacaagcacuacacccccuccuucaagaagggcgccaagcugcuccacaagcccaucgucuggcacgugaacaacgccaccaacaaggcgacguacaagccgaacaccuggugcauccggugccuguggagcaccaagcccguggagaccuccaacagcuucgacguccugaaguccgaggacgcccaggggauggacaaccucgccugcgaggaccugaagcccgugagcgaggagguggucgagaaccccacgauccagaaggacauccuggagugcaacgugaagaccaccgagguggucggcgacaucauccucaagccggccaacaacucccugaagaucaccgaggagguggggcacacggaccugauggccgcguacguggacaacagcucccucaccaucaagaagcccaacgagcugagccgcguccugggccucaagacccuggccacccacgggcuggccgccgugaacuccgugcccugggacacgaucgccaacuacgcgaagccguuccucaacaaggucgugagcaccaccaccaacaucgugacgcgcugccugaaccgggucugcaccaacuacaugcccuacuucuucacccugcuccugcagcugugcaccuucacccgcuccacgaacagccggaucaaggccuccaugcccaccaccaucgccaagaacaccgugaagagcgugggcaaguucugccucgaggccagcuucaacuaccugaagucccccaacuucagcaagcugaucaacaucaucaucugguuccuccugcuguccgucugccucggcagccugaucuacuccacggccgcgcugggggugcucaugagcaaccugggcaugccguccuacugcaccggguaccgcgagggcuaccugaacagcaccaacgugaccaucgccacguacugcaccggcuccauccccugcagcgucugccucuccgggcuggacagccuggacaccuaccccucccucgagaccauccagaucacgaucagcuccuucaagugggaccugaccgccuucggccugguggccgagugguuccucgccuacauccuguucacccgguucuucuacgugcuggggcucgcggccaucaugcagcuguucuucagcuacuucgccguccacuucaucuccaacagcuggcugauguggcugaucaucaaccucgugcagauggcccccaucuccgcgauggugcgcauguacaucuucuucgccagcuucuacuacgucuggaagagcuacgugcacguggucgacggcugcaacuccagcaccugcaugaugugcuacaagcggaaccgcgccacgcggguggagugcaccaccaucgugaacgggguccgccgguccuucuacguguacgccaacggcggcaagggguucugcaagcugcacaacuggaacugcgucaacugcgacaccuucugcgccggcagcacguucaucuccgacgagguggcgcgcgaccugagccuccaguucaagcggccgaucaaccccaccgaccaguccagcuacaucguggacuccgucaccgugaagaacgggagcauccaccuguacuucgacaaggccggccagaagaccuacgagcgccacucccugagccacuucgugaaccucgacaaccugcgggccaacaacacgaaggggucccugcccaucaacgucaucguguucgacggcaagagcaagugcgaggaguccagcgccaaguccgccagcguguacuacucccagcucaugugccagcccauccugcugcucgaccaggcgcuggucagcgacgugggcgacagcgccgagguggccgucaagauguucgacgccuacgugaacaccuucuccagcaccuucaacgugccgauggagaagcugaagacccucgucgccacggcggaggccgagcuggccaagaacgugucccuggacaacgugcucagcaccuucaucuccgccgcgcgccagggguucgucgacagcgacguggagaccaaggacguggucgagugccugaagcugucccaccagagcgacaucgaggugaccggcgacuccugcaacaacuacaugcucacguacaacaagguggagaacaugaccccccgggaccugggggccugcaucgacugcagcgcccgccacaucaacgcccaggucgccaagucccacaacaucgcgcugaucuggaacgugaaggacuucaugagccucuccgagcagcugcggaagcagauccgcagcgccgccaagaagaacaaccugcccuucaagcucaccugcgccaccacgcgccagguggucaacguggugaccaccaagaucgcccugaagggcggguga

SEQ ID NO: 17842 - RNA, 5841 nt, Artificial Sequence
  SARS-CoV-2__MT810690.1__non-structural protein 3 (NSP3) CDS gc
auggcccccaccaaggugaccuucggcgacgacacggucaucgaggugcagggguacaagagcgugaacaucaccuucgagcuggacgagcgcaucgacaagguccucaacgagaagugcuccgccuacaccguggagcugggcaccgaggugaacgaguucgcgugcgucguggccgacgccgugaucaagacgcugcagccggucagcgagcuccugaccccccuggggaucgaccucgacgagugguccauggccaccuacuaccuguucgacgagagcggcgaguucaagcuggccucccacauguacugcagcuucuacccccccgacgaggacgaggaggagggggacugcgaggaggaggaguucgagccguccacccaguacgaguacggcacggaggacgacuaccagggcaagccccucgaguucggggcgaccagcgccgcccugcagcccgaggaggagcaggaggaggacuggcuggacgacgacucccagcagaccgugggccagcaggacgggagcgaggacaaccagaccacgaccauccagaccaucguggagguccagccccagcucgagauggagcugaccccgguggugcagacgaucgaggucaacuccuucagcggcuaccugaagcucaccgacaacguguacaucaagaacgccgacaucguggaggaggcgaagaaggucaagcccaccgugguggucaacgccgccaacguguaccugaagcacgggggcggcguggccggggcccugaacaaggcgaccaacaacgccaugcaggucgaguccgacgacuacaucgccacgaacggcccccucaagguggggggcagcugcguccuguccggccacaaccuggccaagcacugccuccacgugguggggcccaacgucaacaagggcgaggacauccagcugcugaagagcgccuacgagaacuucaaccagcacgaggugcuccuggcgccgcugcucuccgccgggaucuucggcgccgaccccauccacagccugcgggugugcgucgacaccgugcgcaccaacguguaccuggccgucuucgacaagaaccucuacgacaagcugguguccagcuuccuggagaugaagagcgagaagcagguggagcagaagaucgccgagauccccaaggaggaggucaagcccuucaucaccgaguccaagccgagcguggagcagcggaagcaggacgacaagaagaucaaggcgugcguggaggaggucacgaccacccucgaggagaccaaguuccugacggagaaccugcuccuguacaucgacaucaacgggaaccugcaccccgacuccgccacccucgugagcgacaucgacaucaccuuccugaagaaggacgcccccuacaucgugggcgacgucgugcaggagggcgugcugaccgccgucgugauccccacgaagaaggccgggggcaccaccgagaugcucgcgaaggcccugcgcaaggugccgaccgacaacuacaucacgaccuaccccgggcagggccugaacggguacaccgucgaggaggccaagaccgugcucaagaagugcaaguccgccuucuacauccugcccagcaucaucuccaacgagaagcaggagauccugggcaccgugagcuggaaccuccgggagaugcuggcgcacgccgaggagacgcgcaagcugaugcccgucugcguggagaccaaggccaucguguccaccauccagcggaaguacaagggcaucaagauccaggagggggucguggacuacggcgcccgcuucuacuucuacaccagcaagacgaccguggccucccugaucaacacccucaacgaccugaacgagacccuggucacgaugccgcucggguacgugacccacggccugaaccuggaggaggcggcccgguacaugcgcagccucaaggugcccgccaccgucuccgugagcucccccgacgccgugaccgccuacaacggguaccugacgagcuccagcaagacccccgaggagcacuucaucgagaccaucucccuggcgggcagcuacaaggacuggagcuacuccggccagagcacccagcucgggaucgaguuccugaagcggggcgacaaguccgucuacuacacgagcaacccgaccaccuuccaccuggacggggaggugaucaccuucgacaaccucaagacgcugcugucccuccgcgaggugcggaccaucaaggucuucaccaccguggacaacaucaaccugcacacgcagguggucgacaugagcaugaccuacggccagcaguucggccccaccuaccuggacggggccgacgugaccaagaucaagccccacaacucccacgagggcaagacguucuacgugcucccgaacgacgacacccugcgcgucgaggccuucgaguacuaccacaccaccgaccccagcuuccuggggcgguacauguccgcccucaaccacacgaagaaguggaaguacccccaggugaacggccugaccagcaucaagugggccgacaacaacugcuaccuggcgaccgcccuccugacccugcagcagaucgagcucaaguucaaccccccggcccugcaggacgccuacuaccgcgcgcgggccggggaggccgccaacuucugcgcccugauccucgcguacugcaacaagacggugggcgagcugggcgacguccgcgagaccauguccuaccuguuccagcacgccaaccucgacagcugcaagcgggugcugaacgucgugugcaagaccugcgggcagcagcagaccacccugaagggcguggaggccgucauguacauggggacgcucuccuacgagcaguucaagaagggcgugcagauccccugcaccugcgggaagcaggccaccaaguaccuggugcagcaggagagccccuucgucaugauguccgcccccccggcgcaguacgagcugaagcacggcaccuucacgugcgccagcgaguacaccggcaacuaccagugcgggcacuacaagcacaucaccuccaaggagacccucuacugcaucgacggcgcccugcugacgaagagcagcgaguacaaggggcccaucaccgacguguucuacaaggagaacuccuacaccaccacgaucaagcccgugaccuacaagcucgacggcgucgugugcaccgagaucgaccccaagcuggacaacuacuacaagaaggacaacagcuacuucaccgagcagccgaucgaccuggugcccaaccagcccuaccccaacgccuccuucgacaacuucaaguucgucugcgacaacaucaaguucgccgacgaccucaaccagcugacgggguacaagaagccggcgagccgcgagcugaaggugaccuucuuccccgaccucaacggcgacguggucgccaucgacuacaagcacuacacccccuccuucaagaagggcgccaagcugcugcacaagcccaucguguggcacgugaacaacgccaccaacaaggcgacguacaagccgaacaccuggugcauccggugccucuggagcaccaagcccgucgagaccuccaacagcuucgacgugcugaaguccgaggacgcccaggggauggacaaccuggccugcgaggaccucaagcccgugagcgaggaggucguggagaaccccacgauccagaaggacgugcuggagugcaacgucaagaccaccgagguggugggcgacaucauccugaagccggccaacaacucccucaagaucaccgaggaggucgggcacacggaccugauggccgcguacguggacaacagcucccugaccaucaagaagcccaacgagcucagccgcgugcugggccugaagacccucgccacccacgggcuggccgccgucaacuccgugcccugggacacgaucgccaacuacgcgaagccguuccugaacaagguggucagcaccaccaccaacaucgugacgcgcugccucaaccgggugugcaccaacuacaugcccuacuucuucacccugcugcuccagcugugcaccuucacccgcuccacgaacagccggaucaaggccuccaugagcaccaccaucgccaagaacaccgucaagagcgugggcaaguucugccuggaggccuccuucaacuaccucaagagccccaacuucuccaagcugaucaacaucaucaucugguuccugcuccugagcgugugccugggcucccucaucuacagcacggccgcgcuggggguccugauguccaaccucggcaugcccagcuacugcaccggguaccgcgagggcuaccugaacuccaccaacgugaccaucgccacguacugcaccggcagcaucccgugcuccgugugccugagcgggcucgacucccuggacaccuaccccagccuggagaccauccagaucacgaucuccagcuucaagugggaccucaccgccuucggccuggucgccgagugguuccuggccuacauccucuucacccgguucuucuacgugcuggggcuggcggccaucaugcagcucuucuucuccuacuucgccgugcacuucaucagcaacuccuggcugauguggcugaucaucaaccugguccagauggcccccaucagcgcgauggugcgcauguacaucuucuucgccagcuucuacuacguguggaaguccuacguccacgugguggacggcugcaacagcuccaccugcaugaugugcuacaagcggaaccgcgccacgcgggucgagugcaccaccaucgugaacgggguccgccggagcuucuacguguacgccaacggcggcaagggguucugcaagcuccacaacuggaacugcgugaacugcgacaccuucugcgccggcuccacguucaucagcgacgaggucgcgcgcgaccugucccugcaguucaagcggcccaucaacccgaccgaccagagcuccuacaucguggacagcgugaccgucaagaacggguccauccaccucuacuucgacaaggccggccagaagaccuacgagcgccacagccugucccacuucgugaaccuggacaaccuccgggccaacaacacgaaggggagccugcccaucaacgugaucgucuucgacggcaaguccaagugcgaggagagcuccgccaagagcgccuccguguacuacagccagcugaugugccagcccauccuccugcuggaccaggcgcucgugagcgacgucggcgacuccgccgagguggccgugaagauguucgacgccuacgucaacaccuucagcuccaccuucaacgugcccauggagaagcugaagacccugguggccacggcggaggccgagcucgccaagaacgucagccuggacaacgugcuguccaccuucaucagcgccgcgcgccagggguucguggacuccgacgucgagaccaaggacgugguggagugccucaagcugagccaccaguccgacaucgaggucaccggcgacagcugcaacaacuacaugcugacguacaacaagguggagaacaugaccccgcgggaccucggggccugcaucgacugcuccgcccgccacaucaacgcccagguggccaagagccacaacaucgcgcugaucuggaacgucaaggacuucaugucccugagcgagcagcuccggaagcagauccgcuccgccgccaagaagaacaaccugcccuucaagcugaccugcgccaccacgcgccagguggugaacgucgugaccaccaagaucgcccucaagggcggguga

SEQ ID NO: 17843 - RNA, 5841 nt, Artificial Sequence
  SARS-CoV-2__MT810701.1__non-structural protein 3 (NSP3) CDS gc
auggcccccaccaaggugaccuucggcgacgacacggucaucgaggugcagggguacaagagcgugaacaucaccuucgagcuggacgagcgcaucgacaagguccucaacgagaagugcuccgccuacaccguggagcugggcaccgaggugaacgaguucgcgugcgucguggccgacgccgugaucaagacgcugcagccggucagcgagcuccugaccccccuggggaucgaccucgacgagugguccauggccaccuacuaccuguucgacgagagcggcgaguucaagcuggccucccacauguacugcagcuucuacccccccgacgaggacgaggaggagggggacugcgaggaggaggaggaguucgagccguccacccaguacgaguacggcacggaggacgacuaccagggcaagccccucgaguucggggcgaccagcgccgcccugcagcccgaggaggagcaggaggaggacuggcuggacgacgacucccagcagaccgugggccagcaggacgggagcgaggacaaccagaccacgaccauccagaccaucguggagguccagccccagcucgagauggagcugaccccgguggugcagacgaucgaggucaacuccuucagcggcuaccugaagcucaccgacaacguguacaucaagaacgccgacaucguggaggaggcgaagaaggucaagcccaccgugguggucaacgccgccaacguguaccugaagcacgggggcggcguggccggggcccugaacaaggcgaccaacaacgccaugcaggucgaguccgacgacuacaucgccacgaacggcccccucaagguggggggcagcugcguccuguccggccacaaccuggccaagcacugccuccacgugguggggcccaacgucaacaagggcgaggacauccagcugcugaagagcgccuacgagaacuucaaccagcacgaggugcuccuggcgccgcugcucuccgccgggaucuucggcgccgaccccauccacagccugcgggugugcgucgacaccgugcgcaccaacguguaccuggccgucuucgacaagaaccucuacgacaagcugguguccagcuuccuggagaugaagagcgagaagcagguggagcagaagaucgccgagauccccaaggaggaggucaagcccuucaucaccgaguccaagccgagcguggagcagcggaagcaggacgacaagaagaucaaggcgugcguggaggaggucacgaccacccucgaggagaccaaguuccugacggagaaccugcuccuguacaucgacaucaacgggaaccugcaccccgacuccgccacccucgugagcgacaucgacaucaccuuccugaagaaggacgcccccuacaucgugggcgacgucgugcaggagggcgugcugaccgccgucgugauccccacgaagaaggccgggggcaccaccgagaugcucgcgaaggcccugcgcaaggugccgaccgacaacuacaucacgaccuaccccgggcagggccugaacggguacaccgucgaggaggccaagaccgugcucaagaagugcaaguccgccuucuacauccugcccagcaucaucuccaacgagaagcaggagauccugggcaccgugagcuggaaccuccgggagaugcuggcgcacgccgaggagacgcgcaagcugaugcccgucugcguggagaccaaggccaucguguccaccauccagcggaaguacaagggcaucaagauccaggagggggucguggacuacggcgcccgcuucuacuucuacaccagcaagacgaccguggccucccugaucaacacccucaacgaccugaacgagacccuggucacgaugccgcucggguacgugacccacggccugaaccuggaggaggcggcccgguacaugcgcagccucaaggugcccgccaccgucuccgugagcucccccgacgccgugaccgccuacaacggguaccugacgagcuccagcaagacccccgaggagcacuucaucgagaccaucucccuggcgggcagcuacaaggacuggagcuacuccggccagagcacccagcucgggaucgaguuccugaagcggggcgacaaguccgucuacuacacgagcaacccgaccaccuuccaccuggacggggaggugaucaccuucgacaaccucaagacgcugcugucccuccgcgaggugcggaccaucaaggucuucaccaccguggacaacaucaaccugcacacgcagguggucgacaugagcaugaccuacggccagcaguucggccccaccuaccuggacggggccgacgugaccaagaucaagccccacaacucccacgagggcaagacguucuacgugcucccgaacgacgacacccugcgcgucgaggccuucgaguacuaccacaccaccgaccccagcuuccuggggcgguacauguccgcccucaaccacacgaagaaguggaaguacccccaggugaacggccugaccagcaucaagugggccgacaacaacugcuaccuggcgaccgcccuccugacccugcagcagaucgagcucaaguucaaccccccggcccugcaggacgccuacuaccgcgcgcgggccggggaggccgccaacuucugcgcccugauccucgcguacugcaacaagacggugggcgagcugggcgacguccgcgagaccauguccuaccuguuccagcacgccaaccucgacagcugcaagcgggugcugaacgucgugugcaagaccugcgggcagcagcagaccacccugaagggcguggaggccgucauguacauggggacgcucuccuacgagcaguucaagaagggcgugcagauccccugcaccugcgggaagcaggccaccaaguaccuggugcagcaggagagccccuucgucaugauguccgcccccccggcgcaguacgagcugaagcacggcaccuucacgugcgccagcgaguacaccggcaacuaccagugcgggcacuacaagcacaucaccuccaaggagacccucuacugcaucgacggcgcccugcugacgaagagcagcgaguacaaggggcccaucaccgacguguucuacaaggagaacuccuacaccaccacgaucaagcccgugaccuacaagcucgacggcgucgugugcaccgagaucgaccccaagcuggacaacuacuacaagaaggacaacagcuacuucaccgagcagccgaucgaccuggugcccaaccagcccuaccccaacgccuccuucgacaacuucaaguucgucugcgacaacaucaaguucgccgacgaccucaaccagcugacgggguacaagaagccggcgagccgcgagcugaaggugaccuucuuccccgaccucaacggcgacguggucgccaucgacuacaagcacuacacccccuccuucaagaagggcgccaagcugcugcacaagcccaucguguggcacgugaacaacgccaccaacaaggcgacguacaagccgaacaccuggugcauccggugccucuggagcaccaagcccgucgagaccuccaacagcuucgacgugcugaaguccgaggacgcccaggggauggacaaccuggccugcgaggaccucaagcccgugagcgaggaggucguggagaaccccacgauccagaaggacgugcuggagugcaacgucaagaccaccgagguggugggcgacaucauccugaagccggccaacaacucccucaagaucaccgaggaggucgggcacacggaccugauggccgcguacguggacaacagcucccugaccaucaagaagcccaacgagcucagccgcgugcugggccugaagacccucgccacccacgggcuggccgccgucaacuccgugcccugggacacgaucgccaacuacgcgaagccguuccugaacaagguggucagcaccaccaccaacaucgugacgcgcugccucaaccgggugugcaccaacuacaugcccuacuucuucacccugcugcuccagcugugcaccuucacccgcuccacgaacagccggaucaaggccuccaugcccaccaccaucgccaagaacaccgucaagagcgugggcaaguucugccuggaggccagcuucaacuaccucaagucccccaacuucagcaagcugaucaacaucaucaucugguuccugcuccuguccgugugccugggcagccucaucuacuccacggccgcgcuggggguccugaugagcaaccucggcaugccguccuacugcaccggguaccgcgagggcuaccugaacagcaccaacgugaccaucgccacguacugcaccggcuccauccccugcagcgugugccuguccgggcucgacagccuggacaccuaccccucccuggagaccauccagaucacgaucagcuccuucaagugggaccucaccgccuucggccuggucgccgagugguuccuggccuacauccucuucacccgguucuucuacgugcuggggcuggcggccaucaugcagcucuucuucagcuacuucgccgugcacuucaucuccaacagcuggcugauguggcugaucaucaaccugguccagauggcccccaucuccgcgauggugcgcauguacaucuucuucgccagcuucuacuacguguggaagagcuacguccacgugguggacggcugcaacuccagcaccugcaugaugugcuacaagcggaaccgcgccacgcgggucgagugcaccaccaucgugaacgggguccgccgguccuucuacguguacgccaacggcggcaagggguucugcaagcuccacaacuggaacugcgugaacugcgacaccuucugcgccggcagcacguucaucuccgacgaggucgcgcgcgaccugagccugcaguucaagcggccgaucaaccccaccgaccaguccagcuacaucguggacuccgugaccgucaagaacgggagcauccaccucuacuucgacaaggccggccagaagaccuacgagcgccacucccugagccacuucgugaaccuggacaaccuccgggccaacaacacgaaggggucccugcccaucaacgugaucgucuucgacggcaagagcaagugcgaggaguccagcgccaaguccgccagcguguacuacucccagcugaugugccagcccauccuccugcuggaccaggcgcucgugagcgacgucggcgacagcgccgagguggccgugaagauguucgacgccuacgucaacaccuucuccagcaccuucaacgugccgauggagaagcugaagacccugguggccacggcggaggccgagcucgccaagaacgucucccuggacaacgugcugagcaccuucaucuccgccgcgcgccagggguucguggacagcgacgucgagaccaaggacgugguggagugccucaagcugucccaccagagcgacaucgaggucaccggcgacuccugcaacaacuacaugcugacguacaacaagguggagaacaugaccccccgggaccucggggccugcaucgacugcagcgcccgccacaucaacgcccagguggccaagucccacaacaucgcgcugaucuggaacgucaaggacuucaugagccuguccgagcagcuccggaagcagauccgcagcgccgccaagaagaacaaccugcccuucaagcugaccugcgccaccacgcgccagguggugaacgucgugaccaccaagaucgcccucaagggcuga

SEQ ID NO: 17844 - RNA, 5841 nt, Artificial Sequence
  SARS-CoV-2__MT810727.1__non-structural protein 3 (NSP3) CDS gc
auggcccccaccaaggugaccuucggcgacgacacggucaucgaggugcagggguacaagagcgugaacaucaccuucgagcuggacgagcgcaucgacaagguccucaacgagaagugcuccgccuacaccguggagcugggcaccgaggugaacgaguucgcgugcgucguggccgacgccgugaucaagacgcugcagccggucagcgagcuccugaccccccuggggaucgaccucgacgagugguccauggccaccuacuaccuguucgacgagagcggcgaguucaagcuggccucccacauguacugcagcuucuacccccccgacgaggacgaggaggagggggacugcgaggaggaggaguucgagccguccacccaguacgaguacggcacggaggacgacuaccagggcaagccccucgaguucggggcgaccagcgccgcccugcagcccgaggaggagcaggaggaggacuggcuggacgacgacucccagcagaccgugggccagcaggacgggagcgaggacaaccagaccacgaccauccagaccaucguggagguccagccccagcucgagauggagcugaccccgguggugcagacgaucgaggucaacuccuucagcggcuaccugaagcucaccgacaacguguacaucaagaacgccgacaucguggaggaggcgaagaaggucaagcccaccgugguggucaacgccgccaacguguaccugaagcacgggggcggcguggccggggcccugaacaaggcgaccaacaacgccaugcaggucgaguccgacgacuacaucgccacgaacggcccccucaagguggggggcagcugcguccuguccggccacaaccuggccaagcacugccuccacgugguggggcccaacgucaacaagggcgaggacauccagcugcugaagagcgccuacgagaacuucaaccagcacgaggugcuccuggcgccgcugcucuccgccgggaucuucggcgccgaccccauccacagccugcgggugugcgucgacaccgugcgcaccaacguguaccuggccgucuucgacaagaaccucuacgacaagcugguguccagcuuccuggagaugaagagcgagaagcagguggagcagaagaucgccgagauccccaaggaggaggucaagcccuucaucaccgaguccaagccgagcguggagcagcggaagcaggacgacaagaagaucaaggcgugcguggaggaggucacgaccacccucgaggagaccaaguuccugacggagaaccugcuccuguacaucgacaucaacgggaaccugcaccccgacuccgccacccucgugagcgacaucgacaucaccuuccugaagaaggacgcccccuacaucgugggcgacgucgugcaggagggcgugcugaccgccgucgugauccccacgaagaaggccgggggcaccaccgagaugcucgcgaaggcccugcgcaaggugccgaccgacaacuacaucacgaccuaccccgggcagggccugaacggguacaccgucgaggaggccaagaccgugcucaagaagugcaaguccgccuucuacauccugcccagcaucaucuccaacgagaagcaggagauccugggcaccgugagcuggaaccuccgggagaugcuggcgcacgccgaggagacgcgcaagcugaugcccgucugcguggagaccaaggccaucguguccaccauccagcggaaguacaagggcaucaagauccaggagggggucguggacuacggcgcccgcuucuacuucuacaccagcaagacgaccguggccucccugaucaacacccucaacgaccugaacgagacccuggucacgaugccgcucggguacgugacccacggccugaaccuggaggaggcggcccgguacaugcgcagccucaaggugcccgccaccgucuccgugagcucccccgacgccgugaccgccuacaacggguaccugacgagcuccagcaagacccccgaggagcacuucaucgagaccaucucccuggcgggcagcuacaaggacuggagcuacuccggccagagcacccagcucgggaucgaguuccugaagcggggcgacaaguccgucuacuacacgagcaacccgaccaccuuccaccuggacggggaggugaucaccuucgacaaccucaagacgcugcugucccuccgcgaggugcggaccaucaaggucuucaccaccguggacaacaucaaccugcacacgcagguggucgacaugagcaugaccuacggccagcaguucggccccaccuaccuggacggggccgacgugaccaagaucaagccccacaacucccacgagggcaagacguucuacgugcucccgaacgacgacacccugcgcgucgaggccuucgaguacuaccacaccaccgaccccagcuuccuggggcgguacauguccgcccucaaccacacgaagaaguggaaguacccccaggugaacggccugaccagcaucaagugggccgacaacaacugcuaccuggcgaccgcccuccugacccugcagcagaucgagcucaaguucaaccccccggcccugcaggacgccuacuaccgcgcgcgggccggggaggccgccaacuucugcgcccugauccucgcguacugcaacaagacggugggcgagcugggcgacguccgcgagaccauguccuaccuguuccagcacgccaaccucgacagcugcaagcgggugcugaacgucgugugcaagaccugcgggcagcagcagaccacccugaagggcguggaggccgucauguacauggggacgcucuccuacgagcaguucaagaagggcgugcagauccccugcaccugcgggaagcaggccaccaaguaccuggugcagcaggagagccccuucgucaugauguccgcccccccggcgcaguacgagcugaagcacggcaccuucacgugcgccagcgaguacaccggcaacuaccagugcgggcacuacaagcacaucaccuccaaggagacccucuacugcaucgacggcgcccugcugacgaagagcagcgaguacaaggggcccaucaccgacguguucuacaaggagaacuccuacaccaccacgaucaagcccgugaccuacaagcucgacggcgucgugugcaccgagaucgaccccaagcuggacaacuacuacaagaaggacaacagcuacuucaccgagcagccgaucgaccuggugcccaaccagcccuaccccaacgccuccuucgacaacuucaaguucgucugcgacaacaucaaguucgccgacgaccucaaccagcugacgggguacaagaagccggcgagccgcgagcugaaggugaccuucuuccccgaccucaacggcgacguggucgccaucgacuacaagcacuacacccccuccuucaagaagggcgccaagcugcugcacaagcccaucguguggcacgugaacaacgccaccaacaaggcgacguacaagccgaacaccuggugcauccggugccucuggagcaccaagcccgucgagaccuccaacagcuucgacgugcugaaguccgaggacgcccaggggauggacaaccuggccugcgaggaccucaagcccgugagcgaggaggucguggagaaccccacgauccagaaggacgugcuggagugcaacgucaagaccaccgagguggugggcgacaucauccugaagccggccaacaacucccucaagaucaccgaggaggucgggcacacggaccugauggccgcguacguggacaacagcucccugaccaucaagaagcccaacgagcucagccgcgugcugggccugaagacccucgccacccacgggcuggccgccgucaacuccgugcccugggacacgaucgccaacuacgcgaagccguuccugaacaagguggucagcaccaccaccaacaucgugacgcgcugccucaaccgggugugcaccaacuacaugcccuacuucuucacccugcugcuccagcugugcaccuucacccgcuccacgaacagccggaucaaggccuccaugcccaccaccaucgccaagaacaccgucaagagcgugggcaaguucugccuggaggcccucuucaacuaccugaagagccccaacuucuccaagcugaucaacaucaucaucugguuccuccugcugagcgugugccucggcucccugaucuacagcacggccgcgcuggggguccucauguccaaccugggcaugccgagcuacugcaccggguaccgcgagggcuaccugaacuccaccaacgugaccaucgccacguacugcaccggcagcauccccugcuccgugugccucagcgggcuggacucccuggacaccuaccccagccucgagaccauccagaucacgaucuccagcuucaagugggaccugaccgccuucggccuggucgccgagugguuccucgccuacauccuguucacccgguucuucuacgugcuggggcucgcggccaucaugcagcuguucuucuccuacuucgccgugcacuucaucagcaacuccuggcugauguggcugaucaucaaccucguccagauggcccccaucagcgcgauggugcgcauguacaucuucuucgccuccuucuacuacguguggaagagcuacguccacgugguggacggcugcaacagcuccaccugcaugaugugcuacaagcggaaccgcgccacgcgggucgagugcaccaccaucgugaacgggguccgccggagcuucuacguguacgccaacggcggcaagggguucugcaagcugcacaacuggaacugcgugaacugcgacaccuucugcgccggcuccacguucaucagcgacgaggucgcgcgcgaccugucccuccaguucaagcggccgaucaaccccaccgaccagagcuccuacaucguggacagcgugaccgucaagaacggguccauccaccuguacuucgacaaggccggccagaagaccuacgagcgccacagccugucccacuucgugaaccucgacaaccugcgggccaacaacacgaaggggagccugcccaucaacgugaucgucuucgacggcaaguccaagugcgaggagagcuccgccaagagcgccuccguguacuacagccagcucaugugccagcccauccugcugcucgaccaggcgcugguguccgacgucggcgacagcgccgagguggccgugaagauguucgacgccuacgucaacaccuucagcuccaccuucaacgugccgauggagaagcugaagacccucguggccacggcggaggccgagcuggccaagaacgucagccuggacaacgugcucuccaccuucaucagcgccgcgcgccagggguucguggacuccgacgucgagaccaaggacgugguggagugccugaagcugagccaccaguccgacaucgaggucaccggcgacagcugcaacaacuacaugcucacguacaacaagguggagaacaugaccccccgggaccugggggccugcaucgacugcuccgcccgccacaucaacgcccagguggccaagagccacaacaucgcgcugaucuggaacgucaaggacuucaugucccucagcgagcagcugcggaagcagauccgcuccgccgccaagaagaacaaccugcccuucaagcucaccugcgccaccacgcgccagguggugaacgucgugaccaccaagaucgcccugaagggcggguga

SEQ ID NO: 17845 - RNA, 5841 nt, Artificial Sequence
  SARS-CoV-2__MT810827.1__non-structural protein 3 (NSP3) CDS gc
auggcccccaccaaggugaccuucggcgacgacacggucaucgaggugcagggguacaagagcgugaacaucaccuucgagcuggacgagcgcaucgacaagguccucaacgagaagugcuccgccuacaccguggagcugggcaccgaggugaacgaguucgcgugcgucguggccgacgccgugaucaagacgcugcagccggucagcgagcuccugaccccccuggggaucgaccucgacgagugguccauggccaccuacuaccuguucgacgagagcggcgaguucaagcuggccucccacauguacugcagcuucuacccccccgacgaggacgaggaggagggggacugcgaggaggaggaguucgagccguccacccaguacgaguacggcacggaggacgacuaccagggcaagccccucgaguucggggcgaccagcgccgcccugcagcccgaggaggagcaggaggaggacuggcuggacgacgacucccagcagaccgugggccagcaggacgggagcgaggacaaccagaccacgaccauccagaccaucguggagguccagccccagcucgagauggagcugaccccgguggugcagacgaucgaggucaacuccuucagcggcuaccugaaguucaccgacaacguguacaucaagaacgccgacaucguggaggaggcgaagaaggucaagcccaccgugguggucaacgccgccaacguguaccucaagcacgggggcggcguggccggggcccugaacaaggcgaccaacaacgccaugcaggucgaguccgacgacuacaucgccacgaacggcccccugaagguggggggcagcugcguccucuccggccacaaccuggccaagcacugccugcacgugguggggcccaacgucaacaagggcgaggacauccagcuccugaagagcgccuacgagaacuucaaccagcacgaggugcugcucgcgccgcugcuguccgccgggaucuucggcgccgaccccauccacagccuccgggugugcgucgacaccgugcgcaccaacguguaccuggccgucuucgacaagaaccuguacgacaagcucguguccagcuuccuggagaugaagagcgagaagcagguggagcagaagaucgccgagauccccaaggaggaggucaagcccuucaucaccgaguccaagccgagcguggagcagcggaagcaggacgacaagaagaucaaggcgugcguggaggaggucacgaccacccuggaggagaccaaguuccucacggagaaccugcugcucuacaucgacaucaacgggaaccugcaccccgacuccgccacccuggugagcgacaucgacaucaccuuccucaagaaggacgcccccuacaucgugggcgacgucgugcaggagggcgugcugaccgccgucgugauccccacgaagaaggccgggggcaccaccgagaugcuggcgaaggcccuccgcaaggugccgaccgacaacuacaucacgaccuaccccgggcagggccugaacggguacaccgucgaggaggccaagaccgugcugaagaagugcaaguccgccuucuacauccuccccagcaucaucuccaacgagaagcaggagauccugggcaccgugagcuggaaccugcgggagaugcucgcgcacgccgaggagacgcgcaagcugaugcccgucugcguggagaccaaggccaucguguccaccauccagcggaaguacaagggcaucaagauccaggagggggucguggacuacggcgcccgcuucuacuucuacaccagcaagacgaccguggccucccugaucaacacccugaacgaccucaacgagacccuggucacgaugccgcugggguacgugacccacggccucaaccuggaggaggcggcccgguacaugcgcagccugaaggugcccgccaccgucuccgugagcucccccgacgccgugaccgccuacaacggguaccucacgagcuccagcaagacccccgaggagcacuucaucgagaccaucucccuggcgggcagcuacaaggacuggagcuacuccggccagagcacccagcuggggaucgaguuccucaagcggggcgacaaguccgucuacuacacgagcaacccgaccaccuuccaccuggacggggaggugaucaccuucgacaaccugaagacgcuccugucccugcgcgaggugcggaccaucaaggucuucaccaccguggacaacaucaaccuccacacgcagguggucgacaugagcaugaccuacggccagcaguucggccccaccuaccuggacggggccgacgugaccaagaucaagccccacaacucccacgagggcaagacguucuacgugcugccgaacgacgacacccuccgcgucgaggccuucgaguacuaccacaccaccgaccccagcuuccuggggcgguacauguccgcccugaaccacacgaagaaguggaaguacccccaggugaacggccucaccagcaucaagugggccgacaacaacugcuaccuggcgaccgcccugcucacccugcagcagaucgagcugaaguucaaccccccggcccuccaggacgccuacuaccgcgcgcgggccggggaggccgccaacuucugcgcccugauccuggcguacugcaacaagacggugggcgagcucggcgacguccgcgagaccauguccuaccuguuccagcacgccaaccuggacagcugcaagcgggugcucaacgucgugugcaagaccugcgggcagcagcagaccacccugaagggcguggaggccgucauguacauggggacgcuguccuacgagcaguucaagaagggcgugcagauccccugcaccugcgggaagcaggccaccaaguaccucgugcagcaggagagccccuucgucaugauguccgcccccccggcgcaguacgagcugaagcacggcaccuucacgugcgccagcgaguacaccggcaacuaccagugcgggcacuacaagcacaucaccuccaaggagacccuguacugcaucgacggcgcccuccugacgaagagcagcgaguacaaggggcccaucaccgacguguucuacaaggagaacuccuacaccaccacgaucaagcccgugaccuacaagcuggacggcgucgugugcaccgagaucgaccccaagcucgacaacuacuacaagaaggacaacagcuacuucaccgagcagccgaucgaccuggugcccaaccagcccuaccccaacgccuccuucgacaacuucaaguucgucugcgacaacaucaaguucgccgacgaccugaaccagcucacgggguacaagaagccggcgagccgcgagcugaaggugaccuucuuccccgaccugaacggcgacguggucgccaucgacuacaagcacuacacccccuccuucaagaagggcgccaagcuccugcacaagcccaucguguggcacgugaacaacgccaccaacaaggcgacguacaagccgaacaccuggugcauccggugccuguggagcaccaagcccgucgagaccuccaacagcuucgacgugcucaaguccgaggacgcccaggggauggacaaccuggccugcgaggaccugaagcccgugagcgaggaggucguggagaaccccacgauccagaaggacgugcucgagugcaacgucaagaccaccgagguggugggcgacaucauccugaagccggccaacaacucccugaagaucaccgaggaggucgggcacacggaccucauggccgcguacguggacaacagcucccugaccaucaagaagcccaacgagcugagccgcgugcucggccugaagacccuggccacccacgggcucgccgccgucaacuccgugcccugggacacgaucgccaacuacgcgaagccguuccugaacaagguggucagcaccaccaccaacaucgugacgcgcugccugaaccgggugugcaccaacuacaugcccuacuucuucacccuccugcugcagcucugcaccuucacccgcuccacgaacagccggaucaaggccuccaugcccaccaccaucgccaagaacaccgucaagagcgugggcaaguucugccuggaggccagcuucaacuaccugaagucccccaacuucagcaagcucaucaacaucaucaucugguuccugcugcucuccgugugccugggcagccugaucuacuccacggccgcgcucgggguccugaugagcaaccugggcaugccguccuacugcaccggguaccgcgagggcuaccucaacagcaccaacgugaccaucgccacguacugcaccggcuccauccccugcagcgugugccuguccgggcuggacagccucgacaccuaccccucccuggagaccauccagaucacgaucagcuccuucaagugggaccugaccgccuucggccucgucgccgagugguuccuggccuacauccuguucacccgguucuucuacgugcucgggcuggcggccaucaugcagcuguucuucagcuacuucgccgugcacuucaucuccaacagcuggcucauguggcugaucaucaaccugguccagauggcccccaucuccgcgauggugcgcauguacaucuucuucgccagcuucuacuacguguggaagagcuacguccacgugguggacggcugcaacuccagcaccugcaugaugugcuacaagcggaaccgcgccacgcgggucgagugcaccaccaucgugaacgggguccgccgguccuucuacguguacgccaacggcggcaagggguucugcaagcugcacaacuggaacugcgugaacugcgacaccuucugcgccggcagcacguucaucuccgacgaggucgcgcgcgaccucagccugcaguucaagcggccgaucaaccccaccgaccaguccagcuacaucguggacuccgugaccgucaagaacgggagcauccaccuguacuucgacaaggccggccagaagaccuacgagcgccacucccucagccacuucgugaaccuggacaaccugcgggccaacaacacgaaggggucccuccccaucaacgugaucgucuucgacggcaagagcaagugcgaggaguccagcgccaaguccgccagcguguacuacucccagcugaugugccagcccauccugcuccuggaccaggcgcuggugagcgacgucggcgacagcgccgagguggccgugaagauguucgacgccuacgucaacaccuucuccagcaccuucaacgugccgauggagaagcucaagacccugguggccacggcggaggccgagcuggccaagaacgucucccucgacaacgugcugagcaccuucaucuccgccgcgcgccagggguucguggacagcgacgucgagaccaaggacgugguggagugccugaagcucucccaccagagcgacaucgaggucaccggcgacuccugcaacaacuacaugcugacguacaacaagguggagaacaugaccccccgggaccugggggccugcaucgacugcagcgcccgccacaucaacgcccagguggccaagucccacaacaucgcgcucaucuggaacgucaaggacuucaugagccuguccgagcagcugcggaagcagauccgcagcgccgccaagaagaacaaccuccccuucaagcugaccugcgccaccacgcgccagguggugaacgucgugaccaccaagaucgcccugaagggcggguga

SEQ ID NO: 17846 - RNA, 5841 nt, Artificial Sequence
  SARS-CoV-2__MT810831.1__non-structural protein 3 (NSP3) CDS gc
auggcccccaccaaggugaccuucggcgacgacacggucaucgaggugcagggguacaagagcgugaacaucaccuucgagcuggacgagcgcaucgacaagguccucaacgagaagugcuccgccuacaccguggagcugggcaccgaggugaacgaguucgcgugcgucguggccgacgccgugaucaagacgcugcagccggucagcgagcuccugaccccccuggggaucgaccucgacgagugguccauggccaccuacuaccuguucgacgagagcggcgaguucaagcuggccucccacauguacugcagcuucuacccccccgacgaggacgaggaggagggggacugcgaggaggaggaguucgagccguccacccaguacgaguacggcacggaggacgacuaccagggcaagccccucgaguucggggcgaccagcgccgcccugcagcccgaggaggagcaggaggaggacuggcuggacgacgacucccagcagaccgugggccagcaggacgggagcgaggacaaccagaccacgaccauccagaccaucguggagguccagccccagcucgagauggagcugaccccgguggugcagacgaucgaggucaacuccuucagcggcuaccugaagcucaccgacaacguguacaucaagaacgccgacaucguggaggaggcgaagaaggucaagcccaccgugguggucaacgccgccaacguguaccugaagcacgggggcggcguggccggggcccugaacaaggcgaccaacaacgccaugcaggucgaguccgacgacuacaucgccacgaacggcccccucaagguggggggcagcugcguccuguccggccacaaccuggccaagcacugccuccacgugguggggcccaacgucaacaagggcgaggacauccagcugcugaagagcgccuacgagaacuucaaccagcacgaggugcuccuggcgccgcugcucuccgccgggaucuucggcgccgaccccauccacagccugcgggugugcgucgacaccgugcgcaccaacguguaccuggccgucuucgacaagaaccucuacgacaagcugguguccagcuuccuggagaugaagagcgagaagcagguggagcagaagaucgccgagauccccaaggaggaggucaagcccuucaucaccgaguccaagccgagcguggagcagcggaagcaggacgacaagaagaucaaggcgugcguggaggaggucacgaccacccucgaggagaccaaguuccugacggagaaccugcuccuguacaucgacaucaacgggaaccugcaccccgacuccgccacccucgugagcgacaucgacaucaccuuccugaagaaggacgcccccuacaucgugggcgacgucgugcaggagggcgugcugaccgccgucgugauccccacgaagaaggccgggggcaccaccgagaugcucgcgaaggcccugcgcaaggugccgaccgacaacuacaucacgaccuaccccgggcagggccugaacggguacaccgucgaggaggccaagaccgugcucaagaagugcaaguccgccuucuacauccugcccagcaucaucuccaacgagaagcaggagauccugggcaccgugagcuggaaccuccgggagaugcuggcgcacgccgaggagacgcgcaagcugaugcccgucugcguggagaccaaggccaucguguccaccauccagcggaaguacaagggcaucaagauccaggagggggucguggacuacggcgcccgcuucuacuucuacaccagcaagacgaccguggccucccugaucaacacccucaacgaccugaacgagacccuggucacgaugccgcucggguacgugacccacggccugaaccuggaggaggcggcccgguacaugcgcagccucaaggugcccgccaccgucuccgugagcucccccgacgccgugaccgccuacaacggguaccugacgagcuccagcaagacccccgaggagcacuucaucgagaccaucucccuggcgggcagcuacaaggacuggagcuacuccggccagagcacccagcucgggaucgaguuccugaagcggggcgacaaguccgucuacuacacgagcaacccgaccaccuuccaccuggacggggaggugaucaccuucgacaaccucaagacgcugcugucccuccgcgaggugcggaccaucaaggucuucaccaccguggacaacaucaaccugcacacgcagguggucgacaugagcaugaccuacggccagcaguucggccccaccuaccuggacggggccgacgugaccaagaucaagccccacaacucccacgagggcaagacguucuacgugcucccgaacgacgacacccugcgcgucgaggccuucgaguacuaccacaccaccgaccccagcuuccuggggcgguacauguccgcccucaaccacacgaagaaguggaaguacccccaggugaacggccugaccagcaucaagugggccgacaacaacugcuaccuggcgaccgcccuccugacccugcagcagaucgagcucaaguucaaccccccggcccugcaggacgccuacuaccgcgcgcgggccggggaggccgccaacuucugcgcccugauccucgcguacugcaacaagacggugggcgagcugggcgacguccgcgagaccauguccuaccuguuccagcacgccaaccucgacagcugcaagcgggugcugaacgucgugugcaagaccugcgggcagcagcagaccacccugaagggcguggaggccgucauguacauggggacgcucuccuacgagcaguucaagaagggcgugcagauccccugcaccugcgggaagcaggccaccaaguaccuggugcagcaggagagccccuucgucaugauguccgcccccccggcgcaguacgagcugaagcacggcaccuucacgugcgccagcgaguacaccggcaacuaccagugcgggcacuacaagcacaucaccuccaaggagacccucuacugcaucgacggcgcccugcugacgaagagcagcgaguacaaggggcccaucaccgacguguucuacaaggagaacuccuacaccaccacgaucaagcccgugaccuacaagcucgacggcgucgugugcaccgagaucgaccccaagcuggacaacuacuacaagaaggacaacagcuacuucaccgagcagccgaucgaccuggugcccaaccagcccuaccagaacgccuccuucgacaacuucaaguucgucugcgacaacaucaaguucgccgacgaccucaaccagcugacgggguacaagaagcccgcgagccgcgagcugaaggugaccuucuucccggaccucaacggcgacguggucgccaucgacuacaagcacuacacccccuccuucaagaagggcgccaagcugcugcacaagcccaucguguggcacgugaacaacgccaccaacaaggcgacguacaagcccaacaccuggugcauccggugccucuggagcaccaagccggucgagaccuccaacagcuucgacgugcugaaguccgaggacgcccaggggauggacaaccuggccugcgaggaccucaagcccgugagcgaggaggucguggagaaccccacgauccagaaggacgugcuggagugcaacgucaagaccaccgagguggugggcgacaucauccugaagcccgccaacaacucccucaagaucaccgaggaggucgggcacacggaccugauggccgcguacguggacaacagcucccugaccaucaagaagccgaacgagcucagccgcgugcugggccugaagacccucgccacccacgggcuggccgccgucaacuccgugcccugggacacgaucgccaacuacgcgaagcccuuccugaacaagguggucagcaccaccaccaacaucgugacgcgcugccucaaccgggugugcaccaacuacaugccguacuucuucacccugcugcuccagcugugcaccuucacccgcuccacgaacagccggaucaaggccuccaugcccaccaccaucgccaagaacaccgucaagagcgugggcaaguucugccuggaggccagcuucaacuaccucaagucccccaacuucagcaagcugaucaacaucaucaucugguuccugcuccuguccgugugccugggcagccucaucuacuccacggccgcgcuggggguccugaugagcaaccucggcaugcccuccuacugcaccggguaccgcgagggcuaccugaacagcaccaacgugaccaucgccacguacugcaccggcuccaucccgugcagcgugugccuguccgggcucgacagccuggacaccuaccccucccuggagaccauccagaucacgaucagcuccuucaagugggaccucaccgccuucggccuggucgccgagugguuccuggccuacauccucuucacccgguucuucuacgugcuggggcuggcggccaucaugcagcucuucuucagcuacuucgccgugcacuucaucuccaacagcuggcugauguggcugaucaucaaccugguccagauggcccccaucuccgcgauggugcgcauguacaucuucuucgccagcuucuacuacguguggaagagcuacguccacgugguggacggcugcaacuccagcaccugcaugaugugcuacaagcggaaccgcgccacgcgggucgagugcaccaccaucgugaacgggguccgccgguccuucuacguguacgccaacggcggcaagggguucugcaagcuccacaacuggaacugcgugaacugcgacaccuucugcgccggcagcacguucaucuccgacgaggucgcgcgcgaccugagccugcaguucaagcggcccaucaacccgaccgaccaguccagcuacaucguggacuccgugaccgucaagaacgggagcauccaccucuacuucgacaaggccggccagaagaccuacgagcgccacucccugagccacuucgugaaccuggacaaccuccgggccaacaacacgaaggggucccugcccaucaacgugaucgucuucgacggcaagagcaagugcgaggaguccagcgccaaguccgccagcguguacuacucccagcugaugugccagcccauccuccugcuggaccaggcgcucgugagcgacgucggcgacagcgccgagguggccgugaagauguucgacgccuacgucaacaccuucuccagcaccuucaacgugcccauggagaagcugaagacccugguggccacggcggaggccgagcucgccaagaacgucucccuggacaacgugcugagcaccuucaucuccgccgcgcgccagggguucguggacagcgacgucgagaccaaggacgugguggagugccucaagcugucccaccagagcgacaucgaggucaccggcgacuccugcaacaacuacaugcugacguacaacaagguggagaacaugaccccgcgggaccucggggccugcaucgacugcagcgcccgccacaucaacgcccagguggccaagucccacaacaucgcgcugaucuggaacgucaaggacuucaugagccuguccgagcagcuccggaagcagauccgcagcgccgccaagaagaacaaccugcccuucaagcugaccugcgccaccacgcgccagguggugaacgucgugaccaccaagaucgcccucaagggcggguga

SEQ ID NO: 17847 - RNA, 5841 nt, Artificial Sequence
  SARS-CoV-2__MT810843.1__non-structural protein 3 (NSP3) CDS gc
auggcccccaccaaggugaccuucggcgacgacacggucaucgaggugcagggguacaagagcgugaacaucaccuucgagcuggacgagcgcaucgacaagguccucaacgagaagugcuccgccuacaccguggagcugggcaccgaggugaacgaguucgcgugcgucguggccgacgccgugaucaagacgcugcagccggucagcgagcuccugaccccccuggggaucgaccucgacgagugguccauggccaccuacuaccuguucgacgagagcggcgaguucaagcuggccucccacauguacugcagcuucuacccccccgacgaggacgaggaggagggggacugcgaggaggaggaguucgagccguccacccaguacgaguacggcacggaggacgacuaccagggcaagccccucgaguucggggcgaucagcgccgcccugcagcccgaggaggagcaggaggaggacuggcuggacgacgacucccagcagaccgugggccagcaggacgggagcgaggacaaccagaccaccacgauccagaccaucguggagguccagccccagcucgagauggagcugaccccgguggugcagaccaucgaggucaacuccuucagcggcuaccugaagcucacggacaacguguacaucaagaacgccgacaucguggaggaggcgaagaaggucaagcccaccgugguggucaacgccgccaacguguaccugaagcacgggggcggcguggccggggcccugaacaaggcgaccaacaacgccaugcaggucgaguccgacgacuacaucgccaccaacggcccccucaagguggggggcagcugcguccuguccggccacaaccuggccaagcacugccuccacgugguggggcccaacgucaacaagggcgaggacauccagcugcugaagagcgccuacgagaacuucaaccagcacgaggugcuccuggcgccgcugcucuccgccgggaucuucggcgccgaccccauccacagccugcgggugugcgucgacacggugcgcaccaacguguaccuggccgucuucgacaagaaccucuacgacaagcugguguccagcuuccuggagaugaagagcgagaagcagguggagcagaagaucgccgagauccccaaggaggaggucaagcccuucaucaccgaguccaagccgagcguggagcagcggaagcaggacgacaagaagaucaaggcgugcguggaggaggucaccacgacccucgaggagaccaaguuccugaccgagaaccugcuccuguacaucgacaucaacgggaaccugcaccccgacuccgccacgcucgugagcgacaucgacaucaccuuccugaagaaggacgcccccuacaucgugggcgacgucgugcaggagggcgugcugaccgccgucgugauccccaccaagaaggccgggggcacgaccgagaugcucgcgaaggcccugcgcaaggugccgaccgacaacuacaucaccacguaccccgggcagggccugaacggguacaccgucgaggaggccaagaccgugcucaagaagugcaaguccgccuucuacauccugcccagcaucaucuccaacgagaagcaggagauccugggcaccgugagcuggaaccuccgggagaugcuggcgcacgccgaggagacccgcaagcugaugcccgucugcguggagacgaaggccaucguguccaccauccagcggaaguacaagggcaucaagauccaggagggggucguggacuacggcgcccgcuucuacuucuacaccagcaagaccacgguggccucccugaucaacacccucaacgaccugaacgagacccuggucaccaugccgcucggguacgugacgcacggccugaaccuggaggaggcggcccgguacaugcgcagccucaaggugcccgccaccgucuccgugagcucccccgacgccgugaccgccuacaacggguaccugaccagcuccagcaagacgcccgaggagcacuucaucgagaccaucucccuggcgggcagcuacaaggacuggagcuacuccggccagagcacccagcucgggaucgaguuccugaagcggggcgacaaguccgucuacuacaccagcaacccgacgaccuuccaccuggacggggaggugaucaccuucgacaaccucaagacccugcugucccuccgcgaggugcggacgaucaaggucuucaccaccguggacaacaucaaccugcacacccagguggucgacaugagcaugacguacggccagcaguucggccccaccuaccuggacggggccgacgugaccaagaucaagccccacaacucccacgagggcaagaccuucuacgugcucccgaacgacgacacgcugcgcgucgaggccuucgaguacuaccacaccaccgaccccagcuuccuggggcgguacauguccgcccucaaccacaccaagaaguggaaguacccccaggugaacggccugacgagcaucaagugggccgacaacaacugcuaccuggcgaccgcccuccugacccugcagcagaucgagcucaaguucaaccccccggcccugcaggacgccuacuaccgcgcgcgggccggggaggccgccaacuucugcgcccugauccucgcguacugcaacaagaccgugggcgagcugggcgacguccgcgagacgauguccuaccuguuccagcacgccaaccucgacagcugcaagcgggugcugaacgucgugugcaagaccugcgggcagcagcagaccacccugaagggcguggaggccgucauguacauggggacccucuccuacgagcaguucaagaagggcgugcagauccccugcacgugcgggaagcaggccaccaaguaccuggugcagcaggagagccccuucgucaugauguccgcccccccggcgcaguacgagcugaagcacggcaccuucaccugcgccagcgaguacacgggcaacuaccagugcgggcacuacaagcacaucaccuccaaggagacccucuacugcaucgacggcgcccugcugaccaagagcagcgaguacaaggggcccaucacggacguguucuacaaggagaacuccuacaccaccaccaucaagcccgugacguacaagcucgacggcgucgugugcaccgagaucgaccccaagcuggacaacuacuacaagaaggacaacagcuacuucaccgagcagccgaucgaccuggugcccaaccagcccuaccccaacgccuccuucgacaacuucaaguucgucugcgacaacaucaaguucgccgacgaccucaaccagcugaccggguacaagaagccggcgagccgcgagcugaaggugacguucuuccccgaccucaacggcgacguggucgccaucgacuacaagcacuacacccccuccuucaagaagggcgccaagcugcugcacaagcccaucguguggcacgugaacaacgccaccaacaaggcgaccuacaagccgaacacguggugcauccggugccucuggagcaccaagcccgucgagaccuccaacagcuucgacgugcugaaguccgaggacgcccaggggauggacaaccuggccugcgaggaccucaagcccgugagcgaggaggucguggagaaccccaccauccagaaggacgugcuggagugcaacgucaagacgaccgagguggugggcgacaucauccugaagccggccaacaacucccucaagaucaccgaggaggucgggcacaccgaccugauggccgcguacguggacaacagcucccugacgaucaagaagcccaacgagcucagccgcgugcugggccugaagacccucgccacccacgggcuggccgccgucaacuccgugcccugggacaccaucgccaacuacgcgaagccguuccugaacaagguggucagcacgaccaccaacaucgugacccgcugccucaaccgggugugcacgaacuacaugcccuacuucuucacccugcugcuccagcugugcaccuucacccgcuccaccaacagccggaucaaggccuccaugcccacgaccaucgccaagaacaccgucaagagcgugggcaaguucugccuggaggccagcuucaacuaccucaagucccccaacuucagcaagcugaucaacaucaucaucugguuccugcuccuguccgugugccugggcagccucaucuacuccaccgccguccugggggugcugaugagcaaccucggcaugccguccuacugcacgggguaccgcgagggcuaccugaacagcaccaacgugaccaucgcgaccuacugcacgggcuccauccccugcagcgucugccuguccgggcucgacagccuggacaccuaccccucccuggagaccauccagaucaccaucagcuccuucaagugggaccucacggccuucggccugguggccgagugguuccuggccuacauccucuucacccgguucuucuacgugcuggggcuggccgcgaucaugcagcucuucuucagcuacuucgccguccacuucaucuccaacagcuggcugauguggcugaucaucaaccuggugcagauggcccccaucuccgccauggugcgcauguacaucuucuucgcgagcuucuacuacgucuggaagagcuacgugcacguggucgacggcugcaacuccagcaccugcaugaugugcuacaagcggaaccgcgccacccggguggagugcacgaccaucgucaacggggugcgccgguccuucuacguguacgccaacggcggcaagggguucugcaagcuccacaacuggaacugcgucaacugcgacaccuucugcgccggcagcaccuucaucuccgacgagguggcccgcgaccugagccugcaguucaagcggccgaucaaccccacggaccaguccagcuacaucguggacuccgucaccgugaagaacgggagcauccaccucuacuucgacaaggcgggccagaagaccuacgagcgccacucccugagccacuucgugaaccuggacaaccuccgggccaacaacaccaaggggucccugcccaucaacgucaucguguucgacggcaagagcaagugcgaggaguccagcgccaaguccgccagcguguacuacucccagcugaugugccagcccauccuccugcuggaccaggcccucgucagcgacgugggcgacagcgcggagguggccgucaagauguucgacgccuacgugaacacguucuccagcaccuucaacgugccgauggagaagcugaagacccuggucgccaccgccgaggcggagcucgccaagaacgugucccuggacaacgugcugagcacguucaucuccgccgcccgccagggguucgucgacagcgacguggagaccaaggacguggucgagugccucaagcugucccaccagagcgacaucgaggugaccggcgacuccugcaacaacuacaugcugaccuacaacaagguggagaacaugacgccccgggaccucggggcgugcaucgacugcagcgcccgccacaucaacgcccaggucgccaagucccacaacaucgcccugaucuggaacgugaaggacuucaugagccuguccgagcagcuccggaagcagauccgcagcgcggccaagaagaacaaccugcccuucaagcugaccugcgccaccacccgccagguggucaacguggugacgaccaagaucgcccucaagggcggguga

SEQ ID NO: 17848 - RNA, 5841 nt, Artificial Sequence
  SARS-CoV-2__MT810895.1__non-structural protein 3 (NSP3) CDS gc
auggcccccaccaaggugaccuucggcgacgacacggucaucgaggugcagggguacaagagcgugaacaucaccuucgagcuggacgagcgcaucgacaagguccucaacgagaagugcuccgccuacaccguggagcugggcaccgaggugaacgaguucgcgugcgucguggccgacgccgugaucaagacgcugcagccggucagcgagcuccugaccccccuggggaucgaccucgacgagugguccauggccaccuacuaccuguucgacgagagcggcgaguucaagcuggccucccacauguacugcagcuucuacccccccgacgaggacgaggaggagggggacugcgaggaggaggaguucgagccguccacccaguacgaguacggcacggaggacgacuaccagggcaagccccucgaguucggggcgaccagcgccgcccugcagcccgaggaggagcaggaggaggacuggcuggacgacgacucccagcagaccgugggccagcaggacgggagcgaggacaaccagaccacgaccauccagaccaucguggagguccagccccagcucgagauggagcugaccccgguggugcagacgaucgaggucaacuccuucagcggcuaccugaagcucaccgacaacguguacaucaagaacgccgacaucguggaggaggcgaagaaggucaagcccaccgugguggucaacgccgccaacguguaccugaagcacgggggcggcguggccggggcccugaacaaggcgaccaacaacgccaugcaggucgaguccgacgacuacaucgccacgaacggcccccucaagguggggggcagcugcguccuguccggccacaaccuggccaagcacugccuccacgugguggggcccaacgucaacaagggcgaggacauccagcugcugaagagcgccuacgagaacuucaaccagcacgaggugcuccuggcgccgcugcucuccgccgggaucuucggcgccgaccccauccacagccugcgggugugcgucgacaccgugcgcaccaacguguaccuggccgucuucgacaagaaccucuacgacaagcugguguccagcuuccuggagaugaagagcgagaagcagguggagcagaagaucgccgagauccccaaggaggaggucaagcccuucaucaccgaguccaagccgagcguggagcagcggaagcaggacgacaagaagaucaaggcgugcguggaggaggucacgaccacccucgaggagaccaaguuccugacggagaaccugcuccuguacaucgacaucaacgggaaccugcaccccgacuccgccacccucgugagcgacaucgacaucaccuuccugaagaaggacgcccccuacaucgugggcgacgucgugcaggagggcgugcugaccgccgucgugauccccacgaagaaggccgggggcaccaccgagaugcucgcgaaggcccugcgcaaggugccgaccgacaacuacaucacgaccuaccccgggcagggccugaacggguacaccgucgaggaggccaagaccgugcucaagaagugcaaguccgccuucuacauccugcccagcaucaucuccaacgagaagcaggagauccugggcaccgugagcuggaaccuccgggagaugcuggcgcacgccgaggagacgcgcaagcugaugcccgucugcguggagaccaaggccaucguguccaccauccagugcaaguacaagggcaucaagauccaggagggggucguggacuacggcgcccgguucuacuucuacaccagcaagacgaccguggccucccugaucaacacccucaacgaccugaacgagacccuggucacgaugccgcucggguacgugacccacggccugaaccuggaggaggcggcccgcuacaugcggagccucaaggugcccgccaccgucuccgugagcucccccgacgccgugaccgccuacaacggguaccugacgagcuccagcaagacccccgaggagcacuucaucgagaccaucucccuggcgggcagcuacaaggacuggagcuacuccggccagagcacccagcucgggaucgaguuccugaagcgcggcgacaaguccgucuacuacacgagcaacccgaccaccuuccaccuggacggggaggugaucaccuucgacaaccucaagacgcugcugucccuccgggaggugcgcaccaucaaggucuucaccaccguggacaacaucaaccugcacacgcagguggucgacaugagcaugaccuacggccagcaguucggccccaccuaccuggacggggccgacgugaccaagaucaagccccacaacucccacgagggcaagacguucuacgugcucccgaacgacgacacccugcgggucgaggccuucgaguacuaccacaccaccgaccccagcuuccuggggcgcuacauguccgcccucaaccacacgaagaaguggaaguacccccaggugaacggccugaccagcaucaagugggccgacaacaacugcuaccuggcgaccgcccuccugacccugcagcagaucgagcucaaguucaaccccccggcccugcaggacgccuacuaccgggcgcgcgccggggaggccgccaacuucugcgcccugauccucgcguacugcaacaagacggugggcgagcugggcgacguccgggagaccauguccuaccuguuccagcacgccaaccucgacagcugcaagcgcgugcugaacgucgugugcaagaccugcgggcagcagcagaccacccugaagggcguggaggccgucauguacauggggacgcucuccuacgagcaguucaagaagggcgugcagauccccugcaccugcgggaagcaggccaccaaguaccuggugcagcaggagagccccuucgucaugauguccgcccccccggcgcaguacgagcugaagcacggcaccuucacgugcgccagcgaguacaccggcaacuaccagugcgggcacuacaagcacaucaccuccaaggagacccucuacugcaucgacggcgcccugcugacgaagagcagcgaguacaaggggcccaucaccgacguguucuacaaggagaacuccuacaccaccacgaucaagcccgugaccuacaagcucgacggcgucgugugcaccgagaucgaccccaagcuggacaacuacuacaagaaggacaacagcuacuucaccgagcagccgaucgaccuggugcccaaccagcccuaccccaacgccuccuucgacaacuucaaguucgucugcgacaacaucaaguucgccgacgaccucaaccagcugacgggguacaagaagccggcgagccgggagcugaaggugaccuucuuccccgaccucaacggcgacguggucgccaucgacuacaagcacuacacccccuccuucaagaagggcgccaagcugcugcacaagcccaucguguggcacgugaacaacgccaccaacaaggcgacguacaagccgaacaccuggugcauccgcugccucuggagcaccaagcccgucgagaccuccaacagcuucgacgugcugaaguccgaggacgcccaggggauggacaaccuggccugcgaggaccucaagcccgugagcgaggaggucguggagaaccccacgauccagaaggacgugcuggagugcaacgucaagaccaccgagguggugggcgacaucauccugaagccggccaacaacucccucaagaucaccgaggaggucgggcacacggaccugauggccgcguacguggacaacagcucccugaccaucaagaagcccaacgagcucagccgggugcugggccugaagacccucgccacccacgggcuggccgccgucaacuccgugcccugggacacgaucgccaacuacgcgaagccguuccugaacaagguggucagcaccaccaccaacaucgugacgcgcugccucaaccgcgugugcaccaacuacaugcccuacuucuucacccugcugcuccagcugugcaccuucacccgguccacgaacagccgcaucaaggccuccaugcccaccaccaucgccaagaacaccgucaagagcgugggcaaguucugccuggaggccagcuucaacuaccucaagucccccaacuucagcaagcugaucaacaucaucaucugguuccugcuccuguccgugugccugggcagccucaucuacuccacggccgcgcuggggguccugaugagcaaccucggcaugccguccuacugcaccggguaccgggagggcuaccugaacagcaccaacgugaccaucgccacguacugcaccggcuccauccccugcagcgugugccuguccgggcucgacagccuggacaccuaccccucccuggagaccauccagaucacgaucagcuccuucaagugggaccucaccgccuucggccuggucgccgagugguuccuggccuacauccucuucacccgcuucuucuacgugcuggggcuggcggccaucaugcagcucuucuucagcuacuucgccgugcacuucaucuccaacagcuggcugauguggcugaucaucaaccugguccagauggcccccaucuccgcgauggugcggauguacaucuucuucgccagcuucuacuacguguggaagagcuacguccacgugguggacggcugcaacuccagcaccugcaugaugugcuacaagcgcaaccgggccacgcgcgucgagugcaccaccaucgugaacgggguccggcgcuccuucuacguguacgccaacggcggcaagggguucugcaagcuccacaacuggaacugcgugaacugcgacaccuucugcgccggcagcacguucaucuccgacgaggucgcgcgggaccugagccugcaguucaagcgcccgaucaaccccaccgaccaguccagcuacaucguggacuccgugaccgucaagaacgggagcauccaccucuacuucgacaaggccggccagaagaccuacgagcggcacucccugagccacuucgugaaccuggacaaccuccgcgccaacaacacgaaggggucccugcccaucaacgugaucgucuucgacggcaagagcaagugcgaggaguccagcgccaaguccgccagcguguacuacucccagcugaugugccagcccauccuccugcuggaccaggcgcucgugagcgacgucggcgacagcgccgagguggccgugaagauguucgacgccuacgucaacaccuucuccagcaccuucaacgugccgauggagaagcugaagacccugguggccacggcggaggccgagcucgccaagaacgucucccuggacaacgugcugagcaccuucaucuccgccgcgcggcagggguucguggacagcgacgucgagaccaaggacgugguggagugccucaagcugucccaccagagcgacaucgaggucaccggcgacuccugcaacaacuacaugcugacguacaacaagguggagaacaugaccccccgcgaccucggggccugcaucgacugcagcgcccggcacaucaacgcccagguggccaagucccacaacaucgcgcugaucuggaacgucaaggacuucaugagccuguccgagcagcuccgcaagcagauccggagcgccgccaagaagaacaaccugcccuucaagcugaccugcgccaccacgcgccagguggugaacgucgugaccaccaagaucgcccucaagggcggguga

SEQ ID NO: 17849 - RNA, 5841 nt, Artificial Sequence
  SARS-CoV-2__MT810916.1__non-structural protein 3 (NSP3) CDS gc
auggcccccaccaaggugaccuucggcgacgacacggucaucgaggugcagggguacaagagcgugaacaucaccuucgagcuggacgagcgcaucgacaagguccucaacgagaagugcuccgccuacaccguggagcugggcaccgaggugaacgaguucgcgugcgucguggccgacgccgugaucaagacgcugcagccggucagcgagcuccugaccccccuggggaucgaccucgacgagugguccauggccaccuacuaccuguucgacgagagcggcgaguucaagcuggccucccacauguacugcagcuucuacccccccgacgaggacgaggaggagggggacugcgaggaggaggaguucgagccguccacccaguacgaguacggcacggaggacgacuaccagggcaagccccucgaguucggggcgaccagcgccgcccugcagcccgaggaggagcaggaggaggacuggcuggacgacgacucccagcagaccgugggccagcaggacgggagcgaggacaaccagaccacgaccauccagaccaucguggagguccagccccagcucgagauggagcugaccccgguggugcagacgaucgaggucaacuccuucagcggcuaccugaagcucaccgacaacguguacaucaagaacgccgacaucguggaggaggcgaagaaggucaagcccaccgugguggucaacgccgccaacguguaccugaagcacgggggcggcguggccggggcccugaacaaggcgaccaacaacgccaugcaggucgaguccgacgacuacaucgccacgaacggcccccucaagguggggggcagcugcguccuguccggccacaaccuggccaagcacugccuccacgugguggggcccaacgucaacaagggcgaggacauccagcugcugaagagcgccuacgagaacuucaaccagcacgaggugcuccuggcgccgcugcucuccgccgggaucuucggcgccgaccccauccacagccugcgggugugcgucgacaccgugcgcaccaacguguaccuggccgucuucgacaagaaccucuacgacaagcugguguccagcuuccuggagaugaagagcgagaagcagguggagcagaagaucgccgagauccccaaggaggaggucaagcccuucaucaccgaguccaagccgagcguggagcagcggaagcaggacgacaagaagaucaaggcgugcguggaggaggucacgaccacccucgaggagaccaaguuccugacggagaaccugcuccuguacaucgacaucaacgggaaccugcaccccgacuccgccacccucgugagcgacaucgacaucaccuuccugaagaaggacgcccccuacaucgugggcgacgucgugcaggagggcgugcugaccgccgucgugauccccacgaagaaggccgggggcaccaccgagaugcucgcgaaggcccugcgcaaggugccgaccgacaacuacaucacgaccuaccccgggcagggccugaacggguacaccgucgaggaggccaagaccgugcucaagaagugcaaguccgccuucuacauccugcccagcaucaucuccaacgagaagcaggagauccugggcaccgugagcuggaaccuccgggagaugcuggcgcacgccgaggagacgcgcaagcugaugcccgucugcguggagaccaaggccaucguguccaccauccagcggaaguacaagggcaucaagauccaggagggggucguggacuacggcgcccgcuucuacuucuacaccagcaagacgaccguggccucccugaucaacacccucaacgaccugaacgagacccuggucacgaugccgcucggguacgugacccacggccugaaccuggaggaggcggcccgguacaugcgcagccucaaggugcccgccaccgucuccgugagcucccccgacgccgugaccgccuacaacggguaccugacgagcuccagcaagacccccgaggagcacuucaucgagaccaucucccuggcgggcagcuacaaggacuggagcuacuccggccagagcacccagcucgggaucgaguuccugaagcggggcgacaaguccgucuacuacacgagcaacccgaccaccuuccaccuggacggggaggugaucaccuucgacaaccucaagacgcugcugucccuccgcgaggugcggaccaucaaggucuucaccaccguggacaacaucaaccugcacacgcagguggucgacaugagcaugaccuacggccagcaguucggccccaccuaccuggacggggccgacgugaccaagaucaagccccacaacucccacgagggcaagacguucuacgugcucccgaacgacgacacccugcgcgucgaggccuucgaguacuaccacaccaccgaccccagcuuccuggggcgguacauguccgcccucaaccacacgaagaaguggaaguacccccaggugaacggccugaccagcaucaagugggccgacaacaacugcuaccuggcgaccgcccuccugacccugcagcagaucgagcucaaguucaaccccccggcccugcaggacgccuacuaccgcgcgcgggccggggaggccgccaacuucugcgcccugauccucgcguacugcaacaagacggugggcgagcugggcgacguccgcgagaccauguccuaccuguuccagcacgccaaccucgacagcugcaagcgggugcugaacgucgugugcaagaccugcgggcagcagcagaccacccugaagggcguggaggccgucauguacauggggacgcucuccuacgagcaguucaagaagggcgugcagauccccugcaccugcgggaagcaggccaccaaguaccuggugcagcaggagagccccuucgucaugauguccgcccccccggcgcaguacgagcugaagcacggcaccuucacgugcgccagcgaguacaccggcaacuaccagugcgggcacuacaagcacaucaccuccaaggagacccucuacugcaucgacggcgcccugcugacgaagagcagcgaguacaaggggcccaucaccgacguguucuacaaggagaacuccuacaccaccacgaucaagcccgugaccuacaagcucgacggcgucgugugcaccgagaucgaccccaagcuggacaacuacuacaagaaggacaacagcuacuucaccgagcagccgaucgaccuggugcccaaccagcccuaccccaacgccuccuucgacaacuucaaguucgucugcgacaacaucaaguucgccgacgaccucaaccagcugacgggguacaagaagccggcgagccgcgagcugaaggugaccuucuuccccgaccucaacggcgacguggucgccaucgacuacaagcacuacacccccuccuucaagaagggcgccaagcugcugcacaagcccaucguguggcacgugaacaacgucaccaacaaggccacguacaagccgaacaccuggugcauccggugccucuggagcaccaagcccguggagaccuccaacagcuucgacgugcugaaguccgaggacgcgcaggggauggacaaccuggccugcgaggaccucaagcccgucagcgaggaggugguggagaaccccacgauccagaaggacguccuggagugcaacgugaagaccaccgagguggucggcgacaucauccugaagccggccaacaacucccucaagaucaccgaggagguggggcacacggaccugauggccgccuacguggacaacagcucccugaccaucaagaagcccaacgagcucagccgcguccugggccugaagacccucgcgacccacgggcuggccgccgugaacuccgugcccugggacacgaucgccaacuacgccaagccguuccugaacaaggucgugagcaccaccaccaacaucgugacgcgcugccucaaccgggucugcaccaacuacaugcccuacuucuucacccugcugcuccagcugugcaccuucacccgcuccacgaacagccggaucaaggcguccaugcccaccaccaucgccaagaacaccgugaagagcgugggcaaguucugccuggaggccagcuucaacuaccucaagucccccaacuucagcaagcugaucaacaucaucaucugguuccugcuccuguccgucugccugggcagccucaucuacuccacggccgcccugggggugcugaugagcaaccucggcaugccguccuacugcaccggguaccgcgagggcuaccugaacagcaccaacgugaccaucgcgacguacugcaccggcuccauccccugcagcgucugccuguccgggcucgacagccuggacaccuaccccucccuggagaccauccagaucacgaucagcuccuucaagugggaccucaccgccuucggccugguggccgagugguuccuggccuacauccucuucacccgguucuucuacgugcuggggcuggccgcgaucaugcagcucuucuucagcuacuucgccguccacuucaucuccaacagcuggcugauguggcugaucaucaaccuggugcagauggcccccaucuccgccauggugcgcauguacaucuucuucgcgagcuucuacuacgucuggaagagcuacgugcacguggucgacggcugcaacuccagcaccugcaugaugugcuacaagcggaaccgcgccacgcggguggagugcaccaccaucgucaacggggugcgccgguccuucuacguguacgccaacggcggcaagggguucugcaagcuccacaacuggaacugcgucaacugcgacaccuucugcgccggcagcacguucaucuccgacgagguggcccgcgaccugagccugcaguucaagcggccgaucaaccccaccgaccaguccagcuacaucguggacuccgucaccgugaagaacgggagcauccaccucuacuucgacaaggcgggccagaagaccuacgagcgccacucccugagccacuucgugaaccuggacaaccuccgggccaacaacacgaaggggucccugcccaucaacgucaucguguucgacggcaagagcaagugcgaggaguccagcgccaaguccgccagcguguacuacucccagcugaugugccagcccauccuccugcuggaccaggcccucgucagcgacgugggcgacagcgcggagguggccgucaagauguucgacgccuacgugaacaccuucuccagcaccuucaacgugccgauggagaagcugaagacccuggucgccacggccgaggcggagcucgccaagaacgugucccuggacaacgugcugagcaccuucaucuccgccgcccgccagggguucgucgacagcgacguggagaccaaggacguggucgagugccucaagcugucccaccagagcgacaucgaggugaccggcgacuccugcaacaacuacaugcugacguacaacaagguggagaacaugaccccccgggaccucggggcgugcaucgacugcagcgcccgccacaucaacgcccaggucgccaagucccacaacaucgcccugaucuggaacgugaaggacuucaugagccuguccgagcagcuccggaagcagauccgcagcgcggccaagaagaacaaccugcccuucaagcugaccugcgccaccacgcgccagguggucaacguggugaccaccaagaucgcccucaagggcggguga

SEQ ID NO: 17850 - RNA, 5841 nt, Artificial Sequence
  SARS-CoV-2__MT810930.1__non-structural protein 3 (NSP3) CDS gc
auggcccccaccaaggugaccuucggcgacgacacggucaucgaggugcagggguacaagagcgugaacaucaccuucgagcuggacgagcgcaucgacaagguccucaacgagaagugcuccgccuacaccguggagcugggcaccgaggugaacgaguucgcgugcgucguggccgacgccgugaucaagacgcugcagccggucagcgagcuccugaccccccuggggaucgaccucgacgagugguccauggccaccuacuaccuguucgacgagagcggcgaguucaagcuggccucccacauguacugcagcuucuacccccccgacgaggacgaggaggagggggacugcgaggaggaggaguucgagccguccacccaguacgaguacggcacggaggacgacuaccagggcaagccccucgaguucggggcgaccagcgccgcccugcagcccgaggaggagcaggaggaggacuggcuggacgacgacucccagcagaccgugggccagcaggacgggagcgaggacaaccagaccacgaccauccagaccaucguggagguccagccccagcucgagauggagcugaccccgguggugcagacgaucgaggucaacuccuucagcggcuaccugaagcucaccgacaacguguacaucaagaacgccgacaucguggaggaggcgaagaaggucaagcccaccgugguggucaacgccgccaacguguaccugaagcacgggggcggcguggccggggcccugaacaaggcgaccaacaacgccaugcaggucgaguccgacgacuacaucgccacgaacggcccccucaagguggggggcagcugcguccuguccggccacaaccuggccaagcacugccuccacgugguggggcccaacgucaacaagggcgaggacauccagcugcugaagagcgccuacgagaacuucaaccagcacgaggugcuccuggcgccgcugcucuccgccgggaucuucggcgccgaccccauccacagccugcgggugugcgucgacaccgugcgcaccaacguguaccuggccgucuucgacaagaaccucuacgacaagcugguguccagcuuccuggagaugaagagcgagaagcagguggagcagaagaucgccgagauccccaaggaggaggucaagcccuucaucaccgaguccaagccgagcguggagcagcggaagcaggacgacaagaagaucaaggcgugcguggaggaggucacgaccacccucgaggagaccaaguuccugacggagaaccugcuccuguacaucgacaucaacgggaaccugcaccccgacuccgccacccucgugagcgacaucgacaucaccuuccugaagaaggacgcccccuacaucgugggcgacgucgugcaggagggcgugcugaccgccgucgugauccccacgaagaaggccgggggcaccaccgacaugcucgcgaaggcccugcgcaaggugccgaccgacaacuacaucacgaccuaccccgggcagggccugaacggguacaccgucgaggaggccaagaccgugcucaagaagugcaaguccgccuucuacauccugcccagcaucaucuccaacgagaagcaggagauccugggcaccgugagcuggaaccuccgggagaugcuggcgcacgccgaggagacgcgcaagcugaugcccgucugcguggagaccaaggccaucguguccaccauccagcggaaguacaagggcaucaagauccaggagggggucguggacuacggcgcccgcuucuacuucuacaccagcaagacgaccguggccucccugaucaacacccucaacgaccugaacgagacccuggucacgaugccgcucggguacgugacccacggccugaaccuggaggaggcggcccgguacaugcgcagccucaaggugcccgccaccgucuccgugagcucccccgacgccgugaccgccuacaacggguaccugacgagcuccagcaagacccccgaggagcacuucaucgagaccaucucccuggcgggcagcuacaaggacuggagcuacuccggccagagcacccagcucgggaucgaguuccugaagcggggcgacaaguccgucuacuacacgagcaacccgaccaccuuccaccuggacggggaggugaucaccuucgacaaccucaagacgcugcugucccuccgcgaggugcggaccaucaaggucuucaccaccguggacaacaucaaccugcacacgcagguggucgacaugagcaugaccuacggccagcaguucggccccaccuaccuggacggggccgacgugaccaagaucaagccccacaacucccacgagggcaagacguucuacgugcucccgaacgacgacacccugcgcgucgaggccuucgaguacuaccacaccaccgaccccagcuuccuggggcgguacauguccgcccucaaccacacgaagaaguggaaguacccccaggugaacggccugaccagcaucaagugggccgacaacaacugcuaccuggcgaccgcccuccugacccugcagcagaucgagcucaaguucaaccccccggcccugcaggacgccuacuaccgcgcgcgggccggggaggccgccaacuucugcgcccugauccucgcguacugcaacaagacggugggcgagcugggcgacguccgcgagaccauguccuaccuguuccagcacgccaaccucgacagcugcaagcgggugcugaacgucgugugcaagaccugcgggcagcagcagaccacccugaagggcguggaggccgucauguacauggggacgcucuccuacgagcaguucaagaagggcgugcagauccccugcaccugcgggaagcaggccaccaaguaccuggugcagcaggagagccccuucgucaugauguccgcccccccggcgcaguacgagcugaagcacggcaccuucacgugcgccagcgaguacaccggcaacuaccagugcgggcacuacaagcacaucaccuccaaggagacccucuacugcaucgacggcgcccugcugacgaagagcagcgaguacaaggggcccaucaccgacguguucuacaaggagaacuccuacaccaccacgaucaagcccgugaccuacaagcucgacggcgucgugugcaccgagaucgaccccaagcuggacaacuacuacaagaaggacaacagcuacuucaccgagcagccgaucgaccuggugcccaaccagcccuaccccaacgccuccuucgacaacuucaaguucgucugcgacaacaucaaguucgccgacgaccucaaccagcugacgggguacaagaagccggcgagccgcgagcugaaggugaccuucuuccccgaccucaacggcgacguggucgccaucgacuacaagcacuacacccccuccuucaagaagggcgccaagcugcugcacaagcccaucguguggcacgugaacaacgccaccaacaaggcgacguacaagccgaacaccuggugcauccggugccucuggagcaccaagcccgucgagaccuccaacagcuucgacgugcugaaguccgaggacgcccaggggauggacaaccuggccugcgaggaccucaagcccgugagcgaggaggucguggagaaccccacgauccagaaggacgugcuggagugcaacgucaagaccaccgagguggugggcgacaucauccugaagccggccaacaacucccucaagaucaccgaggaggucgggcacacggaccugauggccgcguacguggacaacagcucccugaccaucaagaagcccaacgagcucagccgcgugcugggccugaagacccucgccacccacgggcuggccgccgucaacuccgugcccugggacacgaucgccaacuacgcgaagccguuccugaacaagguggucagcaccaccaccaacaucgugacgcgcugccucaaccgggugugcaccaacuacaugcccuacuucuucacccugcugcuccagcugugcaccuucacccgcuccacgaacagccggaucaaggccuccaugcccaccaccaucgccaagaacaccgucaagagcgugggcaaguucugccuggaggccagcuucaacuaccucaagucccccaacuucagcaagcugaucaacaucaucaucugguuccugcuccuguccgugugccugggcagccucaucuacuccacggccgcgcuggggguccugaugagcaaccucggcaugccguccuacugcaccggguaccgcgagggcuaccugaacagcaccaacgugaccaucgccacguacugcaccggcuccauccccugcagcgugugccuguccgggcucgacagccuggacaccuaccccucccuggagaccauccagaucacgaucagcuccuucaagugggaccucaccgccuucggccuggucgccgagugguuccuggccuacauccucuucacccgguucuucuacgugcuggggcuggcggccaucaugcagcucuucuucagcuacuucgccgugcacuucaucuccaacagcuggcugauguggcugaucaucaaccugguccagauggcccccaucuccgcgauggugcgcauguacaucuucuucgccagcuucuacuacguguggaagagcuacguccacgugguggacggcugcaacuccagcaccugcaugaugugcuacaagcggaaccgcgccacgcgggucgagugcaccaccaucgugaacgggguccgccgguccuucuacguguacgccaacggcggcaagggguucugcaagcuccacaacuggaacugcgugaacugcgacaccuucugcgccggcagcacguucaucuccgacgaggucgcgcgcgaccugagccugcaguucaagcggccgaucaaccccaccgaccaguccagcuacaucguggacuccgugaccgucaagaacgggagcauccaccucuacuucgacaaggccggccagaagaccuacgagcgccacucccugagccacuucgugaaccuggacaaccuccgggccaacaacacgaaggggucccugcccaucaacgugaucgucuucgacggcaagagcaagugcgaggaguccagcgccaaguccgccagcguguacuacucccagcugaugugccagcccauccuccugcuggaccaggcgcucgugagcgacgucggcgacagcgccgagguggccgugaagauguucgacgccuacgucaacaccuucuccagcaccuucaacgugccgauggagaagcugaagacccugguggccacggcggaggccgagcucgccaagaacgucucccuggacaacgugcugagcaccuucaucuccgccgcgcgccagggguucguggacagcgacgucgagaccaaggacgugguggagugccucaagcugucccaccagagcgacaucgaggucaccggcgacuccugcaacaacuacaugcugacguacaacaagguggagaacaugaccccccgggaccucggggccugcaucgacugcagcgcccgccacaucaacgcccagguggccaagucccacaacaucgcgcugaucuggaacgucaaggacuucaugagccuguccgagcagcuccggaagcagauccgcagcgccgccaagaagaacaaccugcccuucaagcugaccugcgccaccacgcgccagguggugaacgucgugaccaccaagaucgcccucaagggcggguga

SEQ ID NO: 17851 - RNA, 5841 nt, Artificial Sequence
  SARS-CoV-2__MT810941.1__non-structural protein 3 (NSP3) CDS gc
auggcccccaccaaggugaccuucggcgacgacacggucaucgaggugcagggguacaagagcgugaacaucaccuucgagcuggacgagcgcaucgacaagguccucaacgagaagugcuccgccuacaccguggagcugggcaccgaggugaacgaguucgcgugcgucguggccgacgccgugaucaagacgcugcagccggucagcgagcuccugaccccccuggggaucgaccucgacgagugguccauggccaccuacuaccuguucgacgagagcggcgaguucaagcuggccucccacauguacugcagcuucuacccccccgacgaggacgaggaggagggggacugcgaggaggaggaguucgagccguccacccaguacgaguacggcacggaggacgacuaccagggcaagccccucgaguucggggcgaccagcgccgcccugcagcccgaggaggagcaggaggaggacuggcuggacgacgacucccagcagaccgugggccagcaggacgggagcgaggacaaccagaccacgaccauccagaccaucguggagguccagccccagcucgagauggagcugaccccgguggugcagacgaucgaggucaacuccuucagcggcuaccugaagcucaccgacaacguguacaucaagaacgccgacaucguggaggaggcgaagaaggucaagcccaccgugguggucaacgccgccaacguguaccugaagcacgggggcggcguggccggggcccugaacaaggcgaccaacaacgccaugcaggucgaguccgacgacuacaucgccacgaacggcccccucaagguggggggcagcugcguccuguccggccacaaccuggccaagcacugccuccacgugguggggcccaacgucaacaagggcgaggacauccagcugcugaagagcgccuacgagaacuucaaccagcacgaggugcuccuggcgccgcugcucuccgccgggaucuucggcgccgaccccauccacagccugcgggugugcgucgacaccgugcgcaccaacguguaccuggccgucuucgacaagaaccucuacgacaagcugguguccagcuuccuggagaugaagagcgagaagcagguggagcagaagaucgccgagauccccaaggaggaggucaagcccuucaucaccgaguccaagccgagcguggagcagcggaagcaggacgacaagaagaucaaggcgugcguggaggaggucacgaccacccucgaggagaccaaguuccugacggagaaccugcuccuguacaucgacaucaacgggaaccugcaccccgacuccgccacccucgugagcgacaucgacaucaccuuccugaagaaggacgcccccuacaucgugggcgacgucgugcaggagggcgugcugaccgccgucgugauccccacgaagaaggccgggggcaccaccgagaugcucgcgaaggcccugcgcaaggugccgaccgacaacuacaucacgaccuaccccgggcagggccugaacggguacaccgucgaggaggccaagaccgugcucaagaagugcaaguccgccuucuacauccugcccagcaucaucuccaacgagaagcaggagauccugggcaccgugagcuggaaccuccgggagaugcuggcgcacgccgaggagacgcgcaagcugaugcccgucugcguggagaccaaggccaucguguccaccauccagcggaaguacaagggcaucaagauccaggagggggucguggacuacggcgcccgcuucuacuucuacaccagcaagacgaccguggccucccugaucaacacccucaacgaccugaacgagacccuggucacgaugccgcucggguacgugacccacggccugaaccuggaggaggcggcccgguacaugcgcagccucaaggugcccgccaccgucuccgugagcucccccgacgccgugaccgccuacaacggguaccugacgagcuccagcaagacccccgaggagcacuucaucgagaccaucucccuggcgggcagcuacaaggacuggagcuacuccggccagagcacccagcucgggaucgaguuccugaagcggggcgacaaguccgucuacuacacgagcaacccgaccaccuuccaccuggacggggaggugaucaccuucgacaaccucaagacgcugcugucccuccgcgaggugcggaccaucaaggucuucaccaccguggacaacaucaaccugcacacgcagguggucgacaugagcaugaccuacggccagcaguucggccccaccuaccuggacggggccgacgugaccaagaucaagccccacaacucccacgagggcaagacguucuacgugcucccgaacgacgacacccugcgcgucgaggccuucgaguacuaccacaccaccgaccccagcuuccuggggcgguacauguccgcccucaaccacacgaagaaguggaaguacccccaggugaacggccugaccagcaucaagugggccgacaacaacugcuaccuggcgaccgcccuccugacccugcagcagaucgagcucaaguucaaccccccggcccugcaggacgccuacuaccgcgcgcgggccggggaggccgccaacuucugcgcccuggugcucgcguacugcaacaagacggucggcgagcugggcgacgugcgcgagaccauguccuaccuguuccagcacgccaaccucgacagcugcaagcggguccugaacguggugugcaagaccugcgggcagcagcagaccacccugaagggcgucgaggccgugauguacauggggacgcucuccuacgagcaguucaagaagggcgugcagauccccugcaccugcgggaagcaggccaccaaguaccugguccagcaggagagccccuucgugaugauguccgcccccccggcgcaguacgagcugaagcacggcaccuucacgugcgccagcgaguacaccggcaacuaccagugcgggcacuacaagcacaucaccuccaaggagacccucuacugcaucgacggcgcccugcugacgaagagcagcgaguacaaggggcccaucaccgacguguucuacaaggagaacuccuacaccaccacgaucaagcccgucaccuacaagcucgacggcguggugugcaccgagaucgaccccaagcuggacaacuacuacaagaaggacaacagcuacuucaccgagcagccgaucgaccugguccccaaccagcccuaccccaacgccuccuucgacaacuucaaguucgugugcgacaacaucaaguucgccgacgaccucaaccagcugacgggguacaagaagccggcgagccgcgagcugaaggugaccuucuuccccgaccucaacggcgacgucguggccaucgacuacaagcacuacacccccuccuucaagaagggcgccaagcugcugcacaagcccaucguguggcacgucaacaacgccaccaacaaggcgacguacaagccgaacaccuggugcauccggugccucuggagcaccaagcccguggagaccuccaacagcuucgacgugcugaaguccgaggacgcccaggggauggacaaccuggccugcgaggaccucaagcccgucagcgaggaggugguggagaaccccacgauccagaaggacguccuggagugcaacgugaagaccaccgagguggucggcgacaucauccugaagccggccaacaacucccucaagaucaccgaggagguggggcacacggaccugauggccgcguacguggacaacagcucccugaccaucaagaagcccaacgagcucagccgcguccugggccugaagacccucgccacccacgggcuggccgccgugaacuccgugcccugggacacgaucgccaacuacgcgaagccguuccugaacaaggucgugagcaccaccaccaacaucgugacgcgcugccucaaccgggucugcaccaacuacaugcccuacuucuucacccugcugcuccagcugugcaccuucacccgcuccacgaacagccggaucaaggccuccaugcccaccaccaucgccaagaacaccgugaagagcgugggcaaguucugccuggaggccagcuucaacuaccucaagucccccaacuucagcaagcugaucaacaucaucaucugguuccugcuccuguccgucugccugggcagccucaucuacuccacggccgcgcugggggugcugaugagcaaccucggcaugccguccuacugcaccggguaccgcgagggcuaccugaacagcaccaacgugaccaucgccacguacugcaccggcuccauccccugcagcgucugccuguccgggcucgacagccuggacaccuaccccucccuggagaccauccagaucacgaucagcuccuucaagugggaccucaccgccuucggccugguggccgagugguuccuggccuacauccucuucacccgguucuucuacgugcuggggcuggcggccaucaugcagcucuucuucagcuacuucgccguccacuucaucuccaacagcuggcugauguggcugaucaucaaccuggugcagauggcccccaucuccgcgauggugcgcauguacaucuucuucgccagcuucuacuacgucuggaagagcuacgugcacguggucgacggcugcaacuccagcaccugcaugaugugcuacaagcggaaccgcgccacgcggguggagugcaccaccaucgucaacggggugcgccgguccuucuacguguacgccaacggcggcaagggguucugcaagcuccacaacuggaacugcgucaacugcgacaccuucugcgccggcagcacguucaucuccgacgagguggcgcgcgaccugagccugcaguucaagcggccgaucaaccccaccgaccaguccagcuacaucguggacuccgucaccgugaagaacgggagcauccaccucuacuucgacaaggccggccagaagaccuacgagcgccacucccugagccacuucgugaaccuggacaaccuccgggccaacaacacgaaggggucccugcccaucaacgucaucguguucgacggcaagagcaagugcgaggaguccagcgccaaguccgccagcguguacuacucccagcugaugugccagcccauccuccugcuggaccaggcgcucgucagcgacgugggcgacagcgccgagguggccgucaagauguucgacgccuacgugaacaccuucuccagcaccuucaacgugccgauggagaagcugaagacccuggucgccacggcggaggccgagcucgccaacaacgugucccuggacaacgugcugagcaccuucaucuccgccgcgcgccagggguucgucgacagcgacguggagaccaaggacguggucgagugccucaagcugucccaccagagcgacaucgaggugaccggcgacuccugcaacaacuacaugcugacguacaacaagguggagaacaugaccccccgggaccucggggccugcaucgacugcagcgcccgccacaucaacgcccaggucgccaagucccacaacaucgcgcugaucuggaacgugaaggacuucaugagccuguccgagcagcuccggaagcagauccgcagcgccgccaagaagaacaaccugcccuucaagcugaccugcgccaccacgcgccagguggucaacguggugaccaccaagaucgcccucaagggcggguga

SEQ ID NO: 17852 - RNA, 5841 nt, Artificial Sequence
  SARS-CoV-2__MT810979.1__non-structural protein 3 (NSP3) CDS gc
auggcccccaccaaggugaccuucggcgacgacacggucaucgaggugcagggguacaagagcgugaacaucaccuucgagcuggacgagcgcaucgacaagguccucaacgagaagugcuccgccuacaccguggagcugggcaccgaggugaacgaguucgcgugcgucguggccgacgccgugaucaagacgcugcagccggucagcgagcuccugaccccccuggggaucgaccucgacgagugguccauggccaccuacuaccuguucgacgagagcggcgaguucaagcuggccucccacauguacugcagcuucuacccccccgacgaggacgaggaggagggggacugcgaggaggaggaguucgagccguccacccaguacgaguacggcacggaggacgacuaccagggcaagccccucgaguucggggcgaccagcgccgcccugcagcccgaggaggagcaggaggaggacuggcuggacgacgacucccagcagaccgugggccagcaggacgggagcgaggacaaccagaccacgaccauccagaccaucguggagguccagccccagcucgagauggagcugaccccgguggugcagacgaucgaggucaacuccuucagcggcuaccugaagcucaccgacaacguguacaucaagaacgccgacaucguggaggaggcgaagaaggucaagcccaccgugguggucaacgccgccaacguguaccugaagcacgggggcggcguggccggggcccugaacaaggcgaccaacaacgccaugcaggucgaguccgacgacuacaucgccacgaacggcccccucaagguggggggcagcugcguccuguccggccacaaccuggccaagcacugccuccacgugguggggcccaacgucaacaagggcgaggacauccagcugcugaagagcgccuacgagaacuucaaccagcacgaggugcuccuggcgccgcugcucuccgccgggaucuucggcgccgaccccauccacagccugcgggugugcgucgacaccgugcgcaccaacguguaccuggccgucuucgacaagaaccucuacgacaagcugguguccagcuuccuggagaugaagagcgagaagcagguggagcagaagaucgccgagauccccaaggaggaggucaagcccuucaucaccgaguccaagccgagcguggagcagcggaagcaggacgacaagaagaucaaggcgugcguggaggaggucacgaccacccucgaggagaccaaguuccugacggagaaccugcuccuguacaucgacaucaacgggaaccugcaccccgacuccgccacccucgugagcgacaucgacaucaccuuccugaagaaggacgcccccuacaucgugggcgacgucgugcaggagggcgugcugaccgccgucgugauccccacgaagaaggccgggggcaccaccgagaugcucgcgaaggcccugcgcaaggugccgaccgacaacuacaucacgaccuaccccgggcagggccugaacggguacaccgucgaggaggccaagaccgugcucaagaagugcaaguccgccuucuacauccugcccagcaucaucuccaacgagaagcaggagauccugggcaccgugagcuggaaccuccgggagaugcuggcgcacgccgaggagacgcgcaagcugaugcccgucugcguggagaccaaggccaucguguccaccauccagcggaaguacaagggcaucaagauccaggagggggucguggacuacggcgcccgcuucuacuucuacaccagcaagacgaccguggccucccugaucaacacccucaacgaccugaacgagacccuggucacgaugccgcucggguacgugacccacggccugaaccuggaggaggcggcccgguacaugcgcagccucaaggugcccgccaccgucuccgugagcucccccgacgccgugaccgccuacaacggguaccugacgagcuccagcaagacccccgaggagcacuucaucgagaccaucucccuggcgggcagcuacaaggacuggagcuacuccggccagagcacccagcucgggaucgaguuccugaagcggggcgacaaguccgucuacuacacgagcaacccgaccaccuuccaccuggacggggaggugaucaccuucgacaaccucaagacgcugcugucccuccgcgaggugcggaccaucaaggucuucaccaccguggacaacaucaaccugcacacgcagguggucgacaugagcaugaccuacggccagcaguucggccccaccuaccuggacggggccgacgugaccaagaucaagccccacaacucccacgagggcaagacguucuacgugcucccgaacgacgacacccugcgcgucgaggccuucgaguacuaccacaccaccgaccccagcuuccuggggcgguacauguccgcccucaaccacacgaagaaguggaaguacccccaggugaacggccugaccagcaucaagugggccgacaacaacugcuaccuggcgaccgcccuccugacccugcagcagaucgagcucaaguucaaccccccggcccugcaggacgccuacuaccgcgcgcgggccggggaggccgccaacuucugcgcccugauccucgcguacugcaacaagacggugggcgagcugggcgacguccgcgagaccauguccuaccuguuccagcacgccaaccucgacagcugcaagcgggugcugaacgucgugugcaagaccugcgggcagcagcagaccacccugaagggcguggaggccgucauguacauggggacgcucuccuacgagcaguucaagaagggcgugcagauccccugcaccugcgggaagcaggccaccaaguaccuggugcagcaggagagccccuucgucaugauguccgcccccccggcgcaguacgagcugaagcacggcaccuucacgugcgccagcgaguacaccggcaacuaccagugcgggcacuacaagcacaucaccuccaaggagacccucuacugcaucgacggcgcccugcugacgaagagcagcgaguacaaggggcccaucaccgacguguucuacaaggagaacuccuacaccaccacgaucaagcccgugaccuacaagcucgacggcgucgugugcaccgagaucgaccccaagcuggacaacuacuacaagaaggacaacagcuacuucaccgagcagccgaucgaccuggugcccaaccagcccuaccccaacgccuccuucgacaacuucaaguucgucugcgacaacaucaaguucgccgacgaccucaaccagcugacgggguacaagaagccggcgagccgcgagcugaaggugaccuucuuccccgaccucaacggcgacguggucgccaucgacuacaagcacuacacccccuccuucaagaagggcgccaagcugcugcacaagcccaucguguggcacgugaacaacgccaccaacaaggcgacguacaagccgaacaccuggugcauccggugccucuggagcaccaagcccgucgagaccuccaacagcuucgacgugcugaaguccgaggacgcccaggggauggacaaccuggccugcgaggaccucaagcccgugagcgaggaggucguggagaaccccacgauccagaaggacgugcuggagugcaacgucaagaccaccgagguggugggcgacaucauccugaagccggccaacaacucccucaagaucaccgaggaggucgggcacacggaccugauggccgcguacguggacaacagcucccugaccaucaagaagcccaacgagcucagccgcgugcugggccugaagaccuucgccacccacgggcucgccgccgucaacuccgugcccugggacacgaucgccaacuacgcgaagccguuccugaacaagguggucagcaccaccaccaacaucgugacgcgcugccugaaccgggugugcaccaacuacaugcccuacuucuucacccuccugcugcagcucugcaccuucacccgcuccacgaacagccggaucaaggccuccaugcccaccaccaucgccaagaacaccgucaagagcgugggcaaguucugccuggaggccagcuucaacuaccugaagucccccaacuucagcaagcucaucaacaucaucaucugguuccugcugcucuccgugugccugggcagccugaucuacuccacggccgcgcucgggguccugaugagcaaccugggcaugccguccuacugcaccggguaccgcgagggcuaccucaacagcaccaacgugaccaucgccacguacugcaccggcuccauccccugcagcgugugccuguccgggcuggacagccucgacaccuaccccucccuggagaccauccagaucacgaucagcuccuucaagugggaccugaccgccuucggccucgucgccgagugguuccuggccuacauccuguucacccgguucuucuacgugcucgggcuggcggccaucaugcagcuguucuucagcuacuucgccgugcacuucaucuccaacagcuggcucauguggcugaucaucaaccugguccagauggcccccaucuccgcgauggugcgcauguacaucuucuucgccagcuucuacuacguguggaagagcuacguccacgugguggacggcugcaacuccagcaccugcaugaugugcuacaagcggaaccgcgccacgcgggucgagugcaccaccaucgugaacgggguccgccgguccuucuacguguacgccaacggcggcaagggguucugcaagcugcacaacuggaacugcgugaacugcgacaccuucugcgccggcagcacguucaucuccgacgaggucgcgcgcgaccucagccugcaguucaagcggccgaucaaccccaccgaccaguccagcuacaucguggacuccgugaccgucaagaacgggagcauccaccuguacuucgacaaggccggccagaagaccuacgagcgccacucccucagccacuucgugaaccuggacaaccugcgggccaacaacacgaaggggucccuccccaucaacgugaucgucuucgacggcaagagcaagugcgaggaguccagcgccaaguccgccagcguguacuacucccagcugaugugccagcccauccugcuccuggaccaggcgcuggugagcgacgucggcgacagcgccgagguggccgugaagauguucgacgccuacgucaacaccuucuccagcaccuucaacgugccgauggagaagcucaagacccugguggccacggcggaggccgagcuggccaagaacgucucccucgacaacgugcugagcaccuucaucuccgccgcgcgccagggguucguggacagcgacgucgagaccaaggacgugguggagugccugaagcucucccaccagagcgacaucgaggucaccggcgacuccugcaacaacuacaugcugacguacaacaagguggagaacaugaccccccgggaccugggggccugcaucgacugcagcgcccgccacaucaacgcccagguggccaagucccacaacaucgcgcucaucuggaacgucaaggacuucaugagccuguccgagcagcugcggaagcagauccgcagcgccgccaagaagaacaaccuccccuucaagcugaccugcgccaccacgcgccagguggugaacgucgugaccaccaagaucgcccugaagggcggguga

SEQ ID NO: 17853 - RNA, 5841 nt, Artificial Sequence
  SARS-CoV-2__MT810984.1__non-structural protein 3 (NSP3) CDS gc
auggcccccaccaaggugaccuucggcgacgacacggucaucgaggugcagggguacaagagcgugaacaucaccuucgagcuggacgagcgcaucgacaagguccucaacgagaagugcuccgccuacaccguggagcugggcaccgaggugaacgaguucgcgugcgucguggccgacgccgugaucaagacgcugcagccggucagcgagcuccugaccccccuggggaucgaccucgacgagugguccauggccaccuacuaccuguucgacgagagcggcgaguucaagcuggccucccacauguacugcagcuucuacccccccgacgaggacgaggaggagggggacugcgaggaggaggaguucgagccguccacccaguacgaguacggcacggaggacgacuaccagggcaagccccucgaguucggggcgaccagcgccgcccugcagcccgaggaggagcaggaggaggacuggcuggacgacgacucccagcagaccgugggccagcaggacgggagcgaggacaaccagaccacgaccauccagaccaucguggagguccagccccagcucgagauggagcugaccccgguggugcagacgaucgaggucaacuccuucagcggcuaccugaagcucaccgacaacguguacaucaagaacgccgacaucguggaggaggcgaagaaggucaagcccaccgugguggucaacgccgccaacguguaccugaagcacgggggcggcguggccggggcccugaacaaggcgaccaacaacgccaugcaggucgaguccgacgacuacaucgccacgaacggcccccucaagguggggggcagcugcguccuguccggccacaaccuggccaagcacugccuccacgugguggggcccaacgucaacaagggcgaggacauccagcugcugaagagcgccuacgagaacuucaaccagcacgaggugcuccuggcgccgcugcucuccgccgggaucuucggcgccgaccccauccacagccugcgggugugcgucgacaccgugcgcaccaacguguaccuggccgucuucgacaagaaccucuacgacaagcugguguccagcuuccuggagaugaagagcgagaagcagguggagcagaagaucgccgagauccccaaggaggaggucaagcccuucaucaccgaguccaagccgagcguggagcagcggaagcaggacgacaagaagaucaaggcgugcguggaggaggucacgaccacccucgaggagaccaaguuccugacggagaaccugcuccuguacaucgacaucaacgggaaccugcaccccgacuccgccacccucgugagcgacaucgacaucaccuuccugaagaaggacgcccccuacaucgugggcgacgucgugcaggagggcgugcugaccgccgucgugauccccacgaagaaggccgggggcaccaccgagaugcucgcgaaggcccugcgcaaggugccgaccgacaacuacaucacgaccuaccccgggcagggccugaacggguacaccgucgaggaggccaagaccgugcucaagaagugcaaguccguguucuacauccugcccagcaucaucuccaacgagaagcaggagauccugggcaccgucagcuggaaccuccgggagaugcuggcccacgcggaggagacgcgcaagcugaugcccgugugcguggagaccaaggccaucgucuccaccauccagcggaaguacaagggcaucaagauccaggagggggugguggacuacggcgcccgcuucuacuucuacaccagcaagacgaccgucgccucccugaucaacacccucaacgaccugaacgagacccuggugacgaugccgcucggguacgugacccacggccugaaccuggaggaggccgcgcgguacaugcgcagccucaagguccccgccaccguguccgugagcucccccgacgccgucaccgccuacaacggguaccugacgagcuccagcaagacccccgaggagcacuucaucgagaccaucucccuggccggcagcuacaaggacuggagcuacuccggccagagcacccagcucgggaucgaguuccugaagcggggcgacaaguccguguacuacacgagcaacccgaccaccuuccaccuggacggggaggugaucaccuucgacaaccucaagacgcugcugucccuccgcgagguccggaccaucaagguguucaccaccguggacaacaucaaccugcacacgcaggucguggacaugagcaugaccuacggccagcaguucggccccaccuaccuggacggggcggacgugaccaagaucaagccccacaacucccacgagggcaagacguucuacguccucccgaacgacgacacccugcgcguggaggccuucgaguacuaccacaccaccgaccccagcuuccuggggcgguacauguccgcccucaaccacacgaagaaguggaaguacccccaggugaacggccugaccagcaucaagugggccgacaacaacugcuaccuggccaccgcgcuccugacccugcagcagaucgagcucaaguucaaccccccggcccugcaggacgccuacuaccgcgcccgggcgggggaggccgccaacuucugcgcccugauccucgccuacugcaacaagacggucggcgagcugggcgacgugcgcgagaccauguccuaccuguuccagcacgcgaaccucgacagcugcaagcggguccugaacguggugugcaagaccugcgggcagcagcagaccacccugaagggcgucgaggccgugauguacauggggacgcucuccuacgagcaguucaagaagggcgugcagauccccugcaccugcgggaagcaggccaccaaguaccugguccagcaggagagccccuucgugaugauguccgcccccccggcccaguacgagcugaagcacggcaccuucacgugcgcgagcgaguacaccggcaacuaccagugcgggcacuacaagcacaucaccuccaaggagacccucuacugcaucgacggcgcccugcugacgaagagcagcgaguacaaggggcccaucaccgacguguucuacaaggagaacuccuacaccaccacgaucaagcccgucaccuacaagcucgacggcguggugugcaccgagaucgaccccaagcuggacaacuacuacaagaaggacaacagcuacuucaccgagcagccgaucgaccugguccccaaccagcccuaccccaacgccuccuucgacaacuucaaguucgugugcgacaacaucaaguucgccgacgaccucaaccagcugacgggguacaagaagccggccagccgcgagcugaaggugaccuucuuccccgaccucaacggcgacgucguggcgaucgacuacaagcacuacacccccuccuucaagaagggcgccaagcugcugcacaagcccaucguguggcacgucaacaacgccaccaacaaggccacguacaagccgaacaccuggugcauccggugccucuggagcaccaagcccguggagaccuccaacagcuucgacgugcugaaguccgaggacgcgcaggggauggacaaccuggccugcgaggaccucaagcccgucagcgaggaggugguggagaaccccacgauccagaaggacguccuggagugcaacgugaagaccaccgagguggucggcgacaucauccugaagccggccaacaacucccucaagaucaccgaggagguggggcacacggaccugauggccgccuacguggacaacagcucccugaccaucaagaagcccaacgagcucagccgcguccugggccugaagacccucgcgacccacgggcuggccgccgugaacuccgugcccugggacacgaucgccaacuacgccaagccguuccugaacaaggucgugagcaccaccaccaacaucgugacgcgcugccucaaccgggucugcaccaacuacaugcccuacuucuucacccugcugcuccagcugugcaccuucacccgcuccacgaacagccggaucaaggcguccaugcccaccaccaucgccaagaacaccgugaagagcgugggcaaguucugccuggaggccagcuucaacuaccucaagucccccaacuucagcaagcugaucaacaucaucaucugguuccugcuccuguccgucugccugggcagccucaucuacuccacggccgcccugggggugcugaugagcaaccucggcaugccguccuacugcaccggguaccgcgagggcuaccugaacagcaccaacgugaccaucgcgacguacugcaccggcuccauccccugcagcgucugccuguccgggcucgacagccuggacaccuaccccucccuggagaccauccagaucacgaucagcuccuucaagugggaccucaccgccuucggccugguggccgagugguuccuggccuacauccucuucacccgguucuucuacgugcuggggcuggccgcgaucaugcagcucuucuucagcuacuucgccguccacuucaucuccaacagcuggcugauguggcugaucaucaaccuggugcagauggcccccaucuccgccauggugcgcauguacaucuucuucgcgagcuucuacuacgucuggaagagcuacgugcacguggucgacggcugcaacuccagcaccugcaugaugugcuacaagcggaaccgcgccacgcggguggagugcaccaccaucgucaacggggugcgccgguccuucuacguguacgccaacggcggcaagggguucugcaagcuccacaacuggaacugcgucaacugcgacaccuucugcgccggcagcacguucaucuccgacgagguggcccgcgaccugagccugcaguucaagcggccgaucaaccccaccgaccaguccagcuacaucguggacuccgucaccgugaagaacgggagcauccaccucuacuucgacaaggcgggccagaagaccuacgagcgccacucccugagccacuucgugaaccuggacaaccuccgggccaacaacacgaaggggucccugcccaucaacgucaucguguucgacggcaagagcaagugcgaggaguccagcgccaaguccgccagcguguacuacucccagcugaugugccagcccauccuccugcuggaccaggcccucgucagcgacgugggcgacagcgcggagguggccgucaagauguucgacgccuacgugaacaccuucuccagcaccuucaacgugccgauggagaagcugaagacccuggucgccacggccgaggcggagcucgccaagaacgugucccuggacaacgugcugagcaccuucaucuccgccgcccgccagggguucgucgacagcgacguggagaccaaggacguggucgagugccucaagcugucccaccagagcgacaucgaggugaccggcgacuccugcaacaacuacaugcugacguacaacaagguggagaacaugaccccccgggaccucggggcgugcaucgacugcagcgcccgccacaucaacgcccaggucgccaagucccacaacaucgcccugaucuggaacgugaaggacuucaugagccuguccgagcagcuccggaagcagauccgcagcgcggccaagaagaacaaccugcccuucaagcugaccugcgccaccacgcgccagguggucaacguggugaccaccaagaucgcccucaagggcggguga

SEQ ID NO: 17854 - RNA, 5841 nt, Artificial Sequence
  SARS-CoV-2__MT810985.1__non-structural protein 3 (NSP3) CDS gc
auggcccccaccaaggugaccuucggcgacgacacggucaucgaggugcagggguacaagagcgugaacaucaccuucgagcuggacgagcgcaucgacaagguccucaacgagaagugcuccgccuacaccguggagcugggcaccgaggugaacgaguucgcgugcgucguggccgacgccgugaucaagacgcugcagccggucagcgagcuccugaccccccuggggaucgaccucgacgagugguccauggccaccuacuaccuguucgacgagagcggcgaguucaagcuggccucccacauguacugcagcuucuacccccccgacgaggacgaggaggagggggacugcgaggaggaggaguucgagccguccacccaguacgaguacggcacggaggacgacuaccagggcaagccccucgaguucggggcgaccagcgccgcccugcagcccgaggaggagcaggaggaggacuggcuggacgacgacucccagcagaccgugggccagcaggacgggagcgaggacaaccagaccacgaccauccagaccaucguggagguccagccccagcucgagauggagcugaccccgguggugcagacgaucgaggucaacuccuucagcggcuaccugaagcucaccgacaacguguacaucaagaacgccgacaucguggaggaggcgaagaaggucaagcccaccgugguggucaacgccgccaacguguaccugaagcacgggggcggcguggccggggcccugaacaaggcgaccaacaacgccaugcaggucgaguccgacgacuacaucgccacgaacggcccccucaagguggggggcagcugcguccuguccggccacaaccuggccaagcacugccuccacgugguggggcccaacgucaacaagggcgaggacauccagcugcugaagagcgccuacgagaacuucaaccagcacgaggugcuccuggcgccgcugcucuccgccgggaucuucggcgccgaccccauccacagccugcgggugugcgucgacaccgugcgcaccaacguguaccuggccgucuucgacaagaaccucuacgacaagcugguguccagcuuccuggagaugaagagcgagaagcagguggagcagaagaucgccgagauccccaaggaggaggucaagcccuucaucaccgaguccaagccgagcguggagcagcggaagcaggacgacaagaagaucaaggcgugcguggaggaggucacgaccacccucgaggagaccaaguuccugacggagaaccugcuccuguacaucgacaucaacgggaaccugcaccccgacuccgccacccucgugagcgacaucgacaucaccuuccugaagaaggacgcccccuacaucgugggcgacgucauccaggagggcgugcugaccgccguggucauccccacgaagaaggccgggggcaccaccgagaugcucgcgaaggcccugcgcaaggugccgaccgacaacuacaucacgaccuaccccgggcagggccugaacggguacaccguggaggaggccaagaccguccucaagaagugcaaguccgccuucuacauccugcccagcaucaucuccaacgagaagcaggagauccugggcaccgugagcuggaaccuccgggagaugcuggcgcacgccgaggagacgcgcaagcugaugcccgugugcgucgagaccaaggccaucguguccaccauccagcggaaguacaagggcaucaagauccaggaggggguggucgacuacggcgcccgcuucuacuucuacaccagcaagacgaccguggccucccugaucaacacccucaacgaccugaacgagacccuggugacgaugccgcucggguacgucacccacggccugaaccuggaggaggcggcccgguacaugcgcagccucaaggugcccgccaccguguccgucagcucccccgacgccgugaccgccuacaacggguaccugacgagcuccagcaagacccccgaggagcacuucaucgagaccaucucccuggcgggcagcuacaaggacuggagcuacuccggccagagcacccagcucgggaucgaguuccugaagcggggcgacaaguccguguacuacacgagcaacccgaccaccuuccaccuggacggggaggucaucaccuucgacaaccucaagacgcugcugucccuccgcgaggugcggaccaucaagguguucaccaccgucgacaacaucaaccugcacacgcaggugguggacaugagcaugaccuacggccagcaguucggccccaccuaccuggacggggccgacgucaccaagaucaagccccacaacucccacgagggcaagacguucuacgugcucccgaacgacgacacccugcgcguggaggccuucgaguacuaccacaccaccgaccccagcuuccuggggcgguacauguccgcccucaaccacacgaagaaguggaaguacccccaggucaacggccugaccagcaucaagugggccgacaacaacugcuaccuggcgaccgcccuccugacccugcagcagaucgagcucaaguucaaccccccggcccugcaggacgccuacuaccgcgcgcgggccggggaggccgccaacuucugcgcccugauccucgcguacugcaacaagacggugggcgagcugggcgacgugcgcgagaccauguccuaccuguuccagcacgccaaccucgacagcugcaagcggguccugaacguggucugcaagaccugcgggcagcagcagaccacccugaagggcguggaggccgugauguacauggggacgcucuccuacgagcaguucaagaagggcguccagauccccugcaccugcgggaagcaggccaccaaguaccuggugcagcaggagagccccuucgugaugauguccgcccccccggcgcaguacgagcugaagcacggcaccuucacgugcgccagcgaguacaccggcaacuaccagugcgggcacuacaagcacaucaccuccaaggagacccucuacugcaucgacggcgcccugcugacgaagagcagcgaguacaaggggcccaucaccgacgucuucuacaaggagaacuccuacaccaccacgaucaagcccgugaccuacaagcucgacggcguggucugcaccgagaucgaccccaagcuggacaacuacuacaagaaggacaacagcuacuucaccgagcagccgaucgaccuggugcccaaccagcccuaccccaacgccuccuucgacaacuucaaguucgugugcgacaacaucaaguucgccgacgaccucaaccagcugacgggguacaagaagccggcgagccgcgagcugaaggucaccuucuuccccgaccucaacggcgacgugguggccaucgacuacaagcacuacacccccuccuucaagaagggcgccaagcugcugcacaagcccaucgucuggcacgugaacaacgccaccaacaaggcgacguacaagccgaacaccuggugcauccggugccucuggagcaccaagcccguggagaccuccaacagcuucgacguccugaaguccgaggacgcccaggggauggacaaccuggccugcgaggaccucaagcccgugagcgaggagguggucgagaaccccacgauccagaaggacgugcuggagugcaacgugaagaccaccgaggucgugggcgacaucauccugaagccggccaacaacucccucaagaucaccgaggagguggggcacacggaccugauggccgcguacgucgacaacagcucccugaccaucaagaagcccaacgagcucagccgcgugcugggccugaagacccucgccacccacgggcuggccgccgugaacuccguccccugggacacgaucgccaacuacgcgaagccguuccugaacaagguggugagcaccaccaccaacaucgucacgcgcugccucaaccgggugugcaccaacuacaugcccuacuucuucacccugcugcuccagcugugcaccuucacccgcuccacgaacagccggaucaaggccuccaugcccaccaccaucgccaagaacaccgugaagagcgucggcaaguucugccuggaggccagcuucaacuaccucaagucccccaacuucagcaagcugaucaacaucaucaucugguuccugcuccuguccgugugccugggcagccucaucuacuccacggccgcgcugggggugcugaugagcaaccucggcaugccguccuacugcaccggguaccgcgagggcuaccugaacagcaccaacgucaccaucgccacguacugcaccggcuccauccccugcagcgugugccuguccgggcucgacagccuggacaccuaccccucccuggagaccauccagaucacgaucagcuccuucaagugggaccucaccgccuucggccugguggccgagugguuccuggccuacauccucuucacccgguucuucuacguccuggggcuggcggccaucaugcagcucuucuucagcuacuucgccgugcacuucaucuccaacagcuggcugauguggcugaucaucaaccuggugcagauggcccccaucuccgcgaugguccgcauguacaucuucuucgccagcuucuacuacguguggaagagcuacgugcacgucguggacggcugcaacuccagcaccugcaugaugugcuacaagcggaaccgcgccacgcggguggagugcaccaccaucgucaacggggugcgccgguccuucuacgucuacgccaacggcggcaagggguucugcaagcuccacaacuggaacugcgugaacugcgacaccuucugcgccggcagcacguucaucuccgacgagguggcgcgcgaccugagccugcaguucaagcggccgaucaaccccaccgaccaguccagcuacaucgucgacuccgugaccgugaagaacgggagcauccaccucuacuucgacaaggccggccagaagaccuacgagcgccacucccugagccacuucgucaaccuggacaaccuccgggccaacaacacgaaggggucccugcccaucaacgugaucguguucgacggcaagagcaagugcgaggaguccagcgccaaguccgccagcgucuacuacucccagcugaugugccagcccauccuccugcuggaccaggcgcucgugagcgacgugggcgacagcgccgaggucgccgugaagauguucgacgccuacgugaacaccuucuccagcaccuucaacgucccgauggagaagcugaagacccugguggccacggcggaggccgagcucgccaagaacgugucccuggacaacguccugagcaccuucaucuccgccgcgcgccagggguucguggacagcgacguggagaccaaggacgucguggagugccucaagcugucccaccagagcgacaucgaggugaccggcgacuccugcaacaacuacaugcugacguacaacaaggucgagaacaugaccccccgggaccucggggccugcaucgacugcagcgcccgccacaucaacgcccagguggccaagucccacaacaucgcgcugaucuggaacgugaaggacuucaugagccuguccgagcagcuccggaagcagauccgcagcgccgccaagaagaacaaccugcccuucaagcugaccugcgccaccacgcgccaggucgugaacguggucaccaccaagaucgcccucaagggcggguga

SEQ ID NO: 17855 - RNA, 5841 nt, Artificial Sequence
  SARS-CoV-2__MT811197.1__non-structural protein 3 (NSP3) CDS gc
auggcccccaccaaggugaccuucggcgacgacacggucaucgaggugcagggguacaagagcgugaacaucaccuucgagcuggacgagcgcaucgacaagguccucaacgagaagugcuccgccuacaccguggagcugggcaccgaggugaacgaguucgcgugcgucguggccgacgccgugaucaagacgcugcagccggucagcgagcuccugaccccccuggggaucgaccucgacgagugguccauggccaccuacuaccuguucgacgagagcggcgaguucaagcuggccucccacauguacugcagcuucuacccccccgacgaggacgaggaggagggggacugcgaggaggaggaguucgagccguccacccaguacgaguacggcacggaggacgacuaccagggcaagccccucgaguucggggcgaccagcgccgcccugcagcccgaggaggagcaggaggaggacuggcuggacgacgacucccagcagaccgugggccagcaggacgggagcgaggacaaccagaccacgaccauccagaccaucguggagguccagccccagcucgagauggagcugaccccgguggugcagacgaucgaggucaacuccuucagcggcuaccugaagcucaccgacaacguguacaucaagaacgccgacaucguggaggaggcgaagaaggucaagcccaccgugguggucaacgccgccaacguguaccugaagcacgggggcggcguggccggggcccugaacaaggcgaccaacaacgccaugcaggucgaguccgacgacuacaucgccacgaacggcccccucaagguggggggcagcugcguccuguccggccacaaccuggccaagcacugccuccacgugguggggcccaacgucaacaagggcgaggacauccagcugcugaagagcgccuacgagaacuucaaccagcacgaggugcuccuggcgccgcugcucuccgccgggaucuucggcgccgaccccauccacagccugcgggugugcgucgacaccgugcgcaccaacguguaccuggccgucuucgacaagaaccucuacgacaagcugguguccagcuuccuggagaugaagagcgagaagcagguggagcagaagaucgccgagauccccaaggaggaggucaagcccuucaucaccgaguccaagccgagcguggagcagcggaagcaggacgacaagaagaucaaggcgugcguggaggaggucacgaccacccucgaggagaccaaguuccugacggagaaccugcuccuguacaucgacaucaacgggaaccugcaccccgacuccgccacccucgugagcgacaucgacaucaccuuccugaagaaggacgcccccuacaucgugggcgacgucgugcaggagggcgugcugaccgccgucgugauccccacgaagaaggccgggggcaccaccgagaugcucgcgaaggcccugcgcaaggugccgaccgacaacuacaucacgaccuaccccgggcagggccugaacggguacaccgucgaggaggccaagaccgugcucaagaagugcaaguccgccuucuacauccugcccagcaucaucuccaacgagaagcaggagauccugggcaccgugagcuggaaccuccgggagaugcuggcgcacgccgaggagacgcgcaagcugaugcccgucugcguggagaccaaggccaucguguccaccauccagcggaaguacaagggcaucaagauccaggagggggucguggacuacggcgcccgcuucuacuucuacaccagcaagacgaccguggccucccugaucaacacccucaacgaccugaacgagacccuggucacgaugccgcucggguacgugacccacggccugaaccuggaggaggcggcccgguacaugcgcagccucaaggugcccgccaccgucuccgugagcucccccgacgccgugaccgccuacaacggguaccugacgagcuccagcaagacccccgaggagcacuucaucgagaccaucucccuggcgggcagcuacaaggacuggagcuacuccggccagagcacccagcucgggaucgaguuccugaagcggggcgacaaguccgucuacuacacgagcaacccgaccaccuuccaccuggacggggaggugaucaccuucgacaaccucaagacgcugcugucccuccgcgaggugcggaccaucaaggucuucaccaccguggacaacaucaaccugcacacgcagguggucgacaugagcaugaccuacggccagcaguucggccccaccuaccuggacggggccgacgugaccaagaucaagccccacaacucccacgagggcaagacguucuacgugcucccgaacgacgacacccugcgcgucgaggccuucgaguacuaccacaccaccgaccccagcuuccuggggcgguacauguccgcccucaaccacacgaagaaguggaaguacccccaggugaacggccugaccagcaucaagugggccgacaacaacugcuaccuggcgaccgcccuccugacccugcagcagaucgagcucaaguucaaccccccggcccugcaggacgccuacuaccgcgcgcgggccggggaggccgccaacuucugcgcccugauccucgcguacugcaacaagacggugggcgagcugggcgacguccgcgagaccauguccuaccuguuccagcacgccaaccucgacagcugcaagcgggugcugaacgucgugugcaagaccugcgggcagcagcagaccacccugaagggcguggaggccgucauguacauggggacgcucuccuacgagcaguucaagaagggcgugcagauccccugcaccugcgggaagcaggccaccaaguaccuggugcagcaggagagccccuucgucaugauguccgcccccccggcgcaguacgagcugaagcacggcaccuucacgugcgccagcgaguacaccggcaacuaccagugcgggcacuacaagcacaucaccuccaaggagacccucuacugcaucgacggcgcccugcugacgaagagcagcgaguacaaggggcccaucaccgacguguucuacaaggagaacuccuacaccaccacgaucaagcccgugaccuacaagcucgacggcgucgugugcaccgagaucgaccccaagcuggacaacuacuacaagaaggacaacagcuacuucaccgagcagccgaucgaccuggugcccaaccagcccuaccccaacgccuccuucgacaacuucaaguucgucugcgacaacaucaaguucgccgacgaccucaaccagcugacgggguacaagaagccggcgagccgcgagcugaaggugaccuucuuccccgaccucaacggcgacguggucgccaucgacuacaagcacuacacccccuccuucaagaagggcgccaagcugcugcacaagcccaucguguggcacgugaacaacgccaccaacaaggcgacguacaagccgaacaccuggugcauccggugccucuggagcaccaagcccgucgagaccuccaacagcuucgacgugcugaaguccgaggacgcccaggggauggacaaccuggccugcgaggaccucaagcccgugagcgaggaggucguggagaaccccacgauccagaaggacgugcuggagugcaacgucaagaccaccgagguggugggcgacaucauccugaagccggccaacaacucccucaagaucaccgaggaggucgggcacacggaccugauggccgcguacguggacaacagcucccugaccaucaagaagcccaacgagcucagccgcgugcugggccugaagacccucgccacccacgggcuggccgccgucaacuccgugcccugggacacgaucgccaacuacgcgaagccguuccugaacaagguggucagcaccaccaccaacaucgugacgcgcugccucaaccgggugugcaccaacuacaugcccuacuucuucacccugcugcuccagcugugcaccuucacccgcuccacgaacagccggaucaaggccuccaugcccaccaccaucgccaagaacaccgucaagagcgugggcaaguucugccuggaggccagcuucaacuaccucaagucccccaacuucagcaagcugaucaacaucaucaucugguuccugcuccuguccgugugccugggcagccucaucuacuccacggccgcgcuggggguccugaugagcaaccucggcaugccguccuacugcaccggguaccgcgagggcuaccugaacagcaccaacgugaccaucgccacguacugcaccggcuucauccccugcuccgugugccugagcgggcucgacucccuggacaccuaccccagccuggagaccauccagaucacgaucuccagcuucaagugggaccucaccgccuucggccuggucgccgagugguuccuggccuacauccucuucacccgguucuucuacgugcuggggcuggcggccaucaugcagcucuucuucuccuacuucgccgugcacuucaucagcaacuccuggcugauguggcugaucaucaaccugguccagauggcccccaucagcgcgauggugcgcauguacaucuucuucgccuccuucuacuacguguggaagagcuacguccacgugguggacggcugcaacagcuccaccugcaugaugugcuacaagcggaaccgcgccacgcgggucgagugcaccaccaucgugaacgggguccgccggagcuucuacguguacgccaacggcggcaagggguucugcaagcuccacaacuggaacugcgugaacugcgacaccuucugcgccggcuccacguucaucagcgacgaggucgcgcgcgaccugucccugcaguucaagcggccgaucaaccccaccgaccagagcuccuacaucguggacagcgugaccgucaagaacggguccauccaccucuacuucgacaaggccggccagaagaccuacgagcgccacagccugucccacuucgugaaccuggacaaccuccgggccaacaacacgaaggggagccugcccaucaacgugaucgucuucgacggcaaguccaagugcgaggagagcuccgccaagagcgccuccguguacuacagccagcugaugugccagcccauccuccugcuggaccaggcgcucguguccgacgucggcgacagcgccgagguggccgugaagauguucgacgccuacgucaacaccuucagcuccaccuucaacgugccgauggagaagcugaagacccugguggccacggcggaggccgagcucgccaagaacgucagccuggacaacgugcuguccaccuucaucagcgccgcgcgccagggguucguggacuccgacgucgagaccaaggacgugguggagugccucaagcugagccaccaguccgacaucgaggucaccggcgacagcugcaacaacuacaugcugacguacaacaagguggagaacaugaccccccgggaccucggggccugcaucgacugcuccgcccgccacaucaacgcccagguggccaagagccacaacaucgcgcugaucuggaacgucaaggacuucaugucccugagcgagcagcuccggaagcagauccgcuccgccgccaagaagaacaaccugcccuucaagcugaccugcgccaccacgcgccagguggugaacgucgugaccaccaagaucgcccucaagggcggguga

SEQ ID NO: 17856 - RNA, 5841 nt, Artificial Sequence
  SARS-CoV-2__MT811244.1__non-structural protein 3 (NSP3) CDS gc
auggcccccaccaaggugaccuucggcgacgacacggucaucgaggugcagggguacaagagcgugaacaucaccuucgagcuggacgagcgcaucgacaagguccucaacgagaagugcuccgccuacaccguggagcugggcaccgaggugaacgaguucgcgugcgucguggccgacgccgugaucaagacgcugcagccggucagcgagcuccugaccccccuggggaucgaccucgacgagugguccauggccaccuacuaccuguucgacgagagcggcgaguucaagcuggccucccacauguacugcagcuucuacccccccgacgaggacgaggaggagggggacugcgaggaggaggaguucgagccguccacccaguacgaguacggcacggaggacgacuaccagggcaagccccucgaguucggggcgaccagcgccgcccugcagcccgaggaggagcaggaggaggacuggcuggacgacgacucccagcagaccgugggccagcaggacgggagcgaggacaaccagaccacgaccauccagaccaucguggagguccagccccagcucgagauggagcugaccccgguggugcagacgaucgaggucaacuccuucagcggcuaccugaagcucaccgacaacguguacaucaagaacgccgacaucguggaggaggcgaagaaggucaagcccaccgugguggucaacgccgccaacguguaccugaagcacgggggcggcguggccggggcccugaacaaggcgaccaacaacgccaugcaggucgaguccgacgacuacaucgccacgaacggcagccucaagguggggggcuccugcguccugagcggccacaaccuggccaagcacugccuccacgugguggggcccaacgucaacaagggcgaggacauccagcugcugaaguccgccuacgagaacuucaaccagcacgaggugcuccuggcgccccugcucagcgccgggaucuucggcgccgacccgauccacucccugcgggugugcgucgacaccgugcgcaccaacguguaccuggccgucuucgacaagaaccucuacgacaagcuggugagcagcuuccuggagaugaaguccgagaagcagguggagcagaagaucgccgagauccccaaggaggaggucaagcccuucaucaccgagagcaagcccuccguggagcagcggaagcaggacgacaagaagaucaaggcgugcguggaggaggucacgaccacccucgaggagaccaaguuccugacggagaaccugcuccuguacaucgacaucaacgggaaccugcacccggacagcgccacccucguguccgacaucgacaucaccuuccugaagaaggacgcccccuacaucgugggcgacgucgugcaggagggcgugcugaccgccgucgugauccccacgaagaaggccgggggcaccaccgagaugcucgcgaaggcccugcgcaaggugcccaccgacaacuacaucacgaccuacccggggcagggccugaacggguacaccgucgaggaggccaagaccgugcucaagaagugcaagagcgccuucuacauccugcccuccaucaucagcaacgagaagcaggagauccugggcaccguguccuggaaccuccgggagaugcuggcgcacgccgaggagacgcgcaagcugaugcccgucugcguggagaccaaggccaucgugagcaccauccagcggaaguacaagggcaucaagauccaggagggggucguggacuacggcgcccgcuucuacuucuacaccuccaagacgaccguggccagccugaucaacacccucaacgaccugaacgagacccuggucacgaugccccucggguacgugacccacggccugaaccuggaggaggcggcccgguacaugcgcucccucaaggugccggccaccgucagcguguccagccccgacgccgugaccgccuacaacggguaccugacguccagcuccaagacccccgaggagcacuucaucgagaccaucagccuggcgggcagcuacaaggacugguccuacagcggccaguccacccagcucgggaucgaguuccugaagcggggcgacaagagcgucuacuacacguccaaccccaccaccuuccaccuggacggggaggugaucaccuucgacaaccucaagacgcugcugagccuccgcgaggugcggaccaucaaggucuucaccaccguggacaacaucaaccugcacacgcagguggucgacauguccaugaccuacggccagcaguucggcccgaccuaccuggacggggccgacgugaccaagaucaagccccacaacagccacgagggcaagacguucuacgugcuccccaacgacgacacccugcgcgucgaggccuucgaguacuaccacaccaccgacccguccuuccuggggcgguacaugagcgcccucaaccacacgaagaaguggaaguacccccaggugaacggccugaccuccaucaagugggccgacaacaacugcuaccuggcgaccgcccuccugacccugcagcagaucgagcucaaguucaacccccccgcccugcaggacgccuacuaccgcgcgcgggccggggaggccgccaacuucugcgcccugauccucgcguacugcaacaagacggugggcgagcugggcgacguccgcgagaccaugagcuaccuguuccagcacgccaaccucgacuccugcaagcgggugcugaacgucgugugcaagaccugcgggcagcagcagaccacccugaagggcguggaggccgucauguacauggggacgcucagcuacgagcaguucaagaagggcgugcagaucccgugcaccugcgggaagcaggccaccaaguaccuggugcagcaggagucccccuucgucaugaugagcgccccccccgcgcaguacgagcugaagcacggcaccuucacgugcgccuccgaguacaccggcaacuaccagugcgggcacuacaagcacaucaccagcaaggagacccucuacugcaucgacggcgcccugcugacgaagagcuccgaguacaaggggccgaucaccgacguguucuacaaggagaacagcuacaccaccacgaucaagcccgugaccuacaagcucgacggcgucgugugcaccgagaucgaccccaagcuggacaacuacuacaagaaggacaacuccuacuucaccgagcagcccaucgaccuggugccgaaccagcccuaccccaacgccagcuucgacaacuucaaguucgucugcgacaacaucaaguucgccgacgaccucaaccagcugacgggguacaagaagcccgcgucccgcgagcugaaggugaccuucuucccggaccucaacggcgacguggucgccaucgacuacaagcacuacacccccagcuucaagaagggcgccaagcugcugcacaagcccaucguguggcacgugaacaacgccaccaacaaggcgacguacaagcccaacaccuggugcauccggugccucugguccaccaagccggucgagaccagcaacuccuucgacgugcugaagagcgaggacgcccaggggauggacaaccuggccugcgaggaccucaagcccguguccgaggaggucguggagaaccccacgauccagaaggacgugcuggagugcaacgucaagaccaccgagguggugggcgacaucauccugaagcccgccaacaacagccucaagaucaccgaggaggucgggcacacggaccugauggccgcguacguggacaacuccagccugaccaucaagaagccgaacgagcucucccgcgugcugggccugaagacccucgccacccacgggcuggccgccgucaacagcgugcccugggacacgaucgccaacuacgcgaagcccuuccugaacaagguggucuccaccaccaccaacaucgugacgcgcugccucaaccgggugugcaccaacuacaugccguacuucuucacccugcugcuccagcugugcaccuucacccgcagcacgaacucccggaucaaggccagcaugcccaccaccaucgccaagaacaccgucaagagcgugggcaaguucugccuggaggccuccuucaacuaccucaagagccccaacuucuccaagcugaucaacaucaucaucugguuccugcuccugagcgugugccugggcucccucaucuacagcacggccgcgcuggggguccugauguccaaccucggcaugcccagcuacugcaccggguaccgcgagggcuaccugaacuccaccaacgugaccaucgccacguacugcaccggcagcaucccgugcuccgugugccugagcgggcucgacucccuggacaccuaccccagccuggagaccauccagaucacgaucuccagcuucaagugggaccucaccgccuucggccuggucgccgagugguuccuggccuacauccucuucacccgguucuucuacgugcuggggcuggcggccaucaugcagcucuucuucuccuacuucgccgugcacuucaucagcaacuccuggcugauguggcugaucaucaaccugguccagauggcccccaucagcgcgauggugcgcauguacaucuucuucgccagcuucuacuacguguggaaguccuacguccacgugguggacggcugcaacagcuccaccugcaugaugugcuacaagcggaaccgcgccacgcgggucgagugcaccaccaucgugaacgggguccgccggagcuucuacguguacgccaacggcggcaagggguucugcaagcuccacaacuggaacugcgugaacugcgacaccuucugcgccggcuccacguucaucagcgacgaggucgcgcgcgaccugucccugcaguucaagcggcccaucaacccgaccgaccagagcuccuacaucguggacagcgugaccgucaagaacggguccauccaccucuacuucgacaaggccggccagaagaccuacgagcgccacagccugucccacuucgugaaccuggacaaccuccgggccaacaacacgaaggggagccugcccaucaacgugaucgucuucgacggcaaguccaagugcgaggagagcuccgccaagagcgccuccguguacuacagccagcugaugugccagcccauccuccugcuggaccaggcgcucgugagcgacgucggcgacuccgccgagguggccgugaagauguucgacgccuacgucaacaccuucagcuccaccuucaacgugcccauggagaagcugaagacccugguggccacggcggaggccgagcucgccaagaacgucagccuggacaacgugcuguccaccuucaucagcgccgcgcgccagggguucguggacuccgacgucgagaccaaggacgugguggagugccucaagcugagccaccaguccgacaucgaggucaccggcgacagcugcaacaacuacaugcugacguacaacaagguggagaacaugaccccgcgggaccucggggccugcaucgacugcuccgcccgccacaucaacgcccagguggccaagagccacaacaucgcgcugaucuggaacgucaaggacuucaugucccugagcgagcagcuccggaagcagauccgcuccgccgccaagaagaacaaccugcccuucaagcugaccugcgccaccacgcgccagguggugaacgucgugaccaccaagaucgcccucaagggcggguga

SEQ ID NO: 17857 - RNA, 5841 nt, Artificial Sequence
  SARS-CoV-2__MT811247.1__non-structural protein 3 (NSP3) CDS gc
auggcccccaccaaggugaccuucggcgacgacacggucaucgaggugcagggguacaagagcgugaacaucaccuucgagcuggacgagcgcaucgacaagguccucaacgagaagugcuccgccuacaccguggagcugggcaccgaggugaacgaguucgcgugcgucguggccgacgccgugaucaagacgcugcagccggucagcgagcuccugaccccccuggggaucgaccucgacgagugguccauggccaccuacuaccuguucgacgagagcggcgaguucaagcuggccucccacauguacugcagcuucuacccccccgacgaggacgaggaggagggggacugcgaggaggaggaguucgagccguccacccaguacgaguacggcacggaggacgacuaccagggcaagccccucgaguucggggcgaccagcgccgcccugcagcccgaggaggagcaggaggaggacuggcuggacgacgacucccagcagaccgugggccagcaggacgggagcgaggacaaccagaccacgaccauccagaccaucguggagguccagccccagcucgagauggagcugaccccgguggugcagacgaucgaggucaacuccuucagcggcuaccugaagcucaccgacaacguguacaucaagaacgccgacaucguggaggaggcgaagaaggucaagcccaccgugguggucaacgccgccaacguguaccugaagcacgggggcggcguggccggggcccugaacaaggcgaccaacaacgccaugcaggucgaguccgacgacuacaucgccacgaacggcccccucaagguggggggcagcugcguccuguccggccacaaccuggccaagcacugccuccacgugguggggcccaacgucaacaagggcgaggacauccagcugcugaagagcgccuacgagaacuucaaccagcacgaggugcuccuggcgccgcugcucuccgccgggaucuucggcgccgaccccauccacagccugcgggugugcgucgacaccgugcgcaccaacguguaccuggccgucuucgacaagaaccucuacgacaagcugguguccagcuuccuggagaugaagagcgagaagcagguggagcagaagaucgccgagauccccaaggaggaggucaagcccuucaucaccgaguccaagccgagcguggagcagcggaagcaggacgacaagaagaucaaggcgugcguggaggaggucacgaccacccucgaggagaccaaguuccugacggagaaccugcuccuguacaucgacaucaacgggaaccugcaccccgacuccgccacccucgugagcgacaucgacaucaccuuccugaagaaggacgcccccuacaucgugggcgacgucgugcaggagggcgugcugaccgccgucgugauccccacgaagaaggccgggggcaccaccgagaugcucgcgaaggcccugcgcaaggugccgaccgacaacuacaucacgaccuaccccgggcagggccugaacggguacaccgucgaggaggccaagaccgugcucaagaagugcaaguccgccuucuacauccugcccagcaucaucuccaacgagaagcaggagauccugggcaccgugagcuggaaccuccgggagaugcuggcgcacgccgaggagacgcgcaagcugaugcccgucugcguggagaccaaggccaucguguccaccauccagcggaaguacaagggcaucaagauccaggagggggucguggacuacggcgcccgcuucuacuucuacaccagcaagacgaccguggccucccugaucaacacccucaacgaccugaacgagacccuggucacgaugccgcucggguacgugacccacggccugaaccuggaggaggcggcccgguacaugcgcagccucaaggugcccgccaccgucuccgugagcucccccgacgccgugaccgccuacaacggguaccugacgagcuccagcaagacccccgaggagcacuucaucgagaccaucucccuggcgggcagcuacaaggacuggagcuacuccggccagagcacccagcucgggaucgaguuccugaagcggggcgacaaguccgucuacuacacgagcaacccgaccaccuuccaccuggacggggaggugaucaccuucgacaaccucaagacgcugcugucccuccgcgaggugcggaccaucaaggucuucaccaccguggacaacaucaaccugcacacgcagguggucgacaugagcaugaccuacggccagcaguucggccccaccuaccuggacggggccgacgugaccaagaucaagccccacaacucccacgagggcaagacguucuacgugcucccgaacgacgacacccugcgcgucgaggccuucgaguacuaccacaccaccgaccccagcuuccuggggcgguacauguccgcccucaaccacacgaagaaguggaaguacccccaggugaacggccugaccagcaucaagugggccgacaacaacugcuaccuggcgaccgcccuccugacccugcagcagaucgagcucaaguucaaccccccggcccugcaggacgccuacuaccgcgcgcgggccggggaggccgccaacuucugcgcccugauccucgcguacugcaacaagacggugggcgagcugggcgacguccgcgagaccauguccuaccuguuccagcacgccaaccucgacagcugcaagcgggugcugaacgucgugugcaagaccugcgggcagcagcagaccacccugaagggcguggaggccgucauguacauggggacgcucuccuacgagcaguucaagaagggcgugcagauccccugcaccugcgggaagcaggccaccaaguaccuggugcagcaggagagccccuucgucaugauguccgcccccccggcgcaguacgagcugaagcacggcaccuucacgugcgccagcgaguacaccggcaacuaccagugcgggcacuacaagcacaucaccuccaaggagacccucuacugcaucgacggcgcccugcugacgaagagcagcgaguacaaggggcccaucaccgacguguucuacaaggagaacuccuacaccaccacgaucaagcccgugaccuacaagcucgacggcgucgugugcaccgagaucgaccccaagcuggacaacuacuacaagaaggacaacagcuacuucaccgagcagccgaucgaccuggugcccaaccagcccuaccccaacgccuccuucgacaacuucaaguucgucugcgacaacaucaaguucgccgacgaccucaaccagcugacgggguacaagaagccggcgagccgcgagcugaaggugaccuucuuccccgaccucaacggcgacguggucgccaucgacuacaagcacuacacccccuccuucaagaagggcgccaagcugcugcacaagcccaucguguggcacgugaacaacgccaccaacaaggcgacguacaagccgaacaccuggugcauccggugccucuggagcaccaagcccgucgagaccuccaacagcuucgacgugcugaaguccgaggacgcccacgggauggacaaccuggccugcgaggaccucaagcccgugagcgaggaggucguggagaaccccacgauccagaaggacgugcuggagugcaacgucaagaccaccgagguggugggcgacaucauccugaagccggccaacaacucccucaagaucaccgaggaggucgggcacacggaccugauggccgcguacguggacaacagcucccugaccaucaagaagcccaacgagcucagccgcgugcugggccugaagacccucgccacccacgggcuggccgccgucaacuccgugcccugggacacgaucgccaacuacgcgaagccguuccugaacaagguggucagcaccaccaccaacaucgugacgcgcugccucaaccgggugugcaccaacuacaugcccuacuucuucacccugcugcuccagcugugcaccuucacccgcuccacgaacagccggaucaaggccuccaugcccaccaccaucgccaagaacaccgucaagagcgugggcaaguucugccuggaggccagcuucaacuaccucaagucccccaacuucagcaagcugaucaacaucaucaucugguuccugcuccuguccgugugccugggcagccucaucuacuccacggccgcgcuggggguccugaugagcaaccucggcaugccguccuacugcaccggguaccgcgagggcuaccugaacagcaccaacgugaccaucgccacguacugcaccggcuccauccccugcagcgugugccuguccgggcucgacagccuggacaccuaccccucccuggagaccauccagaucacgaucagcuccuucaagugggaccucaccgccuucggccuggucgccgagugguuccuggccuacauccucuucacccgguucuucuacgugcuggggcuggcggccaucaugcagcucuucuucagcuacuucgccgugcacuucaucuccaacagcuggcugauguggcugaucaucaaccugguccagauggcccccaucuccgcgauggugcgcauguacaucuucuucgccagcuucuacuacguguggaagagcuacguccacgugguggacggcugcaacuccagcaccugcaugaugugcuacaagcggaaccgcgccacgcgggucgagugcaccaccaucgugaacgggguccgccgguccuucuacguguacgccaacggcggcaagggguucugcaagcuccacaacuggaacugcgugaacugcgacaccuucugcgccggcagcacguucaucuccgacgaggucgcgcgcgaccugagccugcaguucaagcggccgaucaaccccaccgaccaguccagcuacaucguggacuccgugaccgucaagaacgggagcauccaccucuacuucgacaaggccggccagaagaccuacgagcgccacucccugagccacuucgugaaccuggacaaccuccgggccaacaacacgaaggggucccugcccaucaacgugaucgucuucgacggcaagagcaagugcgaggaguccagcgccaaguccgccagcguguacuacucccagcugaugugccagcccauccuccugcuggaccaggcgcucgugagcgacgucggcgacagcgccgagguggccgugaagauguucgacgccuacgucaacaccuucuccagcaccuucaacgugccgauggagaagcugaagacccugguggccacggcggaggccgagcucgccaagaacgucucccuggacaacgugcugagcaccuucaucuccgccgcgcgccagggguucguggacagcgacgucgagaccaaggacgugguggagugccucaagcugucccaccagagcgacaucgaggucaccggcgacuccugcaacaacuacaugcugacguacaacaagguggagaacaugaccccccgggaccucggggccugcaucgacugcagcgcccgccacaucaacgcccagguggccaagucccacaacaucgcgcugaucuggaacgucaaggacuucaugagccuguccgagcagcuccggaagcagauccgcagcgccgccaagaagaacaaccugcccuucaagcugaccugcgccaccacgcgccagguggugaacgucgugaccaccaagaucgcccucaagggcggguga

SEQ ID NO: 17858 - RNA, 5841 nt, Artificial Sequence
  SARS-CoV-2__MT811254.1__non-structural protein 3 (NSP3) CDS gc
auggcccccaccaaggugaccuucggcgacgacacggucaucgaggugcagggguacaagagcgugaacaucaccuucgagcuggacgagcgcaucgacaagguccucaacgagaagugcuccgccuacaccguggagcugggcaccgaggugaacgaguucgcgugcgucguggccgacgccgugaucaagacgcugcagccggucagcgagcuccugaccccccuggggaucgaccucgacgagugguccauggccaccuacuaccuguucgacgagagcggcgaguucaagcuggccucccacauguacugcagcuucuacccccccgacgaggacgaggaggagggggacugcgaggaggaggaguucgagccguccacccaguacgaguacggcacggaggacgacuaccagggcaagccccucgaguucggggcgaccagcgccgcccugcagcccgaggaggagcaggaggaggacuggcuggacgacgacucccagcagaccgugggccagcaggacgggagcgaggacaaccagaccacgaccauccagaccaucguggagguccagccccagcucgagauggagcugaccccgguggugcagacgaucgaggucaacuccuucagcggcuaccugaagcucaccgacaacguguacaucaagaacgccgacaucguggaggaggcgaagaaggucaagcccaccgugguggucaacgccgccaacguguaccugaagcacgggggcggcguggccggggcccugaacaaggcgaccaacaacgccaugcaggucgaguccgacgacuacaucgccacgaacggcccccucaagguggggggcagcugcguccuguccggccacaaccuggccaagcacugccuccacgugguggggcccaacgucaacaagggcgaggacauccagcugcugaagagcgccuacgagaacuucaaccagcacgaggugcuccuggcgccgcugcucuccgccgggaucuucggcgccgaccccauccacagccugcgggugugcgucgacaccgugcgcaccaacguguaccuggccgucuucgacaagaaccucuacgacaagcugguguccagcuuccuggagaugaagagcgagaagcagguggagcagaagaucgccgagauccccaaggaggaggucaagcccuucaucaccgaguccaagccgagcguggagcagcggaagcaggacgacaagaagaucaaggcgugcguggaggaggucacgaccacccucgaggagaccaaguuccugacggagaaccugcuccuguacaucgacaucaacgggaaccugcaccccgacuccgccacccucgugagcgacaucgacaucaccuuccugaagaaggacgcccccuacaucgugggcgacgucgugcaggagggcgugcugaccgccgucgugauccccacgaagaaggccgggggcaccaccgagaugcucgcgaaggcccugcgcaaggugccgaccgacaacuacaucacgaccuaccccgggcagggccugaacggguacaccgucgaggaggccaagaccgugcucaagaagugcaaguccgccuucuacauccugcccagcaucaucuccaacgagaagcaggagauccugggcaccgugagcuggaaccuccgggagaugcuggcgcacgccgaggagacgcgcaagcugaugcccgucugcguggagaccaaggccaucguguccaccauccagcggaaguacaagggcaucaagauccaggagggggucguggacuacggcgcccgcuucuacuucuacaccagcaagacgaccguggccucccugaucaacacccucaacgaccugaacgagacccuggucacgaugccgcucggguacgugacccacggccugaaccuggaggaggcggcccgguacaugcgcagccucaaggugcccgccaccgucuccgugagcucccccgacgccgugaccgccuacaacggguaccugacgagcuccagcaagaccuccgaggagcacuucaucgagaccaucagccuggcgggcagcuacaaggacugguccuacagcggccaguccacccagcucgggaucgaguuccugaagcggggcgacaagagcgucuacuacacguccaaccccaccaccuuccaccuggacggggaggugaucaccuucgacaaccucaagacgcugcugagccuccgcgaggugcggaccaucaaggucuucaccaccguggacaacaucaaccugcacacgcagguggucgacauguccaugaccuacggccagcaguucggcccgaccuaccuggacggggccgacgugaccaagaucaagccccacaacagccacgagggcaagacguucuacgugcuccccaacgacgacacccugcgcgucgaggccuucgaguacuaccacaccaccgacccguccuuccuggggcgguacaugagcgcccucaaccacacgaagaaguggaaguacccccaggugaacggccugaccuccaucaagugggccgacaacaacugcuaccuggcgaccgcccuccugacccugcagcagaucgagcucaaguucaacccccccgcccugcaggacgccuacuaccgcgcgcgggccggggaggccgccaacuucugcgcccugauccucgcguacugcaacaagacggugggcgagcugggcgacguccgcgagaccaugagcuaccuguuccagcacgccaaccucgacuccugcaagcgggugcugaacgucgugugcaagaccugcgggcagcagcagaccacccugaagggcguggaggccgucauguacauggggacgcucagcuacgagcaguucaagaagggcgugcagaucccgugcaccugcgggaagcaggccaccaaguaccuggugcagcaggagucccccuucgucaugaugagcgccccccccgcgcaguacgagcugaagcacggcaccuucacgugcgccuccgaguacaccggcaacuaccagugcgggcacuacaagcacaucaccagcaaggagacccucuacugcaucgacggcgcccugcugacgaagagcuccgaguacaaggggccgaucaccgacguguucuacaaggagaacagcuacaccaccacgaucaagcccgugaccuacaagcucgacggcgucgugugcaccgagaucgaccccaagcuggacaacuacuacaagaaggacaacuccuacuucaccgagcagcccaucgaccuggugccgaaccagcccuaccccaacgccagcuucgacaacuucaaguucgucugcgacaacaucaaguucgccgacgaccucaaccagcugacgggguacaagaagcccgcgucccgcgagcugaaggugaccuucuucccggaccucaacggcgacguggucgccaucgacuacaagcacuacacccccagcuucaagaagggcgccaagcugcugcacaagcccaucguguggcacgugaacaacgccaccaacaaggcgacguacaagcccaacaccuggugcauccggugccucugguccaccaagccggucgagaccagcaacuccuucgacgugcugaagagcgaggacgcccaggggauggacaaccuggccugcgaggaccucaagcccguguccgaggaggucguggagaaccccacgauccagaaggacgugcuggagugcaacgucaagaccaccgagguggugggcgacaucauccugaagcccgccaacaacagccucaagaucaccgaggaggucgggcacacggaccugauggccgcguacguggacaacuccagccugaccaucaagaagccgaacgagcucucccgcgugcugggccugaagacccucgccacccacgggcuggccgccgucaacagcgugcccugggacacgaucgccaacuacgcgaagcccuuccugaacaagguggucuccaccaccaccaacaucgugacgcgcugccucaaccgggugugcaccaacuacaugccguacuucuucacccugcugcuccagcugugcaccuucacccgcagcacgaacucccggaucaaggccagcaugcccaccaccaucgccaagaacaccgucaagagcgugggcaaguucugccuggaggccuccuucaacuaccucaagagccccaacuucuccaagcugaucaacaucaucaucugguuccugcuccugagcgugugccugggcucccucaucuacagcacggccgcgcuggggguccugauguccaaccucggcaugcccagcuacugcaccggguaccgcgagggcuaccugaacuccaccaacgugaccaucgccacguacugcaccggcagcaucccgugcuccgugugccugagcgggcucgacucccuggacaccuaccccagccuggagaccauccagaucacgaucuccagcuucaagugggaccucaccgccuucggccuggucgccgagugguuccuggccuacauccucuucacccgguucuucuacgugcuggggcuggcggccaucaugcagcucuucuucuccuacuucgccgugcacuucaucagcaacuccuggcugauguggcugaucaucaaccugguccagauggcccccaucagcgcgauggugcgcauguacaucuucuucgccagcuucuacuacguguggaaguccuacguccacgugguggacggcugcaacagcuccaccugcaugaugugcuacaagcggaaccgcgccacgcgggucgagugcaccaccaucgugaacgggguccgccggagcuucuacguguacgccaacggcggcaagggguucugcaagcuccacaacuggaacugcgugaacugcgacaccuucugcgccggcuccacguucaucagcgacgaggucgcgcgcgaccugucccugcaguucaagcggcccaucaacccgaccgaccagagcuccuacaucguggacagcgugaccgucaagaacggguccauccaccucuacuucgacaaggccggccagaagaccuacgagcgccacagccugucccacuucgugaaccuggacaaccuccgggccaacaacacgaaggggagccugcccaucaacgugaucgucuucgacggcaaguccaagugcgaggagagcuccgccaagagcgccuccguguacuacagccagcugaugugccagcccauccuccugcuggaccaggcgcucgugagcgacgucggcgacuccgccgagguggccgugaagauguucgacgccuacgucaacaccuucagcuccaccuucaacgugcccauggagaagcugaagacccugguggccacggcggaggccgagcucgccaagaacgucagccuggacaacgugcuguccaccuucaucagcgccgcgcgccagggguucguggacuccgacgucgagaccaaggacgugguggagugccucaagcugagccaccaguccgacaucgaggucaccggcgacagcugcaacaacuacaugcugacguacaacaagguggagaacaugaccccgcgggaccucggggccugcaucgacugcuccgcccgccacaucaacgcccagguggccaagagccacaacaucgcgcugaucuggaacgucaaggacuucaugucccugagcgagcagcuccggaagcagauccgcuccgccgccaagaagaacaaccugcccuucaagcugaccugcgccaccacgcgccagguggugaacgucgugaccaccaagaucgcccucaagggcggguga

SEQ ID NO: 17859 - RNA, 5841 nt, Artificial Sequence
  SARS-CoV-2__MT811262.1__non-structural protein 3 (NSP3) CDS gc
auggcccccaccaaggugaccuucggcgacgacacggucaucgaggugcagggguacaagagcgugaacaucaccuucgagcuggacgagcgcaucgacaagguccucaacgagaagugcuccgccuacaccguggagcugggcaccgaggugaacgaguucgcgugcgucguggccgacgccgugaucaagacgcugcagccggucagcgagcuccugaccccccuggggaucgaccucgacgagugguccauggccaccuacuaccuguucgacgagagcggcgaguucaagcuggccucccacauguacugcagcuucuacccccccgacgaggacgaggaggagggggacugcgaggaggaggaguucgagccguccacccaguacgaguacggcacggaggacgacuaccagggcaagccccucgaguucggggcgaccagcgccgcccugcagcccgaggaggagcaggaggaggacuggcuggacgacgacucccagcagaccgugggccagcaggacgggagcgaggacaaccagaccacgaccauccagaccaucguggagguccagccccagcucgagauggagcugaccccgguggugcagacgaucgaggucaacuccuucagcggcuaccugaagcucaccgacaacguguacaucaagaacgccgacaucguggaggaggcgaagaaggucaagcccaccgugguggucaacgccgccaacguguaccugaagcacgggggcggcguggccggggcccugaacaaggcgaccaacaacgccaugcaggucgaguccgacgacuacaucgccacgaacggcccccucaagguggggggcagcugcguccuguccggccacaaccuggccaagcacugccuccacgugguggggcccaacgucaacaagggcgaggacauccagcugcugaagagcgccuacgagaacuucaaccagcacgaggugcuccuggcgccgcugcucuccgccgggaucuucggcgccgaccccauccacagccugcgggugugcgucgacaccgugcgcaccaacguguaccuggccgucuucgacaagaaccucuacgacaagcugguguccagcuuccuggagaugaagagcgagaagcagguggagcagaagaucgccgagauccccaaggaggaggucaagcccuucaucaccgaguccaagccgagcguggagcagcggaagcaggacgacaagaagaucaaggcgugcguggaggaggucacgaccacccucgaggagaccaaguuccugacggagaaccugcuccuguacaucgacaucaacgggaaccugcaccccgacuccgccacccucgugagcgacaucgacaucaccuuccugaagaaggacgcccccuacaucgugggcgacgucgugcaggagggcgugcugaccgccgucgugauccccacgaagaaggccgggggcaccaccgagaugcucgcgaaggcccugcgcaaggugccgaccgacaacuacaucacgaccuaccccgggcagggccugaacggguacaccgucgaggaggccaagaccgugcucaagaagugcaaguccgccuucuacauccugcccagcaucaucuccaacgagaagcaggagauccugggcaccgugagcuggaaccuccgggagaugcuggcgcacgccgaggagacgcgcaagcugaugcccgucugcguggagaccaaggccaucguguccaccauccagcggaaguacaagggcaucaagauccaggagggggucguggacuacggcgcccgcuucuacuucuacaccagcaagacgaccguggccucccugaucaacacccucaacgaccugaacgagacccuggucacgaugccgcucggguacgugacccacggccugaaccuggaggaggcggcccgguacaugcgcagccucaaggugcccgccaccgucuccgugagcucccccgacgccgugaccgccuacaacggguaccugacgagcuccagcaagacccccgaggagcacuucaucgagaccaucucccuggcgggcagcuacaaggacuggagcuacuccggccagagcacccagcucgggaucgaguuccugaagcggggcgacaaguccgucuacuacacgagcaacccgaccaccuuccaccuggacggggaggugaucaccuucgacaaccucaagacgcugcugucccuccgcgaggugcggaccaucaaggucuucaccaccguggacaacaucaaccugcacacgcagguggucgacaugagcaugaccuacggccagcaguucggccccaccuaccuggacggggccgacgugaccaagaucaagccccacaacucccacgagggcaagacguucuacgugcucccgaacgacgacacccugcgcgucgaggccuucgaguacuaccacaccaccgaccccagcuuccuggggcgguacauguccgcccucaaccacacgaagaaguggaaguacccccaggugaacggccugaccagcaucaagugggccgacaacaacugcuaccuggcgaccgcccuccugacccugcagcagaucgagcucaaguucaaccccccggcccugcaggacgccuacuaccgcgcgcgggccggggaggccgccaacuucugcgcccugauccucgcguacugcaacaagacggugggcgagcugggcgacguccgcgagaccauguccuaccuguuccagcacgccaaccucgacagcugcaagcgggugcugaacgucgugugcaagaccugcgggcagcagcagaccacccugaagggcguggaggccgucauguacauggggacgcucuccuacgagcaguucaagaagggcgugcagauccccugcaccugcgggaagcaggccaccaaguaccuggugcagcaggagagccccuucgucaugauguccgcccccccggcgcaguacgagcugaagcacggcaccuucacgugcgccagcgaguacaccggcaacuaccagugcgggcacuacaagcacaucaccuccaaggagacccucuacugcaucgacggcgcccugcugacgaagagcagcgaguacaaggggcccaucaccgacguguucuacaaggagaacuccuacaccaccacgaucaagcccgugaccuacaagcucgacggcgucgugugcaccgagaucgaccccaagcuggacaacuacuacaagaaggacaacagcuacuucaccgagcagccgaucgaccuggugcccaaccagcccuaccccaacgccuccuucgacaacuucaaguucgucugcgacaacaucaaguucgccgacgaccucaaccagcugacgggguacaagaagccggcgagccgcgagcugaaggugaccuucuuccccgaccucaacggcgacguggucgccaucgacuacaagcacuacacccccuccuucaagaagggcgccaagcugcugcacaagcccaucguguggcacgugaacaacgccaccaacaaggcgacguacaagccgaacaccuggugcauccggugccucuggagcaccaagcccgucgagaccuccaacagcuucgacgugcugaaguccgaggacgcccaggggauggacaaccuggccugcgaggaccucaagcccgugagcgaggaggucguggagaaccccacgauccagaaggacgugcuggagugcaacgucaagaccaccgagguggugggcgacaucauccugaagccggccaacaacucccucaagaucaccgaggaggucgggcacacggaccugauggccgcguacguggacaacagcucccugaccaucaagaagcccaacgagcucagccgcgugcugggccugaagacccucgccacccacgggcuggccgccgucaacuccgugcccugggacacgaucgccaacuacgcgaagccguuccugaacaagguggucagcaccaccaccaacaucgugacgcgcugccucaaccgggugugcaccaacuacaugcccuacuucuucacccugcugcuccagcugugcaccuucacccgcuccacgaacagccggaucaaggccuccaugcccaccaccaucgccaagaacaccgucaagagcgugggcaaguucugccuggaggccagcuucaacuaccucaagucccccaacuucagcaagcugaucaacaucaucaucugguuccugcuccuguccgugugccugggcagccucaucuacuccacggccgcgcuggggguccugaugagcaaccucggcauguccagcuacugcaccggguaccgcgagggcuaccugaacuccaccaacgugaccaucgccacguacugcaccggcagcaucccgugcuccgugugccugagcgggcucgacucccuggacaccuaccccagccuggagaccauccagaucacgaucuccagcuucaagugggaccucaccgccuucggccuggucgccgagugguuccuggccuacauccucuucacccgguucuucuacgugcuggggcuggcggccaucaugcagcucuucuucuccuacuucgccgugcacuucaucagcaacuccuggcugauguggcugaucaucaaccugguccagauggcccccaucagcgcgauggugcgcauguacaucuucuucgccagcuucuacuacguguggaaguccuacguccacgugguggacggcugcaacagcuccaccugcaugaugugcuacaagcggaaccgcgccacgcgggucgagugcaccaccaucgugaacgggguccgccggagcuucuacguguacgccaacggcggcaagggguucugcaagcuccacaacuggaacugcgugaacugcgacaccuucugcgccggcuccacguucaucagcgacgaggucgcgcgcgaccugucccugcaguucaagcggcccaucaacccgaccgaccagagcuccuacaucguggacagcgugaccgucaagaacggguccauccaccucuacuucgacaaggccggccagaagaccuacgagcgccacagccugucccacuucgugaaccuggacaaccuccgggccaacaacacgaaggggagccugcccaucaacgugaucgucuucgacggcaaguccaagugcgaggagagcuccgccaagagcgccuccguguacuacagccagcugaugugccagcccauccuccugcuggaccaggcgcucgugagcgacgucggcgacuccgccgagguggccgugaagauguucgacgccuacgucaacaccuucagcuccaccuucaacgugcccauggagaagcugaagacccugguggccacggcggaggccgagcucgccaagaacgucagccuggacaacgugcuguccaccuucaucagcgccgcgcgccagggguucguggacuccgacgucgagaccaaggacgugguggagugccucaagcugagccaccaguccgacaucgaggucaccggcgacagcugcaacaacuacaugcugacguacaacaagguggagaacaugaccccgcgggaccucggggccugcaucgacugcuccgcccgccacaucaacgcccagguggccaagagccacaacaucgcgcugaucuggaacgucaaggacuucaugucccugagcgagcagcuccggaagcagauccgcuccgccgccaagaagaacaaccugcccuucaagcugaccugcgccaccacgcgccagguggugaacgucgugaccaccaagaucgcccucaagggcggguga

SEQ ID NO: 17860 - RNA, 5841 nt, Artificial Sequence
  SARS-CoV-2__MT811279.1__non-structural protein 3 (NSP3) CDS gc
auggcccccaccaaggugaccuucggcgacgacacggucaucgaggugcagggguacaagagcgugaacaucaccuucgagcuggacgagcgcaucgacaagguccucaacgagaagugcuccgccuacaccguggagcugggcaccgaggugaacgaguucgcgugcgucguggccgacgccgugaucaagacgcugcagccggucagcgagcuccugaccccccuggggaucgaccucgacgagugguccauggccaccuacuaccuguucgacgagagcggcgaguucaagcuggccucccacauguacugcagcuucuacccccccgacgaggacgaggaggagggggacugcgaggaggaggaguucgagccguccacccaguacgaguacggcacggaggacgacuaccagggcaagccccucgaguucggggcgaccagcgccgcccugcagcccgaggaggagcaggaggaggacuggcuggacgacgacucccagcagaccgugggccagcaggacgggagcgaggacaaccagaccacgaccauccagaccaucguggagguccagccccagcucgagauggagcugaccccgguggugcagacgaucgaggucaacuccuucagcggcuaccugaagcucaccgacaacguguacaucaagaacgccgacaucguggaggaggcgaagaaggucaagcccaccgugguggucaacgccgccaacguguaccugaagcacgggggcggcguggccggggcccugaacaaggcgaccaacaacgccaugcaggucgaguccgacgacuacaucgccacgaacggcccccucaagguggggggcagcugcguccuguccggccacaaccuggccaagcacugccuccacgugguggggcccaacgucaacaagggcgaggacauccagcugcugaagagcgccuacgagaacuucaaccagcacgaggugcuccuggcgccgcugcucuccgccgggaucuucggcgccgaccccauccacagccugcgggugugcgucgacaccgugcgcaccaacguguaccuggccgucuucgacaagaaccucuacgacaagcugguguccagcuuccuggagaugaagagcgagaagcagguggagcagaagaucgccgagauccccaaggaggaggucaagcccuucaucaccgaguccaagccgagcguggagcagcggaagcaggacgacaagaagaucaaggcgugcguggaggaggucacgaccacccucgaggagaccaaguuccugacggagaaccugcuccuguacaucgacaucaacgggaaccugcaccccgacuccgccacccucgugagcgacaucgacaucaccuuccugaagaaggacgcccccuacaucgugggcgacgucgugcaggagggcgugcugaccgccgucgugauccccacgaagaaggccgggggcaccaccgagaugcucgcgaaggcccugcgcaaggugccgaccgacaacuacaucacgaccuaccccgggcagggccugaacggguacaccgucgaggaggccaagaccgugcucaagaagugcaaguccgccuucuacauccugcccagcaucaucuccaacgagaagcaggagauccugggcaccgugagcuggaaccuccgggagaugcuggcgcacgccgaggagacgcgcaagcugaugcccgucugcguggagaccaaggccaucguguccaccauccagcggaaguacaagggcaucaagauccaggagggggucguggacuacggcgcccgcuucuacuucuacaccagcaagacgaccguggccucccugaucaacacccucaacgaccugaacgagacccuggucacgaugccgcucggguacgugacccacggccugaaccuggaggaggcggcccgguacaugcgcagccucaaggugcccgccaccgucuccgugagcucccccgacgccgugaccgccuacaacggguaccugacgagcuccagcaagacccccgaggagcacuucaucgagaccaucucccuggcgggcagcuacaaggacuggagcuacuccggccagagcacccagcucgggaucgaguuccugaagcggggcgacaaguccgucuacuacacgagcaacccgaccaccuuccaccuggacggggaggugaucaccuucgacaaccucaagacgcugcugucccuccgcgaggugcggaucaucaaggucuucaccaccguggacaacaucaaccugcacacccagguggucgacaugagcaugacguacggccagcaguucggccccaccuaccuggacggggccgacgugaccaagaucaagccccacaacucccacgagggcaagaccuucuacgugcucccgaacgacgacacgcugcgcgucgaggccuucgaguacuaccacaccaccgaccccagcuuccuggggcgguacauguccgcccucaaccacaccaagaaguggaaguacccccaggugaacggccugacgagcaucaagugggccgacaacaacugcuaccuggcgaccgcccuccugacccugcagcagaucgagcucaaguucaaccccccggcccugcaggacgccuacuaccgcgcgcgggccggggaggccgccaacuucugcgcccugauccucgcguacugcaacaagaccgugggcgagcugggcgacguccgcgagacgauguccuaccuguuccagcacgccaaccucgacagcugcaagcgggugcugaacgucgugugcaagaccugcgggcagcagcagaccacccugaagggcguggaggccgucauguacauggggacccucuccuacgagcaguucaagaagggcgugcagauccccugcacgugcgggaagcaggccaccaaguaccuggugcagcaggagagccccuucgucaugauguccgcccccccggcgcaguacgagcugaagcacggcaccuucaccugcgccagcgaguacacgggcaacuaccagugcgggcacuacaagcacaucaccuccaaggagacccucuacugcaucgacggcgcccugcugaccaagagcagcgaguacaaggggcccaucacggacguguucuacaaggagaacuccuacaccaccaccaucaagcccgugacguacaagcucgacggcgucgugugcaccgagaucgaccccaagcuggacaacuacuacaagaaggacaacagcuacuucaccgagcagccgaucgaccuggugcccaaccagcccuaccccaacgccuccuucgacaacuucaaguucgucugcgacaacaucaaguucgccgacgaccucaaccagcugaccggguacaagaagccggcgagccgcgagcugaaggugacguucuuccccgaccucaacggcgacguggucgccaucgacuacaagcacuacacccccuccuucaagaagggcgccaagcugcugcacaagcccaucguguggcacgugaacaacgccaccaacaaggcgaccuacaagccgaacacguggugcauccggugccucuggagcaccaagcccgucgagaccuccaacagcuucgacgugcugaaguccgaggacgcccaggggauggacaaccuggccugcgaggaccucaagcccgugagcgaggaggucguggagaaccccaccauccagaaggacgugcuggagugcaacgucaagacgaccgagguggugggcgacaucauccugaagccggccaacaacucccucaagaucaccgaggaggucgggcacaccgaccugauggccgcguacguggacaacagcucccugacgaucaagaagcccaacgagcucagccgcgugcugggccugaagacccucgccacccacgggcuggccgccgucaacuccgugcccugggacaccaucgccaacuacgcgaagccguuccugaacaagguggucagcacgaccaccaacaucgugacccgcugccucaaccgggugugcacgaacuacaugcccuacuucuucacccugcugcuccagcugugcaccuucacccgcuccaccaacagccggaucaaggccuccaugcccacgaccaucgccaagaacaccgucaagagcgugggcaaguucugccuggaggccagcuucaacuaccucaagucccccaacuucagcaagcugaucaacaucaucaucugguuccugcuccuguccgugugccugggcagccucaucuacuccaccgccgcgcuggggguccugaugagcaaccucggcaugccguccuacugcacgggguaccgcgagggcuaccugaacagcaccaacgugaccaucgccaccuacugcacgggcuccauccccugcagcgugugccuguccgggcucgacagccuggacaccuaccccucccuggagaccauccagaucaccaucagcuccuucaagugggaccucacggccuucggccuggucgccgagugguuccuggccuacauccucuucacccgguucuucuacgugcuggggcuggcggccaucaugcagcucuucuucagcuacuucgccgugcacuucaucuccaacagcuggcugauguggcugaucaucaaccugguccagauggcccccaucuccgcgauggugcgcauguacaucuucuucgccagcuucuacuacguguggaagagcuacguccacgugguggacggcugcaacuccagcaccugcaugaugugcuacaagcggaaccgcgccacccgggucgagugcacgaccaucgugaacgggguccgccgguccuucuacguguacgccaacggcggcaagggguucugcaagcuccacaacuggaacugcgugaacugcgacaccuucugcgccggcagcaccuucaucuccgacgaggucgcgcgcgaccugagccugcaguucaagcggccgaucaaccccacggaccaguccagcuacaucguggacuccgugaccgucaagaacgggagcauccaccucuacuucgacaaggccggccagaagaccuacgagcgccacucccugagccacuucgugaaccuggacaaccuccgggccaacaacaccaaggggucccugcccaucaacgugaucgucuucgacggcaagagcaagugcgaggaguccagcgccaaguccgccagcguguacuacucccagcugaugugccagcccauccuccugcuggaccaggcgcucgugagcgacgucggcgacagcgccgagguggccgugaagauguucgacgccuacgucaacacguucuccagcaccuucaacgugccgauggagaagcugaagacccugguggccaccgcggaggccgagcucgccaagaacgucucccuggacaacgugcugagcacguucaucuccgccgcgcgccagggguucguggacagcgacgucgagaccaaggacgugguggagugccucaagcugucccaccagagcgacaucgaggucaccggcgacuccugcaacaacuacaugcugaccuacaacaagguggagaacaugacgccccgggaccucggggccugcaucgacugcagcgcccgccacaucaacgcccagguggccaagucccacaacaucgcgcugaucuggaacgucaaggacuucaugagccuguccgagcagcuccggaagcagauccgcagcgccgccaagaagaacaaccugcccuucaagcugaccugcgccaccacccgccagguggugaacgucgugacgaccaagaucgcccucaagggcggguga

SEQ ID NO: 17861 - RNA, 5841 nt, Artificial Sequence
  SARS-CoV-2__MT811281.1__non-structural protein 3 (NSP3) CDS gc
auggcccccaccaaggugaccuucggcgacgacacggucaucgaggugcagggguacaagagcgugaacaucaccuucgagcuggacgagcgcaucgacaagguccucaacgagaagugcuccgccuacaccguggagcugggcaccgaggugaacgaguucgcgugcgucguggccgacgccgugaucaagacgcugcagccggucagcgagcuccugaccccccuggggaucgaccucgacgagugguccauggccaccuacuaccuguucgacgagagcggcgaguucaagcuggccucccacauguacugcagcuucuacccccccgacgaggacgaggaggagggggacugcgaggaggaggaguucgagccguccacccaguacgaguacggcacggaggacgacuaccagggcaagccccucgaguucggggcgaccagcgccgcccugcagcccgaggaggagcaggaggaggacuggcuggacgacgacucccagcagaccgugggccagcaggacagcuccgaggacaaccagaccacgaccauccagaccaucguggagguccagccccagcucgagauggagcugaccccgguggugcagacgaucgaggucaacagcuucuccggguaccugaagcucaccgacaacguguacaucaagaacgccgacaucguggaggaggcgaagaaggucaagcccaccgugguggucaacgccgccaacguguaccugaagcacggcgggggcguggccggcgcccugaacaaggcgaccaacaacgccaugcaggucgagagcgacgacuacaucgccacgaacgggccccucaaggugggcggguccugcguccugagcggccacaaccuggccaagcacugccuccacguggugggccccaacgucaacaagggggaggacauccagcugcugaaguccgccuacgagaacuucaaccagcacgaggugcuccuggcgccgcugcucagcgccggcaucuucggggccgaccccauccacucccugcgggugugcgucgacaccgugcgcaccaacguguaccuggccgucuucgacaagaaccucuacgacaagcuggugagcagcuuccuggagaugaaguccgagaagcagguggagcagaagaucgccgagauccccaaggaggaggucaagcccuucaucaccgagagcaagccguccguggagcagcggaagcaggacgacaagaagaucaaggcgugcguggaggaggucacgaccacccucgaggagaccaaguuccugacggagaaccugcuccuguacaucgacaucaacggcaaccugcaccccgacagcgccacccucguguccgacaucgacaucaccuuccugaagaaggacgcccccuacaucgugggggacgucgugcaggagggcgugcugaccgccgucgugauccccacgaagaaggccggcgggaccaccgagaugcucgcgaaggcccugcgcaaggugccgaccgacaacuacaucacgaccuaccccggccaggggcugaacggcuacaccgucgaggaggccaagaccgugcucaagaagugcaagagcgccuucuacauccugcccuccaucaucagcaacgagaagcaggagauccuggggaccguguccuggaaccuccgggagaugcuggcgcacgccgaggagacgcgcaagcugaugcccgucugcguggagaccaaggccaucgugagcaccauccagcggaaguacaagggcaucaagauccaggagggcgucguggacuacggggcccgcuucuacuucuacaccuccaagacgaccguggccagccugaucaacacccucaacgaccugaacgagacccuggucacgaugccgcucggcuacgugacccacgggcugaaccuggaggaggcggcccgguacaugcgcucccucaaggugcccgccaccgucagcguguccagccccgacgccgugaccgccuacaacggcuaccugacguccagcuccaagacccccgaggagcacuucaucgagaccaucagccuggcggggagcuacaaggacugguccuacagcggccaguccacccagcucggcaucgaguuccugaagcggggggacaagagcgucuacuacacguccaacccgaccaccuuccaccuggacggcgaggugaucaccuucgacaaccucaagacgcugcugagccuccgcgaggugcggaccaucaaggucuucaccaccguggacaacaucaaccugcacacgcagguggucgacauguccaugaccuacgggcagcaguucggccccaccuaccuggacggcgccgacgugaccaagaucaagccccacaacagccacgaggggaagacguucuacgugcucccgaacgacgacacccugcgcgucgaggccuucgaguacuaccacaccaccgaccccuccuuccugggccgguacaugagcgcccucaaccacacgaagaaguggaaguacccccaggugaacgggcugaccuccaucaagugggccgacaacaacugcuaccuggcgaccgcccuccugacccugcagcagaucgagcucaaguucaaccccccggcccugcaggacgccuacuaccgcgcgcgggccggcgaggccgccaacuucugcgcccugauccucgcguacugcaacaagacggugggggagcugggcgacguccgcgagaccaugagcuaccuguuccagcacgccaaccucgacuccugcaagcgggugcugaacgucgugugcaagaccugcggccagcagcagaccacccugaaggggguggaggccgucauguacaugggcacgcucagcuacgagcaguucaagaagggggugcagauccccugcaccugcggcaagcaggccaccaaguaccuggugcagcaggagucccccuucgucaugaugagcgcccccccggcgcaguacgagcugaagcacgggaccuucacgugcgccuccgaguacaccggcaacuaccagugcggccacuacaagcacaucaccagcaaggagacccucuacugcaucgacggggcccugcugacgaagagcuccgaguacaagggccccaucaccgacguguucuacaaggagaacagcuacaccaccacgaucaagcccgugaccuacaagcucgacggggucgugugcaccgagaucgaccccaagcuggacaacuacuacaagaaggacaacuccuacuucaccgagcagccgaucgaccuggugcccaaccagcccuaccccaacgccagcuucgacaacuucaaguucgucugcgacaacaucaaguucgccgacgaccucaaccagcugacgggcuacaagaagccggcgucccgcgagcugaaggugaccuucuuccccgaccucaacggggacguggucgccaucgacuacaagcacuacacccccagcuucaagaagggcgccaagcugcugcacaagcccaucguguggcacgugaacaacgccaccaacaaggcgacguacaagccgaacaccuggugcauccggugccucugguccaccaagcccgucgagaccagcaacuccuucgacgugcugaagagcgaggacgcccagggcauggacaaccuggccugcgaggaccucaagcccguguccgaggaggucguggagaaccccacgauccagaaggacgugcuggagugcaacgucaagaccaccgagguggugggggacaucauccugaagccggccaacaacagccucaagaucaccgaggaggucggccacacggaccugauggccgcguacguggacaacuccagccugaccaucaagaagcccaacgagcucucccgcgugcuggggcugaagacccucgccacccacggccuggccgccgucaacagcgugcccugggacacgaucgccaacuacgcgaagccguuccugaacaagguggucuccaccaccaccaacaucgugacgcgcugccucaaccgggugugcaccaacuacaugcccuacuucuucacccugcugcuccagcugugcaccuucacccgcagcacgaacucccggaucaaggccagcaugcccaccaccaucgccaagaacaccgucaagagcguggggaaguucugccuggaggccuccuucaacuaccucaagagccccaacuucuccaagcugaucaacaucaucaucugguuccugcuccugagcgugugccugggcucccucaucuacagcacggccgcgcugggcguccugauguccaaccucgggaugccgagcuacugcaccggcuaccgcgagggguaccugaacuccaccaacgugaccaucgccacguacugcaccggcagcauccccugcuccgugugccugagcggccucgacucccuggacaccuaccccagccuggagaccauccagaucacgaucuccagcuucaagugggaccucaccgccuucgggcuggucgccgagugguuccuggccuacauccucuucacccgguucuucuacgugcugggccuggcggccaucaugcagcucuucuucuccuacuucgccgugcacuucaucagcaacuccuggcugauguggcugaucaucaaccugguccagauggcccccaucagcgcgauggugcgcauguacaucuucuucgccagcuucuacuacguguggaaguccuacguccacgugguggacgggugcaacagcuccaccugcaugaugugcuacaagcggaaccgcgccacgcgggucgagugcaccaccaucgugaacggcguccgccggagcuucuacguguacgccaacgggggcaagggcuucugcaagcuccacaacuggaacugcgugaacugcgacaccuucugcgccggguccacguucaucagcgacgaggucgcgcgcgaccugucccugcaguucaagcggccgaucaaccccaccgaccagagcuccuacaucguggacagcgugaccgucaagaacggcuccauccaccucuacuucgacaaggccgggcagaagaccuacgagcgccacagccugucccacuucgugaaccuggacaaccuccgggccaacaacacgaagggcagccugcccaucaacgugaucgucuucgacgggaaguccaagugcgaggagagcuccgccaagagcgccuccguguacuacagccagcugaugugccagcccauccuccugcuggaccaggcgcucgugagcgacgucggcgacuccgccgagguggccgugaagauguucgacgccuacgucaacaccuucagcuccaccuucaacgugccgauggagaagcugaagacccugguggccacggcggaggccgagcucgccaagaacgucagccuggacaacgugcuguccaccuucaucagcgccgugcgccagggcuucgucgacuccgacguggagaccaaggacguggucgagugccucaagcugagccaccaguccgacaucgaggugaccggggacagcugcaacaacuacaugcugacguacaacaagguggagaacaugaccccccgggaccucggcgcgugcaucgacugcuccgcccgccacaucaacgcccaggucgccaagagccacaacaucgcccugaucuggaacgugaaggacuucaugucccugagcgagcagcuccggaagcagauccgcuccgcggccaagaagaacaaccugcccuucaagcugaccugcgccaccacgcgccagguggucaacguggugaccaccaagaucgcccucaaggggggcuga

SEQ ID NO: 17862 - RNA, 5841 nt, Artificial Sequence
  SARS-CoV-2__MT811297.1__non-structural protein 3 (NSP3) CDS gc
auggcccccaccaaggugaccuucggcgacgacacggucaucgaggugcagggguacaagagcgugaacaucaccuucgagcuggacgagcgcaucgacaagguccucaacgagaagugcuccgccuacaccguggagcugggcaccgaggugaacgaguucgcgugcgucguggccgacgccgugaucaagacgcugcagccggucagcgagcuccugaccccccuggggaucgaccucgacgagugguccauggccaccuacuaccuguucgacgagagcggcgaguucaagcuggccucccacauguacugcagcuucuacccccccgacgaggacgaggaggagggggacugcgaggaggaggaguucgagccguccacccaguacgaguacggcacggaggacgacuaccagggcaagccccucgaguucggggcgaccagcgccgcccugcagcccgaggaggagcaggaggaggacuggcuggacgacgacucccagcagaccgugggccagcaggacgggagcgaggacaaccagaccacgaccauccagaccaucguggagguccagccccagcucgagauggagcugaccccgguggugcagacgaucgaggucaacuccuucagcggcuaccugaagcucaccgacaacguguacaucaagaacgccgacaucguggaggaggcgaagaaggucaagcccaccgugguggucaacgccgccaacguguaccugaagcacgggggcggcguggcccgggcccugaacaaggcgaccaacaacgccaugcaggucgaguccgacgacuacaucgccacgaacgggccccucaaggugggcgggagcugcguccuguccggccacaaccuggccaagcacugccuccacguggugggccccaacgucaacaagggggaggacauccagcugcugaagagcgccuacgagaacuucaaccagcacgaggugcuccuggcgccgcugcucuccgccggcaucuucggggccgaccccauccacagccugcgcgugugcgucgacaccgugcggaccaacguguaccuggccgucuucgacaagaaccucuacgacaagcugguguccagcuuccuggagaugaagagcgagaagcagguggagcagaagaucgccgagauccccaaggaggaggucaagcccuucaucaccgaguccaagccgagcguggagcagcgcaagcaggacgacaagaagaucaaggcgugcguggaggaggucacgaccacccucgaggagaccaaguuccugacggagaaccugcuccuguacaucgacaucaacggcaaccugcaccccgacuccgccacccucgugagcgacaucgacaucaccuuccugaagaaggacgcccccuacaucgugggggacgucgugcaggagggcgugcugaccgccgucgugauccccacgaagaaggccggcgggaccaccgagaugcucgcgaaggcccugcggaaggugccgaccgacaacuacaucacgaccuaccccggccaggggcugaacggcuacaccgucgaggaggccaagaccgugcucaagaagugcaaguccgccuucuacauccugcccagcaucaucuccaacgagaagcaggagauccuggggaccgugagcuggaaccuccgcgagaugcuggcgcacgccgaggagacgcggaagcugaugcccgucugcguggagaccaaggccaucguguccaccauccagcgcaaguacaagggcaucaagauccaggagggcgucguggacuacggggcccgguucuacuucuacaccagcaagacgaccguggccucccugaucaacacccucaacgaccugaacgagacccuggucacgaugccgcucggcuacgugacccacgggcugaaccuggaggaggcggcccgcuacaugcggagccucaaggugcccgccaccgucuccgugagcucccccgacgccgugaccgccuacaacggcuaccugacgagcuccagcaagacccccgaggagcacuucaucgagaccaucucccuggcggggagcuacaaggacuggagcuacuccggccagagcacccagcucggcaucgaguuccugaagcgcggggacaaguccgucuacuacacgagcaacccgaccaccuuccaccuggacggcgaggugaucaccuucgacaaccucaagacgcugcugucccuccgggaggugcgcaccaucaaggucuucaccaccguggacaacaucaaccugcacacgcagguggucgacaugagcaugaccuacgggcagcaguucggccccaccuaccuggacggcgccgacgugaccaagaucaagccccacaacucccacgaggggaagacguucuacgugcucccgaacgacgacacccugcgggucgaggccuucgaguacuaccacaccaccgaccccagcuuccugggccgcuacauguccgcccucaaccacacgaagaaguggaaguacccccaggugaacgggcugaccagcaucaagugggccgacaacaacugcuaccuggcgaccgcccuccugacccugcagcagaucgagcucaaguucaaccccccggcccugcaggacgccuacuaccgggcgcgcgccggcgaggccgccaacuucugcgcccugauccucgcguacugcaacaagacggugggggagcugggcgacguccgggagaccauguccuaccuguuccagcacgccaaccucgacagcugcaagcgcgugcugaacgucgugugcaagaccugcggccagcagcagaccacccugaaggggguggaggccgucauguacaugggcacgcucuccuacgagcaguucaagaagggggugcagauccccugcaccugcggcaagcaggccaccaaguaccuggugcagcaggagagccccuucgucaugauguccgcccccccggcgcaguacgagcugaagcacgggaccuucacgugcgccagcgaguacaccggcaacuaccagugcggccacuacaagcacaucaccuccaaggagacccucuacugcaucgacggggcccugcugacgaagagcagcgaguacaagggccccaucaccgacguguucuacaaggagaacuccuacaccaccacgaucaagcccgugaccuacaagcucgacggggucgugugcaccgagaucgaccccaagcuggacaacuacuacaagaaggacaacagcuacuucaccgagcagccgaucgaccuggugcccaaccagcccuaccccaacgccuccuucgacaacuucaaguucgucugcgacaacaucaaguucgccgacgaccucaaccagcugacgggcuacaagaagccggcgagccgggagcugaaggugaccuucuuccccgaccucaacggggacguggucgccaucgacuacaagcacuacacccccuccuucaagaagggcgccaagcugcugcacaagcccaucguguggcacgugaacaacgccaccaacaaggcgacguacaagccgaacaccuggugcauccgcugccucuggagcaccaagcccgucgagaccuccaacagcuucgacgugcugaaguccgaggacgcccagggcauggacaaccuggccugcgaggaccucaagcccgugagcgaggaggucguggagaaccccacgauccagaaggacgugcuggagugcaacgucaagaccaccgagguggugggggacaucauccugaagccggccaacaacucccucaagaucaccgaggaggucggccacacggaccugauggccgcguacguggacaacagcucccugaccaucaagaagcccaacgagcucagccgcgugcuggggcugaagacccucgccacccacggccuggccgccgucaacuccgugcccugggacacgaucgccaacuacgcgaagccguuccugaacaagguggucagcaccaccaccaacaucgugacgcggugccucaaccgcgugugcaccaacuacaugcccuacuucuucacccugcugcuccagcugugcaccuucacccgguccacgaacagccgcaucaaggccuccaugcccaccaccaucgccaagaacaccgucaagagcguggggaaguucugccuggaggccagcuucaacuaccucaagucccccaacuucagcaagcugaucaacaucaucaucugguuccugcuccuguccgugugccugggcagccucaucuacuccacggccgcgcugggcguccugaugagcaaccucgggaugccguccuacugcaccggcuaccgggagggguaccugaacagcaccaacgugaccaucgccacguacugcaccggcuccauccccugcagcgugugccuguccggccucgacagccuggacaccuaccccucccuggagaccauccagaucacgaucagcuccuucaagugggaccucaccgccuucgggcuggucgccgagugguuccuggccuacauccucuucacccgcuucuucuacgugcugggccuggcggccaucaugcagcucuucuucagcuacuucgccgugcacuucaucuccaacagcuggcugauguggcugaucaucaaccugguccagauggcccccaucuccgcgauggugcggauguacaucuucuucgccagcuucuacuacguguggaagagcuacguccacgugguggacgggugcaacuccagcaccugcaugaugugcuacaagcgcaaccgggccacgcgcgucgagugcaccaccaucgugaacggcguccggcgcuccuucuacguguacgccaacgggggcaagggcuucugcaagcuccacaacuggaacugcgugaacugcgacaccuucugcgccgggagcacguucaucuccgacgaggucgcgcgggaccugagccugcaguucaagcgcccgaucaaccccaccgaccaguccagcuacaucguggacuccgugaccgucaagaacggcagcauccaccucuacuucgacaaggccgggcagaagaccuacgagcggcacucccugagccacuucgugaaccuggacaaccuccgcgccaacaacacgaagggcucccugcccaucaacgugaucgucuucgacgggaagagcaagugcgaggaguccagcgccaaguccgccagcguguacuacucccagcugaugugccagcccauccuccugcuggaccaggcgcucgugagcgacgucggcgacagcgccgagguggccgugaagauguucgacgccuacgucaacaccuucuccagcaccuucaacgugccgauggagaagcugaagacccugguggccacggcggaggccgagcucgccaagaacgucucccuggacaacgugcugagcaccuucaucuccgccgcgcggcagggcuucguggacagcgacgucgagaccaaggacgugguggagugccucaagcugucccaccagagcgacaucgaggucaccggggacuccugcaacaacuacaugcugacguacaacaagguggagaacaugaccccccgcgaccucggcgccugcaucgacugcagcgcccggcacaucaacgcccagguggccaagucccacaacaucgcgcugaucuggaacgucaaggacuucaugagccuguccgagcagcuccgcaagcagauccgcagcgccgccaagaagaacaaccugcccuucaagcugaccugcgccaccacgcggcagguggugaacgucgugaccaccaagaucgcccucaaggggggcuga

SEQ ID NO: 17863 - RNA, 5841 nt, Artificial Sequence
  SARS-CoV-2__MT811322.1__non-structural protein 3 (NSP3) CDS gc
auggcccccaccaaggugaccuucggcgacgacacggucaucgaggugcagggguacaagagcgugaacaucaccuucgagcuggacgagcgcaucgacaagguccucaacgagaagugcuccgccuacaccguggagcugggcaccgaggugaacgaguucgcgugcgucguggccgacgccgugaucaagacgcugcagccggucagcgagcuccugaccccccuggggaucgaccucgacgagugguccauggccaccuacuaccuguucgacgagagcggcgaguucaagcuggccucccacauguacugcagcuucuacccccccgacgaggacgaggaggagggggacugcgaggaggaggaguucgagccguccacccaguacgaguacggcacggaggacgacuaccagggcaagccccucgaguucggggcgaccagcgccgcccugcagcccgaggaggagcaggaggaggacuggcuggacgacgacucccagcagaccgugggccagcaggacgggagcgaggacaaccagaccacgaccauccagaccaucguggagguccagccccagcucgagauggagcugaccccgguggugcagacgaucgaggucaacuccuucagcggcuaccugaagcucaccgacaacguguacaucaagaacgccgacaucguggaggaggcgaagaaggucaagcccaccgugguggucaacgccgccaacguguaccugaagcacgggggcggcguggccggggcccugaacaaggcgaccaacaacgccaugcaggucgaguccgacgacuacaucgccacgaacggcccccucaagguggggggcagcugcguccuguccggccacaaccuggccaagcacugccuccacgugguggggcccaacgucaacaagggcgaggacauccagcugcugaagagcgccuacgagaacuucaaccagcacgaggugcuccuggcgccgcugcucuccgccgggaucuucggcgccgaccccauccacagccugcgggugugcgucgacaccgugcgcaccaacguguaccuggccgucuucgacaagaaccucuacgacaagcugguguccagcuuccuggagaugaagagcgagaagcagguggagcagaagaucgccgagauccccaaggaggaggucaagcccuucaucaccgaguccaagccgagcguggagcagcggaagcaggacgacaagaagaucaaggcgugcguggaggaggucacgaccacccucgaggagaccaaguuccugacggagaaccugcuccuguacaucgacaucaacgggaaccugcaccccgacuccgccacccucgugagcgacaucgacaucaccuuccugaagaaggacgcccccuacaucgugggcgacgucgugcaggagggcgugcugaccgccgucgugauccccacgaagaaggccgggggcaccaccgagaugcucgcgaaggcccugcgcaaggugccgaccgacaacuacaucacgaccuaccccgggcagggccugaacggguacaccgucgaggaggccaagaccgugcucaagaagugcaaguccgccuucuacauccugcccagcaucaucuccaacgagaagcaggagauccugggcaccgugagcuggaaccuccgggagaugcuggcgcacgccgaggagacgcgcaagcugaugcccgucugcguggagaccaaggccaucguguccaccauccagcggaaguacaagggcaucaagauccaggagggggucguggacuacggcgcccgcuucuacuucuacaccagcaagacgaccguggccucccugaucaacacccucaacgaccugaacgagacccuggucacgaugccgcucggguacgugacccacggccugaaccuggaggaggcggcccgguacaugcgcagccucaaggugcccgccaccgucuccgugagcucccccgacgccgugaccgccuacaacggguaccugacgagcuccagcaagacccccgaggagcacuucaucgagaccaucucccuggcgggcagcuacaaggacuggagcuacuccggccagagcacccagcucgggaucgaguuccugaagcggggcgacaaguccgucuacuacacgagcaacccgaccaccuuccaccuggacggggaggugaucaccuucgacaaccucaagacgcugcugucccuccgcgaggugcggaccaucaaggucuucaccaccguggacaacaucaaccugcacacgcagguggucgacaugagcaugaccuacggccagcaguucggccccaccuaccuggacggggccgacgugaccaagaucaagccccacaacucccacgagggcaagacguucuacgugcucccgaacgacgacacccugcgcgucgaggccuucgaguacuaccacaccaccgaccccagcuuccuggggcgguacauguccgcccucaaccacacgaagaaguggaaguacccccaggugaacggccugaccagcaucaagugggccgacaacaacugcuaccuggcgaccgcccuccugacccugcagcagaucgagcucaaguucaaccccccggcccugcaggacgccuacuaccgcgcgcgggccggggaggccgccaacuucugcgcccugauccucgcguacugcaacaagacggugggcgagcugggcgacguccgcgagaccauguccuaccuguuccagcacgccaaccucgacagcugcaagcgggugcugaacgucgugugcaagaccugcgggcagcagcagaccacccugaagggcguggaggccgucauguacauggggacgcucuccuacgagcaguucaagaagggcgugcagauccccugcaccugcgggaagcaggccaccaaguaccuggugcagcaggagagccccuucgucaugauguccgcccccccggcgcaguacgagcugaagcacggcaccuucacgugcgccagcgaguacaccggcaacuaccagugcgggcacuacaagcacaucaccuccaaggagacccucuacugcaucgacggcgcccugcugacgaagagcagcgaguacaaggggcccaucaccgacguguucuacaaggagaacuccuacaccaccacgaucaagcccgugaccuacaagcucgacggcgucgugugcaccgagaucgaccccaagcuggacaacuacuacaagaaggacaacagcuacuucaccgagcagccgaucgaccuggugcccaaccagcccuaccccaacgccuccuucgggaacuucaaguucgucugcgacaacaucaaguucgccgacgaccucaaccagcugacgggcuacaagaagccggcgagccgcgagcugaaggugaccuucuuccccgaccucaacggcgacguggucgccaucgacuacaagcacuacacccccuccuucaagaagggggccaagcugcugcacaagcccaucguguggcacgugaacaacgccaccaacaaggcgacguacaagccgaacaccuggugcauccggugccucuggagcaccaagcccgucgagaccuccaacagcuucgacgugcugaaguccgaggacgcccagggcauggacaaccuggccugcgaggaccucaagcccgugagcgaggaggucguggagaaccccacgauccagaaggacgugcuggagugcaacgucaagaccaccgagguggugggggacaucauccugaagccggccaacaacucccucaagaucaccgaggaggucggccacacggaccugauggccgcguacguggacaacagcucccugaccaucaagaagcccaacgagcucagccgcgugcuggggcugaagacccucgccacccacggccuggccgccgucaacuccgugcccugggacacgaucgccaacuacgcgaagccguuccugaacaagguggucagcaccaccaccaacaucgugacgcgcugccucaaccgggugugcaccaacuacaugcccuacuucuucacccugcugcuccagcugugcaccuucacccgcuccacgaacagccggaucaaggccuccaugcccaccaccaucgccaagaacaccgucaagagcgugggcaaguucugccuggaggccagcuucaacuaccucaagucccccaacuucagcaagcugaucaacaucaucaucugguuccugcuccuguccgugugccuggggagccucaucuacuccacggccgcgcugggcguccugaugagcaaccucgggaugccguccuacugcaccggcuaccgcgagggcuaccugaacagcaccaacgugaccaucgccacguacugcaccggguccauccccugcagcgugugccuguccggccucgacagccuggacaccuaccccucccuggagaccauccagaucacgaucagcuccuucaagugggaccucaccgccuucgggcuggucgccgagugguuccuggccuacauccucuucacccgguucuucuacgugcugggccuggcggccaucaugcagcucuucuucagcuacuucgccgugcacuucaucuccaacagcuggcugauguggcugaucaucaaccugguccagauggcccccaucuccgcgauggugcgcauguacaucuucuucgccagcuucuacuacguguggaagagcuacguccacgugguggacgggugcaacuccagcaccugcaugaugugcuacaagcggaaccgcgccacgcgggucgagugcaccaccaucgugaacggcguccgccgguccuucuacguguacgccaacggcgggaagggcuucugcaagcuccacaacuggaacugcgugaacugcgacaccuucugcgccgggagcacguucaucuccgacgaggucgcgcgcgaccugagccugcaguucaagcggccgaucaaccccaccgaccaguccagcuacaucguggacuccgugaccgucaagaacggcagcauccaccucuacuucgacaaggccgggcagaagaccuacgagcgccacucccugagccacuucgugaaccuggacaaccuccgggccaacaacacgaagggcucccugcccaucaacgugaucgucuucgacggcaagagcaagugcgaggaguccagcgccaaguccgccagcguguacuacucccagcugaugugccagcccauccuccugcuggaccaggcgcucgugagcgacgucggggacagcgccgagguggccgugaagauguucgacgccuacgucaacaccuucuccagcaccuucaacgugccgauggagaagcugaagacccugguggccacggcggaggccgagcucgccaagaacgucucccuggacaacgugcugagcaccuucaucuccgccgcgcgccagggcuucguggacagcgacgucgagaccaaggacgugguggagugccucaagcugucccaccagagcgacaucgaggucaccggggacuccugcaacaacuacaugcugacguacaacaagguggagaacaugaccccccgggaccucggcgccugcaucgacugcagcgcccgccacaucaacgcccagguggccaagucccacaacaucgcgcugaucuggaacgucaaggacuucaugagccuguccgagcagcuccggaagcagauccgcagcgccgccaagaagaacaaccugcccuucaagcugaccugcgccaccacgcgccagguggugaacgucgugaccaccaagaucgcccucaaggggggcuga

SEQ ID NO: 17864 - RNA, 5841 nt, Artificial Sequence
  SARS-CoV-2__MT811341.1__non-structural protein 3 (NSP3) CDS gc
auggcccccaccaaggugaccuucggcgacgacacggucaucgaggugcagggguacaagagcgugaacaucaccuucgagcuggacgagcgcaucgacaagguccucaacgagaagugcuccgccuacaccguggagcugggcaccgaggugaacgaguucgcgugcgucguggccgacgccgugaucaagacgcugcagccggucagcgagcuccugaccccccuggggaucgaccucgacgagugguccauggccaccuacuaccuguucgacgagagcggcgaguucaagcuggccucccacauguacugcagcuucuacccccccgacgaggacgaggaggagggggacugcgaggaggaggaguucgagccguccacccaguacgaguacggcacggaggacgacuaccagggcaagccccucgaguucggggcgaccagcgccgcccugcagcccgaggaggagcaggaggaggacuggcuggacgacgacucccagcagaccgugggccagcaggacgggagcgaggacaaccagaccacgaccauccagaccaucguggagguccagccccagcucgagauggagcugaccccgguggugcagacgaucgaggucaacuccuucagcggcuaccugaagcucaccgacaacguguacaucaagaacgccgacaucguggaggaggcgaagaaggucaagcccaccgugguggucaacgccgccaacguguaccugaagcacgggggcggcguggccggggcccugaacaaggcgaccaacaacgccaugcaggucgaguccgacgacuacaucgccacgaacggcccccucaaggugagcggguccugcguccugagcggccacaaccuggccaagcacugccuccacguggugggccccaacgucaacaagggggaggacauccagcugcugaaguccgccuacgagaacuucaaccagcacgaggugcuccuggcgccgcugcucagcgccggcaucuucggggccgaccccauccacucccugcgggugugcgucgacaccgugcgcaccaacguguaccuggccgucuucgacaagaaccucuacgacaagcuggugagcagcuuccuggagaugaaguccgagaagcagguggagcagaagaucgccgagauccccaaggaggaggucaagcccuucaucaccgagagcaagccguccguggagcagcggaagcaggacgacaagaagaucaaggcgugcguggaggaggucacgaccacccucgaggagaccaaguuccugacggagaaccugcuccuguacaucgacaucaacggcaaccugcaccccgacagcgccacccucguguccgacaucgacaucaccuuccugaagaaggacgcccccuacaucgugggggacgucgugcaggagggcgugcugaccgccgucgugauccccacgaagaaggccggcgggaccaccgagaugcucgcgaaggcccugcgcaaggugccgaccgacaacuacaucacgaccuaccccggccaggggcugaacggcuacaccgucgaggaggccaagaccgugcucaagaagugcaagagcgccuucuacauccugcccuccaucaucagcaacgagaagcaggagauccuggggaccguguccuggaaccuccgggagaugcuggcgcacgccgaggagacgcgcaagcugaugcccgucugcguggagaccaaggccaucgugagcaccauccagcggaaguacaagggcaucaagauccaggagggcgucguggacuacggggcccgcuucuacuucuacaccuccaagacgaccguggccagccugaucaacauccucaacgaccugaacgagacccuggucaccaugccgcucggcuacgugacgcacgggcugaaccuggaggaggcggcccgguacaugcgcucccucaaggugcccgccaccgucagcguguccagccccgacgccgugaccgccuacaacggcuaccugaccuccagcuccaagacgcccgaggagcacuucaucgagaccaucagccuggcggggagcuacaaggacugguccuacagcggccaguccacccagcucggcaucgaguuccugaagcggggggacaagagcgucuacuacaccuccaacccgacgaccuuccaccuggacggcgaggugaucaccuucgacaaccucaagacccugcugagccuccgcgaggugcggacgaucaaggucuucaccaccguggacaacaucaaccugcacacccagguggucgacauguccaugacguacgggcagcaguucggccccaccuaccuggacggcgccgacgugaccaagaucaagccccacaacagccacgaggggaagaccuucuacgugcucccgaacgacgacacgcugcgcgucgaggccuucgaguacuaccacaccaccgaccccuccuuccugggccgguacaugagcgcccucaaccacaccaagaaguggaaguacccccaggugaacgggcugacguccaucaagugggccgacaacaacugcuaccuggcgaccgcccuccugacccugcagcagaucgagcucaaguucaaccccccggcccugcaggacgccuacuaccgcgcgcgggccggcgaggccgccaacuucugcgcccugauccucgcguacugcaacaagaccgugggggagcugggcgacguccgcgagacgaugagcuaccuguuccagcacgccaaccucgacuccugcaagcgggugcugaacgucgugugcaagaccugcggccagcagcagaccacccugaaggggguggaggccgucauguacaugggcacccucagcuacgagcaguucaagaagggggugcagauccccugcacgugcggcaagcaggccaccaaguaccuggugcagcaggagucccccuucgucaugaugagcgcccccccggcgcaguacgagcugaagcacgggaccuucaccugcgccuccgaguacacgggcaacuaccagugcggccacuacaagcacaucaccagcaaggagacccucuacugcaucgacggggcccugcugaccaagagcuccgaguacaagggccccaucacggacguguucuacaaggagaacagcuacaccaccaccaucaagcccgugacguacaagcucgacggggucgugugcaccgagaucgaccccaagcuggacaacuacuacaagaaggacaacuccuacuucaccgagcagccgaucgaccuggugcccaaccagcccuaccccaacgccagcuucgacaacuucaaguucgucugcgacaacaucaaguucgccgacgaccucaaccagcugaccggcuacaagaagccggcgucccgcgagcugaaggugacguucuuccccgaccucaacggggacguggucgccaucgacuacaagcacuacacccccagcuucaagaagggcgccaagcugcugcacaagcccaucguguggcacgugaacaacgccaccaacaaggcgaccuacaagccgaacacguggugcauccggugccucugguccaccaagcccgucgagaccagcaacuccuucgacgugcugaagagcgaggacgcccagggcauggacaaccuggccugcgaggaccucaagcccguguccgaggaggucguggagaaccccaccauccagaaggacgugcuggagugcaacgucaagacgaccgagguggugggggacaucauccugaagccggccaacaacagccucaagaucaccgaggaggucggccacaccgaccugauggccgcguacguggacaacuccagccugacgaucaagaagcccaacgagcucucccgcgugcuggggcugaagacccucgccacccacggccuggccgccgucaacagcgugcccugggacaccaucgccaacuacgcgaagccguuccugaacaagguggucuccacgaccaccaacaucgugacccgcugccucaaccgggugugcacgaacuacaugcccuacuucuucacccugcugcuccagcugugcaccuucacccgcagcaccaacucccggaucaaggccagcaugcccacgaccaucgccaagaacaccgucaagagcguggggaaguucugccuggaggccuccuucaacuaccucaagagccccaacuucuccaagcugaucaacaucaucaucugguuccugcuccugagcgugugccugggcucccucaucuacagcaccgccgcgcugggcguccugauguccaaccucgggaugccgagcuacugcacgggcuaccgcgagggguaccugaacuccaccaacgugaccaucgccaccuacugcacgggcagcauccccugcuccgugugccugagcggccucgacucccuggacaccuaccccagccuggagaccauccagaucaccaucuccagcuucaagugggaccucacggccuucgggcuggucgccgagugguuccuggccuacauccucuucacccgguucuucuacgugcugggccuggcggccaucaugcagcucuucuucuccuacuucgccgugcacuucaucagcaacuccuggcugauguggcugaucaucaaccugguccagauggcccccaucagcgcgauggugcgcauguacaucuucuucgccagcuucuacuacguguggaaguccuacguccacgugguggacgggugcaacagcuccaccugcaugaugugcuacaagcggaaccgcgccacccgggucgagugcacgaccaucgugaacggcguccgccggagcuucuacguguacgccaacgggggcaagggcuucugcaagcuccacaacuggaacugcgugaacugcgacaccuucugcgccggguccaccuucaucagcgacgaggucgcgcgcgaccugucccugcaguucaagcggccgaucaaccccacggaccagagcuccuacaucguggacagcgugaccgucaagaacggcuccauccaccucuacuucgacaaggccgggcagaagaccuacgagcgccacagccugucccacuucgugaaccuggacaaccuccgggccaacaacaccaagggcagccugcccaucaacgugaucgucuucgacgggaaguccaagugcgaggagagcuccgccaagagcgccuccguguacuacagccagcugaugugccagcccauccuccugcuggaccaggcgcucgugagcgacgucggcgacuccgccgagguggccgugaagauguucgacgccuacgucaacacguucagcuccaccuucaacgugccgauggagaagcugaagacccugguggccaccgcggaggccgagcucgccaagaacgucagccuggacaacgugcuguccacguucaucagcgccgcgcgccagggcuucguggacuccgacgucgagaccaaggacgugguggagugccucaagcugagccaccaguccgacaucgaggucaccggggacagcugcaacaacuacaugcugaccuacaacaagguggagaacaugacgccccgggaccucggcgccugcaucgacugcuccgcccgccacaucaacgcccagguggccaagagccacaacaucgcgcugaucuggaacgucaaggacuucaugucccugagcgagcagcuccggaagcagauccgcuccgccgccaagaagaacaaccugcccuucaagcugaccugcgccaccacccgccagguggugaacgucgugacgaccaagaucgcccucaaggggggcuga

SEQ ID NO: 17865 - RNA, 5841 nt, Artificial Sequence
  SARS-CoV-2__MT811344.1__non-structural protein 3 (NSP3) CDS gc
auggcccccaccaaggugaccuucggcgacgacacggucaucgaggugcagggguacaagagcgugaacaucaccuucgagcuggacgagcgcaucgacaagguccucaacgagaagugcuccgccuacaccguggagcugggcaccgaggugaacgaguucgcgugcgucguggccgacgccgugaucaagacgcugcagccggucagcgagcuccugaccccccuggggaucgaccucgacgagugguccauggccaccuacuaccuguucgacgagagcggcgaguucaagcuggccucccacauguacugcagcuucuacccccccgacgaggacgaggaggagggggacugcgaggaggaggaguucgagccguccacccaguacgaguacggcacggaggacgacuaccagggcaagccccucgaguucggggcgaccagcgccgcccugcagcccgaggaggagcaggaggaggacuggcuggacgacgacucccagcagaccgugggccagcaggacgggagcgaggacaaccagaccacgaccauccagaccaucguggagguccagccccagcucgagauggagcugaccccgguggugcagacgaucgaggucaacuccuucagcggcuaccugaagcucaccgacaacguguacaucaagaacgccgacaucguggaggaggcgaagaaggucaagcccaccgugguggucaacgccgccaacguguaccugaagcacgggggcggcguggccggggcccugaacaaggcgaccaacaacgccaugcaggucgaguccgacgacuacaucgccacgaacggcccccucaagguggggggcagcugcguccuguccggccacaaccuggccaagcacugccuccacgugguggggcccaacgucaacaagggcgaggacauccagcugcugaagagcgccuacgagaacuucaaccagcacgaggugcuccuggcgccgcugcucuccgccgggaucuucggcgccgaccccauccacagccugcgggugugcgucgacaccgugcgcaccaacguguaccuggccgucuucgacaagaaccucuacgacaagcugguguccagcuuccuggagaugaagagcgagaagcagguggagcagaagaucgccgagauccccaaggaggaggucaagcccuucaucaccgaguccaagccgagcguggagcagcggaagcaggacgacaagaagaucaaggcgugcguggaggaggucacgaccacccucgaggagaccaaguuccugacggagaaccugcuccuguacaucgacaucaacgggaaccugcaccccgacuccgccacccucgugagcgacaucgacaucaccuuccugaagaaggacgcccccuacaucgugggcgacgucgugcaggagggcgugcugaccgccgucgugauccccacgaagaaggccgggggcaccaccgagaugcucgcgaaggcccugcgcaaggugccgaccgacaacuacaucacgaccuaccccgggcagggccugaacggguacaccgucgaggaggccaagaccgugcucaagaagugcaaguccaccuucuacauccugcccagcaucaucuccaacgagaagcaggagauccugggcacggugagcuggaaccuccgggagaugcuggcccacgcggaggagacccgcaagcugaugcccgucugcguggagaccaaggccaucguguccaccauccagcggaaguacaagggcaucaagauccaggagggggucguggacuacggcgcccgcuucuacuucuacacgagcaagaccaccguggccucccugaucaacacccucaacgaccugaacgagacgcuggucaccaugccgcucggguacgugacccacggccugaaccuggaggaggccgcgcgguacaugcgcagccucaaggugcccgccaccgucuccgugagcucccccgacgccgugacggccuacaacggguaccugaccagcuccagcaagacccccgaggagcacuucaucgagaccaucucccuggccggcagcuacaaggacuggagcuacuccggccagagcacgcagcucgggaucgaguuccugaagcggggcgacaaguccgucuacuacaccagcaacccgaccaccuuccaccuggacggggaggugaucacguucgacaaccucaagacccugcugucccuccgcgaggugcggaccaucaaggucuucaccacgguggacaacaucaaccugcacacccagguggucgacaugagcaugaccuacggccagcaguucggccccaccuaccuggacggggcggacgugacgaagaucaagccccacaacucccacgagggcaagaccuucuacgugcucccgaacgacgacacccugcgcgucgaggccuucgaguacuaccacaccacggaccccagcuuccuggggcgguacauguccgcccucaaccacaccaagaaguggaaguacccccaggugaacggccugaccagcaucaagugggccgacaacaacugcuaccuggccaccgcgcuccugacgcugcagcagaucgagcucaaguucaaccccccggcccugcaggacgccuacuaccgcgcccgggcgggggaggccgccaacuucugcgcccugauccucgccuacugcaacaagaccgugggcgagcugggcgacguccgcgagaccauguccuaccuguuccagcacgcgaaccucgacagcugcaagcgggugcugaacgucgugugcaagaccugcgggcagcagcagaccacgcugaagggcguggaggccgucauguacauggggacccucuccuacgagcaguucaagaagggcgugcagauccccugcaccugcgggaagcaggccaccaaguaccuggugcagcaggagagccccuucgucaugauguccgcccccccggcccaguacgagcugaagcacggcacguucaccugcgcgagcgaguacaccggcaacuaccagugcgggcacuacaagcacaucaccuccaaggagacgcucuacugcaucgacggcgcccugcugaccaagagcagcgaguacaaggggcccaucaccgacguguucuacaaggagaacuccuacaccacgaccaucaagcccgugaccuacaagcucgacggcgucgugugcaccgagaucgaccccaagcuggacaacuacuacaagaaggacaacagcuacuucacggagcagccgaucgaccuggugcccaaccagcccuaccccaacgccuccuucgacaacuucaaguucgucugcgacaacaucaaguucgccgacgaccucaaccagcugaccggguacaagaagccggccagccgcgagcugaaggugaccuucuuccccgaccucaacggcgacguggucgcgaucgacuacaagcacuacacccccuccuucaagaagggcgccaagcugcugcacaagcccaucguguggcacgugaacaacgccacgaacaaggccaccuacaagccgaacaccuggugcauccggugccucuggagcaccaagcccgucgagacguccaacagcuucgacgugcugaaguccgaggacgcgcaggggauggacaaccuggccugcgaggaccucaagcccgugagcgaggaggucguggagaaccccaccauccagaaggacgugcuggagugcaacgucaagaccaccgagguggugggcgacaucauccugaagccggccaacaacucccucaagaucacggaggaggucgggcacaccgaccugauggccgccuacguggacaacagcucccugaccaucaagaagcccaacgagcucagccgcgugcugggccugaagacccucgcgacgcacgggcuggccgccgucaacuccgugcccugggacaccaucgccaacuacgccaagccguuccugaacaagguggucagcaccaccacgaacaucgugacccgcugccucaaccgggugugcaccaacuacaugcccuacuucuucacccugcugcuccagcugugcaccuucacgcgcuccaccaacagccggaucaaggcguccaugcccaccaccaucgccaagaacacggucaagagcgugggcaaguucugccuggaggccagcuucaacuaccucaagucccccaacuucagcaagcugaucaacaucaucaucugguuccugcuccuguccgugugccugggcagccucaucuacuccaccgccgcccuggggguccugaugagcaaccucggcaugccguccuacugcaccggguaccgcgagggcuaccugaacagcaccaacgugacgaucgcgaccuacugcaccggcuccauccccugcagcgugugccuguccgggcucgacagccuggacaccuaccccucccuggagacgauccagaucaccaucagcuccuucaagugggaccucaccgccuucggccuggucgccgagugguuccuggccuacauccucuucacccgguucuucuacgugcuggggcuggccgcgaucaugcagcucuucuucagcuacuucgccgugcacuucaucuccaacagcuggcugauguggcugaucaucaaccugguccagauggcccccaucuccgccauggugcgcauguacaucuucuucgcgagcuucuacuacguguggaagagcuacguccacgugguggacggcugcaacuccagcacgugcaugaugugcuacaagcggaaccgcgccacccgggucgagugcaccaccaucgugaacgggguccgccgguccuucuacguguacgccaacggcggcaagggguucugcaagcuccacaacuggaacugcgugaacugcgacacguucugcgccggcagcaccuucaucuccgacgaggucgcccgcgaccugagccugcaguucaagcggccgaucaaccccaccgaccaguccagcuacaucguggacuccgugaccgucaagaacgggagcauccaccucuacuucgacaaggcgggccagaagacguacgagcgccacucccugagccacuucgugaaccuggacaaccuccgggccaacaacaccaaggggucccugcccaucaacgugaucgucuucgacggcaagagcaagugcgaggaguccagcgccaaguccgccagcguguacuacucccagcugaugugccagcccauccuccugcuggaccaggcccucgugagcgacgucggcgacagcgcggagguggccgugaagauguucgacgccuacgucaacaccuucuccagcaccuucaacgugccgauggagaagcugaagacgcugguggccaccgccgaggcggagcucgccaagaacgucucccuggacaacgugcugagcaccuucaucuccgccgcccgccagggguucguggacagcgacgucgagaccaaggacgugguggagugccucaagcugucccaccagagcgacaucgaggucacgggcgacuccugcaacaacuacaugcugaccuacaacaagguggagaacaugaccccccgggaccucggggcgugcaucgacugcagcgcccgccacaucaacgcccagguggccaagucccacaacaucgcccugaucuggaacgucaaggacuucaugagccuguccgagcagcuccggaagcagauccgcagcgcggccaagaagaacaaccugcccuucaagcugaccugcgccacgacccgccagguggugaacgucgugaccaccaagaucgcccucaagggcggguga

SEQ ID NO: 17866 - RNA, 5841 nt, Artificial Sequence
  SARS-CoV-2__MT811365.1__non-structural protein 3 (NSP3) CDS gc
auggcccccaccaaggugaccuucggcgacgacacggucaucgaggugcagggguacaagagcgugaacaucaccuucgagcuggacgagcgcaucgacaagguccucaacgagaagugcuccgccuacaccguggagcugggcaccgaggugaacgaguucgcgugcgucguggccgacgccgugaucaagacgcugcagccggucagcgagcuccugaccccccuggggaucgaccucgacgagugguccauggccaccuacuaccuguucgacgagagcggcgaguucaagcuggccucccacauguacugcagcuucuacccccccgacgaggacgaggaggagggggacugcgaggaggaggaguucgagccguccacccaguacgaguacggcacggaggacgacuaccagggcaagccccucgaguucggggcgaccagcgccgcccugcagcccgaggaggagcaggaggaggacuggcuggacgacgacucccagcagaccgugggccagcaggacgggagcgaggacaaccagaccacgaccauccagaccaucguggagguccagccccagcucgagauggagcugaccccgguggugcagacgaucgaggucaacuccuucagcggcuaccugaagcucaccgacaacguguacaucaagaacgccgacaucguggaggaggcgaagaaggucaagcccaccgugguggucaacgccgccaacguguaccugaagcacgggggcggcguggccggggcccugaacaaggcgaccaacaacgccaugcaggucgaguccgacgacuacaucgccacgaacggcccccucaagguggggggcagcugcguccuguccggccacaaccuggccaagcacugccuccacgugguggggcccaacgucaacaagggcgaggacauccagcugcugaagagcgccuacgagaacuucaaccagcacgaggugcuccuggcgccgcugcucuccgccgggaucuucggcgccgaccccauccacagccugcgggugugcgucgacaccgugcgcaccaacguguaccuggccgucuucgacaagaaccucuacgacaagcugguguccagcuuccuggagaugaagagcgagaagcagguggagcagaagaucgccgagauccccaaggaggaggucaagcccuucaucaccgaguccaagccgagcguggagcagcggaagcaggacgacaagaagaucaaggcgugcguggaggaggucacgaccacccucgaggagaccaaguuccugacggagaaccugcuccuguacaucgacaucaacgggaaccugcaccccgacuccgccacccucgugagcgacaucgacaucaccuuccugaagaaggacgcccccuacaucgugggcgacgucgugcaggagggcgugcugaccgccgucgugauccccacgaagaaggccgggggcaccaccgagaugcucgcgaaggcccugcgcaaggugccgaccgacaacuacaucacgaccuaccccgggcagggccugaacggguacaccgucgaggaggccaagaccgugcucaagaagugcaaguccgccuucuacauccugcccagcaucaucuccaacgagaagcaggagauccugggcaccgugagcuggaaccuccgggagaugcuggcgcacgccgaggagacgcgcaagcugaugcccgucugcguggagaccaaggccaucguguccaccauccagcggaaguacaagggcaucaagauccaggagggggucguggacuacggcgcccgcuucuacuucuacaccagcaagacgaccguggccucccugaucaacacccucaacgaccugaacgagacccuggucacgaugccgcucggguacgugacccacggccugaaccuggaggaggcggcccgguacaugcgcagccucaaggugcccgccaccgucuccgugagcucccccgacgccgugaccgccuacaacggguaccugacgagcuccagcaagacccccgaggagcacuucaucgagaccaucucccuggcgggcagcuacaaggacuggagcuacuccggccagagcacccagcucgggaucgaguuccugaagcggggcgacaaguccgucuacuacacgagcaacccgaccaccuuccaccuggacggggaggugaucaccuucgacaaccucaagacgcugcugucccuccgcgaggugcggaccaucaaggucuucaccaccguggacaacaucaaccugcacacgcagguggucgacaugagcaugaccuacggccagcaguucggccccaccuaccuggacggggccgacgugaccaagaucaagccccacaacucccacgagggcaagacguucuacgugcucccgaacgacgacacccugcgcgucgaggccuucgaguacuaccacaccaccgaccccagcuuccuggggcgguacauguccgcccucaaccacacgaagaaguggaaguacccccaggugaacggccugaccagcaucaagugggccgacaacaacugcuaccuggcgaccgcccuccugacccugcagcagaucgagcucaaguucaaccccccggcccugcaggacgccuacuaccgcgcgcgggccggggaggccgccaacuucugcgcccugauccucgcguacugcaacaagacggugggcgagcugggcgacguccgcgagaccauguccuaccuguuccagcacgccaaccucgacagcugcaagcgggugcugaacgucgugugcaagaccugcgggcagcagcagaccacccugaagggcguggaggccgucauguacauggggacgcucuccuacgagcaguucaagaagggcgugcagauccccugcaccugcgggaagcaggccaccaaguaccuggugcagcaggagagccccuucgucaugauguccgcccccccggcgcaguacgagcugaagcacggcaccuucacgugcgccagcgaguacaccggcaacuaccagugcgggcacuacaagcacaucaccuccaaggagacccucuacugcaucgacggcgcccugcugacgaagagcagcgaguacaaggggcccaucaccgacguguucuacaaggagaacuccuacaccaccacgaucaagcccgugaccuacaagcucgacggcgucgugugcaccgagaucgaccccaagcuggacaacuacuacaagaaggacaacagcuacuucaccgagcagccgaucgaccuggugcccaaccagcccuaccccaacgccuccuucgacaacuucaaguucgucugcgacaacaucaaguucgccgacgaccucaaccagcugacgggguacaagaagccggcgagccgcgagcugaaggugaccuucuuccccgaccucaacggcgacguggucgccaucgacuacaagcacuacacccccuccuucaagaagggcgccaagcugcugcacaagcccaucguguggcacgugaacaacgccaccaacaaggcgacguacaagccgaacaccuggugcauccggugccucuggagcaccaagcccgucgagaccuccaacagcuucgacgugcugaaguccgaggacgcccaggggauggacaaccuggccugcgaggaccucaagcccgugagcgaggaggucguggagaaccccacgauccagaaggacgugcuggagugcaacgucaagaccaccgagguggugggcgacaucauccugaagccggccaacaacucccucaagaucaccgaggaggucgggcacacggaccugauggccgcguacguggacaacagcucccugaccaucaagaagcccaacgagcucagccgcgugcugggccugaagacccucgccacccacgggcuggccgccgucaacuccgugcccugggacacgaucgccaacuacgcgaagccguuccugaacaagguggucagcaccaccaccaacaucgugacgcgcugccucaaccgggugugcaccaacuacaugcccuacuucuucacccugcugcuccagcugugcaccuucauccgcuccaccaacagccggaucaaggccuccaugcccacgaccaucgccaagaacaccgucaagagcgugggcaaguucugccuggaggccagcuucaacuaccucaagucccccaacuucagcaagcugaucaacaucaucaucugguuccugcuccuguccgugugccugggcagccucaucuacuccaccgccgcgcuggggguccugaugagcaaccucggcaugccguccuacugcacgggguaccgcgagggcuaccugaacagcaccaacgugaccaucgccaccuacugcacgggcuccauccccugcagcgugugccuguccgggcucgacagccuggacaccuaccccucccuggagaccauccagaucaccaucagcuccuucaagugggaccucacggccuucggccuggucgccgagugguuccuggccuacauccucuucacccgguucuucuacgugcuggggcuggcggccaucaugcagcucuucuucagcuacuucgccgugcacuucaucuccaacagcuggcugauguggcugaucaucaaccugguccagauggcccccaucuccgcgauggugcgcauguacaucuucuucgccagcuucuacuacguguggaagagcuacguccacgugguggacggcugcaacuccagcaccugcaugaugugcuacaagcggaaccgcgccacccgggucgagugcacgaccaucgugaacgggguccgccgguccuucuacguguacgccaacggcggcaagggguucugcaagcuccacaacuggaacugcgugaacugcgacaccuucugcgccggcagcaccuucaucuccgacgaggucgcgcgcgaccugagccugcaguucaagcggccgaucaaccccacggaccaguccagcuacaucguggacuccgugaccgucaagaacgggagcauccaccucuacuucgacaaggccggccagaagaccuacgagcgccacucccugagccacuucgugaaccuggacaaccuccgggccaacaacaccaaggggucccugcccaucaacgugaucgucuucgacggcaagagcaagugcgaggaguccagcgccaaguccgccagcguguacuacucccagcugaugugccagcccauccuccugcuggaccaggcgcucgugagcgacgucggcgacagcgccgagguggccgugaagauguucgacgccuacgucaacacguucuccagcaccuucaacgugccgauggagaagcugaagacccugguggccaccgcggaggccgagcucgccaagaacgucucccuggacaacgugcugagcacguucaucuccgccgcgcgccagggguucguggacagcgacgucgagaccaaggacgugguggagugccucaagcugucccaccagagcgacaucgaggucaccggcgacuccugcaacaacuacaugcugaccuacaacaagguggagaacaugacgccccgggaccucggggccugcaucgacugcagcgcccgccacaucaacgcccagguggccaagucccacaacaucgcgcugaucuggaacgucaaggacuucaugagccuguccgagcagcuccggaagcagauccgcagcgccgccaagaagaacaaccugcccuucaagcugaccugcgccaccacccgccagguggugaacgucgugacgaccaagaucgcccucaagggcggguga

SEQ ID NO: 17867 - RNA, 5841 nt, Artificial Sequence
  SARS-CoV-2__MT811405.1__non-structural protein 3 (NSP3) CDS gc
auggcccccaccaaggugaccuucggcgacgacacggucaucgaggugcagggguacaagagcgugaacaucaccuucgagcuggacgagcgcaucgacaagguccucaacgagaagugcuccgccuacaccguggagcugggcaccgaggugaacgaguucgcgugcgucguggccgacgccgugaucaagacgcugcagccggucagcgagcuccugaccccccuggggaucgaccucgacgagugguccauggccaccuacuaccuguucgacgagagcggcgaguucaagcuggccucccacauguacugcagcuucuacccccccgacgaggacgaggaggagggggacugcgaggaggaggaguucgagccguccacccaguacgaguacggcacggaggacgacuaccagggcaagccccucgaguucggggcgaccagcgccgcccugcagcccgaggaggagcaggaggaggacuggcuggacgacgacucccagcagaccgugggccagcaggacgggagcgaggacaaccagaccacgaccauccagaccaucguggagguccagccccagcucgagauggagcugaccccgguggugcagacgaucgaggucaacuccuucagcggcuaccugaagcucaccgacaacguguacaucaagaacgccgacaucguggaggaggcgaagaaggucaagcccaccgugguggucaacgccgccaacguguaccugaagcacgggggcggcguggccggggcccugaacaaggcgaccaacaacgccaugcaggucgaguccgacgacuacaucgccacgaacggcccccucaagguggggggcagcugcguccuguccggccacaaccuggccaagcacugccuccacgugguggggcccaacgucaacaagggcgaggacauccagcugcugaagagcgccuacgagaacuucaaccagcacgaggugcuccuggcgccgcugcucuccgccgggaucuucggcgccgaccccauccacagccugcgggugugcgucgacaccgugcgcaccaacguguaccuggccgucuucgacaagaaccucuacgacaagcugguguccagcuuccuggagaugaagagcgagaagcagguggagcagaagaucgccgagauccccaaggaggaggucaagcccuucaucaccgaguccaagccgagcguggagcagcggaagcaggacgacaagaagaucaaggcgugcguggaggaggucacgaccacccucgaggagaccaaguuccugacggagaaccugcuccuguacaucgacaucaacgggaaccugcaccccgacuccgccacccucgugagcgacaucgacaucaccuuccugaagaaggacgcccccuacaucgugggcgacgucgugcaggagggcgugcugaccgccgucgugauccccacgaagaaggccgggggcaccaccgagaugcucgcgaaggcccugcgcaaggugccgaccgacaacuacaucacgaccuaccccgggcagggccugaacggguacaccgucgaggaggccaagaccgugcucaagaagugcaaguccgccuucuacauccugcccagcaucaucuccaacgagaagcaggagauccugggcaccgugagcuggaaccuccgggagaugcuggcgcacgccgaggagacgcgcaagcugaugcccgucugcguggagaccaaggccaucguguccaccauccagcggaaguacaagggcaucaagauccaggagggggucguggacuacggcgcccgcuucuacuucuacaccagcaagacgaccguggccucccugaucaacacccucaacgaccugaacgagacccuggucacgaugccgcucggguacgugacccacggccugaaccuggaggaggcggcccgguacaugcgcagccucaaggugcccgccaccgucuccgugagcucccccgacgccgugaccgccuacaacggguaccugacgagcuccagcaagacccccgaggagcacuucaucgagaccaucucccuggcgggcagcuacaaggacuggagcuacuccggccagagcacccagcucgggaucgaguuccugaagcggggcgacaaguccgucuacuacacgagcaacccgaccaccuuccaccuggacggggaggugaucaccuucgacaaccucaagacgcugcugucccuccgcgaggugcggaccaucaaggucuucaccaccguggacaacaucaaccugcacacgcagguggucgacaugagcaugaccuacggccagcaguucggccccaccuaccuggacggggccgacgugaccaagaucaagccccacaacucccacgagggcaagacguucuacgugcucccgaacgacgacacccugcgcgucgaggccuucgaguacuaccacaccaccgaccccagcuuccuggggcgguacauguccgcccucaaccacacgaagaaguggaaguacccccaggugaacggccugaccagcaucaagugggccgacaacaacugcuaccuggcgaccgcccuccugacccugcagcagaucgagcucaaguucaaccccccggcccugcaggacgccuacuaccgcgcgcgggccggggaggccgccaacuucugcgcccugauccucgcguacugcaacaagacggugggcgagcugggcgacguccgcgagaccauguccuaccuguuccagcacgccaaccucgacagcugcaagcgggugcugaacgucgugugcaagaccugcgggcagcagcagaccacccgcaagggcguggaggccgucauguacauggggacgcuguccuacgagcaguucaagaagggcgugcagauccccugcaccugcgggaagcaggccaccaaguaccucgugcagcaggagagccccuucgucaugauguccgcccccccggcgcaguacgagcugaagcacggcaccuucacgugcgccagcgaguacaccggcaacuaccagugcgggcacuacaagcacaucaccuccaaggagacccuguacugcaucgacggcgcccuccugacgaagagcagcgaguacaaggggcccaucaccgacguguucuacaaggagaacuccuacaccaccacgaucaagcccgugaccuacaagcuggacggcgucgugugcaccgagaucgaccccaagcucgacaacuacuacaagaaggacaacagcuacuucaccgagcagccgaucgaccuggugcccaaccagcccuaccccaacgccuccuucgacaacuucaaguucgucugcgacaacaucaaguucgccgacgaccugaaccagcucacgggguacaagaagccggcgagccgggagcugaaggugaccuucuuccccgaccugaacggcgacguggucgccaucgacuacaagcacuacacccccuccuucaagaagggcgccaagcuccugcacaagcccaucguguggcacgugaacaacgccaccaacaaggcgacguacaagccgaacaccuggugcauccgcugccuguggagcaccaagcccgucgagaccuccaacagcuucgacgugcucaaguccgaggacgcccaggggauggacaaccuggccugcgaggaccugaagcccgugagcgaggaggucguggagaaccccacgauccagaaggacgugcucgagugcaacgucaagaccaccgagguggugggcgacaucauccugaagccggccaacaacucccugaagaucaccgaggaggucgggcacacggaccucauggccgcguacguggacaacagcucccugaccaucaagaagcccaacgagcugagccgcgugcucggccugaagacccuggccacccacgggcucgccgccgucaacuccgugcccugggacacgaucgccaacuacgcgaagccguuccugaacaagguggucagcaccaccaccaacaucgugacgcggugccugaaccgcgugugcaccaacuacaugcccuacuucuucacccuccugcugcagcucugcaccuucacccgguccacgaacagccgcaucaaggccuccaugcccaccaccaucgccaagaacaccgucaagagcgugggcaaguucugccuggaggccagcuucaacuaccugaagucccccaacuucagcaagcucaucaacaucaucaucugguuccugcugcucuccgugugccugggcagccugaucuacuccacggccgcgcucgggguccugaugagcaaccugggcaugccguccuacugcaccggguaccgggagggcuaccucaacagcaccaacgugaccaucgccacguacugcaccggcuccauccccugcagcgugugccuguccgggcuggacagccucgacaccuaccccucccuggagaccauccagaucacgaucagcuccuucaagugggaccugaccgccuucggccucgucgccgagugguuccuggccuacauccuguucacccgcuucuucuacgugcucgggcuggcggccaucaugcagcuguucuucagcuacuucgccgugcacuucaucuccaacagcuggcucauguggcugaucaucaaccugguccagauggcccccaucuccgcgauggugcggauguacaucuucuucgccagcuucuacuacguguggaagagcuacguccacgugguggacggcugcaacuccagcaccugcaugaugugcuacaagcgcaaccgggccacgcgcgucgagugcaccaccaucgugaacgggguccggcgcuccuucuacguguacgccaacggcggcaagggguucugcaagcugcacaacuggaacugcgugaacugcgacaccuucugcgccggcagcacguucaucuccgacgaggucgcgcgggaccucagccugcaguucaagcgcccgaucaaccccaccgaccaguccagcuacaucguggacuccgugaccgucaagaacgggagcauccaccuguacuucgacaaggccggccagaagaccuacgagcggcacucccucagccacuucgugaaccuggacaaccugcgcgccaacaacacgaaggggucccuccccaucaacgugaucgucuucgacggcaagagcaagugcgaggaguccagcgccaaguccgccagcguguacuacucccagcugaugugccagcccauccugcuccuggaccaggcgcuggugagcgacgucggcgacagcgccgagguggccgugaagauguucgacgccuacgucaacaccuucuccagcaccuucaacgugccgauggagaagcucaagacccugguggccacggcggaggccgagcuggccaagaacgucucccucgacaacgugcugagcaccuucaucuccgccgcgcggcagggguucguggacagcgacgucgagaccaaggacgugguggagugccugaagcucucccaccagagcgacaucgaggucaccggcgacuccugcaacaacuacaugcugacguacaacaagguggagaacaugaccccccgcgaccugggggccugcaucgacugcagcgcccggcacaucaacgcccagguggccaagucccacaacaucgcgcucaucuggaacgucaaggacuucaugagccuguccgagcagcugcgcaagcagauccgcagcgccgccaagaagaacaaccuccccuucaagcugaccugcgccaccacgcggcagguggugaacgucgugaccaccaagaucgcccugaagggcggguga

SEQ ID NO: 17868 - RNA, 5841 nt, Artificial Sequence
  SARS-CoV-2__MT811407.1__non-structural protein 3 (NSP3) CDS gc
auggcccccaccaaggugaccuucggcgacgacacggucaucgaggugcagggguacaagagcgugaacaucaccuucgagcuggacgagcgcaucgacaagguccucaacgagaagugcuccgccuacaccguggagcugggcaccgaggugaacgaguucgcgugcgucguggccgacgccgugaucaagacgcugcagccggucagcgagcuccugaccccccuggggaucgaccucgacgagugguccauggccaccuacuaccuguucgacgagagcggcgaguucaagcuggccucccacauguacugcagcuucuacccccccgacgaggacgaggaggagggggacugcgaggaggaggaguucgagccguccacccaguacgaguacggcacggaggacgacuaccagggcaagccccucgaguucggggcgaccagcgccgcccugcagcccgaggaggagcaggaggaggacuggcuggacgacgacucccagcagaccgugggccagcaggacgggagcgaggacaaccagaccacgaccauccagaccaucguggagguccagccccagcucgagauggagcugaccccgguggugcagacgaucgaggucaacuccuucagcggcuaccugaagcucaccgacaacguguacaucaagaacgccgacaucguggaggaggcgaagaaggucaagcccaccgugguggucaacgccgccaacguguaccugaagcacgggggcggcguggccggggcccugaacaaggcgaccaacaacgccaugcaggucgaguccgacgacuacaucgccacgaacggcccccucaagguggggggcagcugcguccuguccggccacaaccuggccaagcacugccuccacgugguggggcccaacgucaacaagggcgaggacauccagcugcugaagagcgccuacgagaacuucaaccagcacgaggugcuccuggcgccgcugcucuccgccgggaucuucggcgccgaccccauccacagccugcgggugugcgucgacaccgugcgcaccaacguguaccuggccgucuucgacaagaaccucuacgacaagcugguguccagcuuccuggagaugaagagcgagaagcagguggagcagaagaucgccgagauccccaaggaggaggucaagcccuucaucaccgaguccaagccgagcguggagcagcggaagcaggacgacaagaagaucaaggcgugcguggaggaggucacgaccacccucgaggagaccaaguuccugacggagaaccugcuccuguacaucgacaucaacgggaaccugcaccccgacuccgccacccucgugagcgacaucgacaucaccuuccugaagaaggacgcccccuacaucgugggcgacgucgugcaggagggcgugcugaccgccgucgugauccccacgaagaaggccgggggcaccaccgagaugcucgcgaaggcccugcgcaaggugccgaccgacaacuacaucacgaccuaccccgggcagggccugaacggguacaccgucgaggaggccaagaccgugcucaagaagugcaaguccgccuucuacauccugcccagcaucaucuccaacgagaagcaggagauccugggcaccgugagcuggaaccuccgggagaugcuggcgcacgccgaggagacgcgcaagcugaugcccgucugcguggagaccaaggccaucguguccaccauccagcggaaguacaagggcaucaagauccaggagggggucguggacuacggcgcccgcuucuacuucuacaccagcaagacgaccguggccucccugaucaacacccucaacgaccugaacgagacccuggucacgaugccgcucggguacgugacccacggccugaaccuggaggaggcggcccgguacaugcgcagccucaaggugcccgccaccgucuccgugagcucccccgacgccgugaccgccuacaacggguaccugacgagcuccagcaagacccccgaggagcacuucaucgagaccaucucccuggcgggcagcuacaaggacuggagcuacuccggccagagcacccagcucgggaucgaguuccugaagcggggcgacaaguccgucuacuacacgagcaacccgaccaccuuccaccuggacggggaggugaucaccuucgacaaccucaagacgcugcugucccuccgcgaggugcggaccaucaaggucuucaccaccguggacaacaucaaccugcacacgcagguggucgacaugagcaugaccuacggccagcaguucggccccaccuaccuggacggggccgacgugaccaagaucaagccccacaacucccacgagggcaagacguucuacgugcucccgaacgacgacacccugcgcgucgaggccuucgaguacuaccacaccaccgaccccagcuuccuggggcgguacauguccgcccucaaccacacgaagaaguggaaguacccccaggugaacggccugaccagcaucaagugggccgacaacaacugcuaccuggcgaccgcccuccugacccugcagcagaucgagcucaaguucaaccccccggcccugcaggacgccuacuaccgcgcgcgggccggggaggccgccaacuucugcgcccugauccucgcguacugcaacaagacggugggcgagcugggcgacguccgcgagaccauguccuaccuguuccagcacgccaaccucgacagcugcaagcgggugcugaacgucgugugcaagaccugcgggcagcagcagaccacccugaagggcguggaggccgucauguacauggggacgcucuccuacgagcaguucaagaagggcgugcagauccccugcaccugcgggaagcaggccaccaaguaccuggugcagcaggagagccccuucgucaugauguccgcccccccggcgcaguacgagcugaagcacggcaccuucacgugcgccagcgaguacaccggcaacuaccagugcgggcacuacaagcacaucaccuccaaggagacccucuacugcaucgacggcgcccugcugacgaagagcagcgaguacaaggggcccaucaccgacguguucuacaaggagaacuccuacaccaccacgaucaagcccgugaccuacaagcucgacggcgucgugugcaccgagaucgaccccaagcuggacaacuacuacaagaaggacaacagcuacuucaccgagcagccgaucgaccuggugcccaaccagcccuaccccaacgccuccagcgacaacuucaaguucgucugcgacaacaucaaguucgccgacgaccucaaccagcugacgggguacaagaagccggcgucccgcgagcugaaggugaccuucuuccccgaccucaacggcgacguggucgccaucgacuacaagcacuacacccccagcuucaagaagggcgccaagcugcugcacaagcccaucguguggcacgugaacaacgccaccaacaaggcgacguacaagccgaacaccuggugcauccggugccucugguccaccaagcccgucgagaccagcaacuccuucgacgugcugaagagcgaggacgcccaggggauggacaaccuggccugcgaggaccucaagcccguguccgaggaggucguggagaaccccacgauccagaaggacgugcuggagugcaacgucaagaccaccgagguggugggcgacaucauccugaagccggccaacaacagccucaagaucaccgaggaggucgggcacacggaccugauggccgcguacguggacaacuccagccugaccaucaagaagcccaacgagcucucccgcgugcugggccugaagacccucgccacccacgggcuggccgccgucaacagcgugcccugggacacgaucgccaacuacgcgaagccguuccugaacaagguggucuccaccaccaccaacaucgugacgcgcugccucaaccgggugugcaccaacuacaugcccuacuucuucacccugcugcuccagcugugcaccuucacccgcagcacgaacucccggaucaaggccagcaugcccaccaccaucgccaagaacaccgucaagagcgugggcaaguucugccuggaggccuccuucaacuaccucaagagccccaacuucuccaagcugaucaacaucaucaucugguuccugcuccugagcgugugccugggcucccucaucuacagcacggccgcgcuggggguccugauguccaaccucggcaugccgagcuacugcaccggguaccgcgagggcuaccugaacuccaccaacgugaccaucgccacguacugcaccggcagcauccccugcuccgugugccugagcgggcucgacucccuggacaccuaccccagccuggagaccauccagaucacgaucuccagcuucaagugggaccucaccgccuucggccuggucgccgagugguuccuggccuacauccucuucacccgguucuucuacgugcuggggcuggcggccaucaugcagcucuucuucuccuacuucgccgugcacuucaucagcaacuccuggcugauguggcugaucaucaaccugguccagauggcccccaucagcgcgauggugcgcauguacaucuucuucgccagcuucuacuacguguggaaguccuacguccacgugguggacggcugcaacagcuccaccugcaugaugugcuacaagcggaaccgcgccacgcgggucgagugcaccaccaucgugaacgggguccgccggagcuucuacguguacgccaacggcggcaagggguucugcaagcuccacaacuggaacugcgugaacugcgacaccuucugcgccggcuccacguucaucagcgacgaggucgcgcgcgaccugucccugcaguucaagcggccgaucaaccccaccgaccagagcuccuacaucguggacagcgugaccgucaagaacggguccauccaccucuacuucgacaaggccggccagaagaccuacgagcgccacagccugucccacuucgugaaccuggacaaccuccgggccaacaacacgaaggggagccugcccaucaacgugaucgucuucgacggcaaguccaagugcgaggagagcuccgccaagagcgccuccguguacuacagccagcugaugugccagcccauccuccugcuggaccaggcgcucgugagcgacgucggcgacuccgccgagguggccgugaagauguucgacgccuacgucaacaccuucagcuccaccuucaacgugccgauggagaagcugaagacccugguggccacggcggaggccgagcucgccaagaacgucagccuggacaacgugcuguccaccuucaucagcgccgcgcgccagggguucguggacuccgacgucgagaccaaggacgugguggagugccucaagcugagccaccaguccgacaucgaggucaccggcgacagcugcaacaacuacaugcugacguacaacaagguggagaacaugaccccccgggaccucggggccugcaucgacugcuccgcccgccacaucaacgcccagguggccaagagccacaacaucgcgcugaucuggaacgucaaggacuucaugucccugagcgagcagcuccggaagcagauccgcuccgccgccaagaagaacaaccugcccuucaagcugaccugcgccaccacgcgccagguggugaacgucgugaccaccaagaucgcccucaagggcggguga

SEQ ID NO: 17869 - RNA, 5841 nt, Artificial Sequence
  SARS-CoV-2__MT811483.1__non-structural protein 3 (NSP3) CDS gc
auggcccccaccaaggugaccuucggcgacgacacggucaucgaggugcagggguacaagagcgugaacaucaccuucgagcuggacgagcgcaucgacaagguccucaacgagaagugcuccgccuacaccguggagcugggcaccgaggugaacgaguucgcgugcgucguggccgacgccgugaucaagacgcugcagccggucagcgagcuccugaccccccuggggaucgaccucgacgagugguccauggccaccuacuaccuguucgacgagagcggcgaguucaagcuggccucccacauguacugcagcuucuacccccccgacgaggacgaggaggagggggacugcgaggaggaggaguucgagccguccacccaguacgaguacggcacggaggacgacuaccagggcaagccccucgaguucggggcgaccagcgccgcccugcagcccgaggaggagcaggaggaggacuggcuggacgacgacucccagcagaccgugggccagcaggacgggagcgaggacaaccagaccacgaccauccagaccaucguggagguccagccccagcucgagauggagcugaccccgguggugcagacgaucgaggucaacuccuucagcggcuaccugaagcucaccgacaacguguacaucaagaacgccgacaucguggaggaggcgaagaaggucaagcccaccgugguggucaacgccgccaacguguaccugaagcacgggggcggcguggccggggcccugaacaaggcgaccaacaacgccaugcaggucgaguccgacgacuacaucgccacgaacggcccccucaagguggggggcagcugcguccuguccggccacaaccuggccaagcacugccuccacgugguggggcccaacgucaacaagggcgaggacauccagcugcugaagagcgccuacgagaacuucaaccagcacgaggugcuccuggcgccgcugcucuccgccgggaucuucggcgccgaccccauccacagccugcgggugugcgucgacaccgugcgcaccaacguguaccuggccgucuucgacaagaaccucuacgacaagcugguguccagcuuccuggagaugaagagcgagaagcagguggagcagaagaucgccgagauccccaaggaggaggucaagcccuucaucaccgaguccaagccgagcguggagcagcggaagcaggacgacaagaagaucaaggcgugcguggaggaggucacgaccacccucgaggagaccaaguuccugacggagaaccugcuccuguacaucgacaucaacgggaaccugcaccccgacuccgccacccucgugagcgacaucgacaucaccuuccugaagaaggacgcccccuacaucgugggcgacgucgugcaggagggcgugcugaccgccgucgugauccccacgaagaaggccgggggcaccaccgagaugcucgcgaaggcccugcgcaaggugccgaccgacaacuacaucacgaccuaccccgggcagggccugaacggguacaccgucgaggaggccaagaccgugcucaagaagugcaaguccgccuucuacauccugcccagcaucaucuccaacgagaagcaggagauccugggcaccgugagcuggaaccuccgggagaugcuggcgcacgccgaggagacgcgcaagcugaugcccgucugcguggagaccaaggccaucguguccaccauccagcggaaguacaagggcaucaagauccaggagggggucguggacuacggcgcccgcuucuacuucuacaccagcaagacgaccguggccucccugaucaacacccucaacgaccugaacgagacccuggucacgaugccgcucggguacgugacccacggccugaaccuggaggaggcggcccgguacaugcgcagccucaaggugcccgccaccgucuccgugagcucccccgacgccgugaccgccuacaacggguaccugacgagcuccagcaagacccccgaggagcacuucaucgagaccaucucccuggcgggcagcuacaaggacuggagcuacuccggccagagcacccagcucgggaucgaguuccugaagcggggcgacaaguccgucuacuacacgagcaacccgaccaccuuccaccuggacggggaggugaucaccuucuacaaccucaagacgcugcugucccuccgcgaggugcggaccaucaaggucuucaccaccguggacaacaucaaccugcacacgcagguggucgacaugagcaugaccuacggccagcaguucggccccaccuaccuggacggggccgacgugaccaagaucaagccccacaacucccacgagggcaagacguucuacgugcucccgaacgacgacacccugcgcgucgaggccuucgaguacuaccacaccaccgaccccagcuuccuggggcgguacauguccgcccucaaccacacgaagaaguggaaguacccccaggugaacggccugaccagcaucaagugggccgacaacaacugcuaccuggcgaccgcccuccugacccugcagcagaucgagcucaaguucaaccccccggcccugcaggacgccuacuaccgcgcgcgggccggggaggccgccaacuucugcgcccugauccucgcguacugcaacaagacggugggcgagcugggcgacguccgcgagaccauguccuaccuguuccagcacgccaaccucgacagcugcaagcgggugcugaacgucgugugcaagaccugcgggcagcagcagaccacccugaagggcguggaggccgucauguacauggggacgcucuccuacgagcaguucaagaagggcgugcagauccccugcaccugcgggaagcaggccaccaaguaccuggugcagcaggagagccccuucgucaugauguccgcccccccggcgcaguacgagcugaagcacggcaccuucacgugcgccagcgaguacaccggcaacuaccagugcgggcacuacaagcacaucaccuccaaggagacccucuacugcaucgacggcgcccugcugacgaagagcagcgaguacaaggggcccaucaccgacguguucuacaaggagaacuccuacaccaccacgaucaagcccgugaccuacaagcucgacggcgucgugugcaccgagaucgaccccaagcuggacaacuacuacaagaaggacaacagcuacuucaccgagcagccgaucgaccuggugcccaaccagcccuaccccaacgccuccuucgacaacuucaaguucgucugcgacaacaucaaguucgccgacgaccucaaccagcugacgggguacaagaagccggcgagccgcgagcugaaggugaccuucuuccccgaccucaacggcgacguggucgccaucgacuacaagcacuacacccccuccuucaagaagggcgccaagcugcugcacaagcccaucguguggcacgugaacaacgccaccaacaaggcgacguacaagccgaacaccuggugcauccggugccucuggagcaccaagcccgucgagaccuccaacagcuucgacgugcugaaguccgaggacgcccaggggauggacaaccuggccugcgaggaccucaagcccgugagcgaggaggucguggagaaccccacgauccagaaggacgugcuggagugcaacgucaagaccaccgagguggugggcgacaucauccugaagccggccaacaacucccucaagaucaccgaggaggucgggcacacggaccugauggccgcguacguggacaacagcucccugaccaucaagaagcccaacgagcucagccgcgugcugggccugaagacccucgccacccacgggcuggccgccgucaacuccgugcccugggacacgaucgccaacuacgcgaagccguuccugaacaagguggucagcaccaccaccaacaucgugacgcgcugccucaaccgggugugcaccaacuacaugcccuacuucuucacccugcugcuccagcugugcaccuucacccgcuccacgaacagccggaucaaggccuccaugcccaccaccaucgccaagaacaccgucaagagcgugggcaaguucugccuggaggccagcuucaacuaccucaagucccccaacuucagcaagcugaucaacaucaucaucugguuccugcuccuguccgugugccugggcagccucaucuacuccacggccgcgcuggggguccugaugagcaaccucggcaugccguccuacugcaccggguaccgcgagggcuaccugaacagcaccaacgugaccaucgccacguacugcaccggcuccauccccugcagcgugugccuguccgggcucgacagccuggacaccuaccccucccuggagaccauccagaucacgaucagcuccuucaagugggaccucaccgccuucggccuggucgccgagugguuccuggccuacauccucuucacccgguucuucuacgugcuggggcuggcggccaucaugcagcucuucuucagcuacuucgccgugcacuucaucuccaacagcuggcugauguggcugaucaucaaccugguccagauggcccccaucuccgcgauggugcgcauguacaucuucuucgccagcuucuacuacguguggaagagcuacguccacgugguggacggcugcaacuccagcaccugcaugaugugcuacaagcggaaccgcgccacgcgggucgagugcaccaccaucgugaacgggguccgccgguccuucuacguguacgccaacggcggcaagggguucugcaagcuccacaacuggaacugcgugaacugcgacaccuucugcgccggcagcacguucaucuccgacgaggucgcgcgcgaccugagccugcaguucaagcggccgaucaaccccaccgaccaguccagcuacaucguggacuccgugaccgucaagaacgggagcauccaccucuacuucgacaaggccggccagaagaccuacgagcgccacucccugagccacuucgugaaccuggacaaccuccgggccaacaacacgaaggggucccugcccaucaacgugaucgucuucgacggcaagagcaagugcgaggaguccagcgccaaguccgccagcguguacuacucccagcugaugugccagcccauccuccugcuggaccaggcgcucgugagcgacgucggcgacagcgccgagguggccgugaagauguucgacgccuacgucaacaccuucuccagcaccuucaacgugccgauggagaagcugaagacccugguggccacggcggaggccgagcucgccaagaacgucucccuggacaacgugcugagcaccuucaucuccgccgcgcgccagggguucguggacagcgacgucgagaccaaggacgugguggagugccucaagcugucccaccagagcgacaucgaggucaccggcgacuccugcaacaacuacaugcugacguacaacaagguggagaacaugaccccccgggaccucggggccugcaucgacugcagcgcccgccacaucaacgcccagguggccaagucccacaacaucgcgcugaucuggaacgucaaggacuucaugagccuguccgagcagcuccggaagcagauccgcagcgccgccaagaagaacaaccugcccuucaagcugaccugcgccaccacgcgccagguggugaacgucgugaccaccaagaucgcccucaagggcggguga

SEQ ID NO: 17870 - RNA, 5841 nt, Artificial Sequence
  SARS-CoV-2__MT811485.1__non-structural protein 3 (NSP3) CDS gc
auggcccccaccaaggugaccuucggcgacgacacggucaucgaggugcagggguacaagagcgugaacaucaccuucgagcuggacgagcgcaucgacaagguccucaacgagaagugcuccgccuacaccguggagcugggcaccgaggugaacgaguucgcgugcgucguggccgacgccgugaucaagacgcugcagccggucagcgagcuccugaccccccuggggaucgaccucgacgagugguccauggccaccuacuaccuguucgacgagagcggcgaguucaagcuggccucccacauguacugcagcuucuacccccccgacgaggacgaggaggagggggacugcgaggaggaggaguucgagccguccacccaguacgaguacggcacggaggacgacuaccagggcaagccccucgaguucggggcgaccagcgccgcccugcagcccgaggaggagcaggaggaggacuggcuggacgacgacucccagcagaccgugggccagcaggacgggagcgaggacaaccagaccacgaccauccagaccaucguggagguccagccccagcucgagauggagcugaccccgguggugcagacgaucgaggucaacuccuucagcggcuaccugaagcucaccgacaacguguacaucaagaacgccgacaucguggaggaggcgaagaaggucaagcccaccgugguggucaacgccgccaacguguaccugaagcacgggggcggcguggccggggcccugaacaaggcgaccaacaacgccaugcaggucgaguccgacgacuacaucgccacgaacggcccccucaagguggggggcagcugcguccuguccggccacaaccuggccaagcacugccuccacgugguggggcccaacgucaacaagggcgaggacauccagcugcugaagagcgccuacgagaacuucaaccagcacgaggugcuccuggcgccgcugcucuccgccgggaucuucggcgccgaccccauccacagccugcgggugugcgucgacaccgugcgcaccaacguguaccuggccgucuucgacaagaaccucuacgacaagcugguguccagcuuccuggagaugaagagcgagaagcagguggagcagaagaucgccgagauccccaaggaggaggucaagcccuucaucaccgaguccaagccgagcguggagcagcggaagcaggacgacaagaagaucaaggcgugcguggaggaggucacgaccacccucgaggagaccaaguuccugacggagaaccugcuccuguacaucgacaucaacgggaaccugcaccccgacuccgccacccucgugagcgacaucgacaucaccuuccugaagaaggacgcccccuacaucgugggcgacgucgugcaggagggcgugcugaccgccgucgugauccccacgaagaaggccgggggcaccaccgagaugcucgcgaaggcccugcgcaaggugccgaccgacaacuacaucacgaccuaccccgggcagggccugaacggguacaccgucgaggaggccaagaccgugcucaagaagugcaaguccgccuucuacauccugcccagcaucaucuccaacgagaagcaggagauccugggcaccgugagcuggaaccuccgggagaugcuggcgcacgccgaggagacgcgcaagcugaugcccgucugcguggagaccaaggccaucguguccaccauccagcggaaguacaagggcaucaagauccaggagggggucguggacuacggcgcccgcuucuacuucuacaccagcaagacgaccguggccucccugaucaacacccucaacgaccugaacgagacccuggucacgaugccgcucggguacgugacccacggccugaaccuggaggaggcggcccgguacaugcgcagccucaaggugcccgccaccgucuccgugagcucccccgacgccgugaccgccuacaacggguaccugacgagcuccagcaagacccccgaggagcacuucaucgagaccaucucccuggcgggcagcuacaaggacuggagcuacuccggccagagcacccagcucgggaucgaguuccugaagcggggcgacaaguccgucuacuacacgagcaacccgaccaccuuccaccuggacggggaggugaucaccuucgacaaccucaagacgcugcugucccuccgcgaggugcggaccaucaaggucuucaccaccguggacaacaucaaccugcacacgcagguggucgacaugagcaugaccuacggccagcaguucggccccaccuaccuggacggggccgacgugaccaagaucaagccccacaacucccacgagggcaagacguucuacgugcucccgaacgacgacacccugcgcgucgaggccuucgaguacuaccacaccaccgaccccagcuuccuggggcgguacauguccgcccucaaccacacgaagaaguggaaguacccccaggugaacggccugaccagcaucaagugggccgacaacaacugcuaccuggcgaccgcccuccugacccugcagcagaucgagcucaaguucaaccccccggcccugcaggacgccuacuaccgcgcgcgggccggggaggccgccaacuucugcgcccugauccucgcguacugcaacaagacggugggcgagcugggcgacguccgcgagaccauguccuaccuguuccagcacgccaaccucgacagcugcaagcgggugcugaacgucgugugcaagaccugcgggcagcagcagaccacccugaagggcguggaggccgucauguacauggggacgcucuccuacgagcaguucaagaagggcgugcagauccccugcaccugcgggaagcaggccaccaaguaccuggugcagcaggagagccccuucgucaugauguccgcccccccggcgcaguacgagcugaagcacggcaccuucacgugcgccagcgaguacaccggcaacuaccagugcgggcacuacaagcacaucaccuccaaggagacccucuacugcaucgacggcgcccugcugacgaagagcagcgaguacaaggggcccaucaccgacguguucuacaaggagaacuccuacaccaccacgaucaagcccgugaccuacaagcucgacggcgucgugugcaccgagaucgaccccaagcuggacaacuacuacaagaaggacaacagcuacuucaccgagcagccgaucgaccuggugcccaaccagcccuaccccaacgccuccuucgacaacuucaaguucgucugcgacaacaucaaguucgccgacgaccucaaccagcugacgggguacaagaagccggcgagccgcgagcugaaggugaccuucuuccccgaccucaacggcgacguggucgccaucgacuacaagcacuacacccccuccuucaagaagggcgccaagcugcugcacaagcccaucguguggcacgugaacaacgccaccaacaaggcgacguacaagccgaacaccuggugcauccggugccucuggagcaccaagcccgucgagaccuccaacagcuucgacgugcugaaguccgaggacgcccaggggauggacaaccuggccugcgaggaccucaagcccgugagcgaggaggucgugaagaaccccacgauccagaaggacgugcuggagugcaacgucaagaccaccgagguggugggcgacaucauccugaagccggccaacaacucccucaagaucaccgaggaggucgggcacacggaccugauggccgcguacguggacaacagcucccugaccaucaagaagcccaacgagcucagccgcgugcugggccugaagacccucgccacccacgggcuggccgccgucaacuccgugcccugggacacgaucgccaacuacgcgaagccguuccugaacaagguggucagcaccaccaccaacaucgugacgcgcugccucaaccgggugugcaccaacuacaugcccuacuucuucacccugcugcuccagcugugcaccuucacccgcuccacgaacagccggaucaaggccuccaugcccaccaccaucgccaagaacaccgucaagagcgugggcaaguucugccuggaggccagcuucaacuaccucaagucccccaacuucagcaagcugaucaacaucaucaucugguuccugcuccuguccgugugccugggcagccucaucuacuccacggccgcgcuggggguccugaugagcaaccucggcaugccguccuacugcaccggguaccgcgagggcuaccugaacagcaccaacgugaccaucgccacguacugcaccggcuccauccccugcagcgugugccuguccgggcucgacagccuggacaccuaccccucccuggagaccauccagaucacgaucagcuccuucaagugggaccucaccgccuucggccuggucgccgagugguuccuggccuacauccucuucacccgguucuucuacgugcuggggcuggcggccaucaugcagcucuucuucagcuacuucgccgugcacuucaucuccaacagcuggcugauguggcugaucaucaaccugguccagauggcccccaucuccgcgauggugcgcauguacaucuucuucgccagcuucuacuacguguggaagagcuacguccacgugguggacggcugcaacuccagcaccugcaugaugugcuacaagcggaaccgcgccacgcgggucgagugcaccaccaucgugaacgggguccgccgguccuucuacguguacgccaacggcggcaagggguucugcaagcuccacaacuggaacugcgugaacugcgacaccuucugcgccggcagcacguucaucuccgacgaggucgcgcgcgaccugagccugcaguucaagcggccgaucaaccccaccgaccaguccagcuacaucguggacuccgugaccgucaagaacgggagcauccaccucuacuucgacaaggccggccagaagaccuacgagcgccacucccugagccacuucgugaaccuggacaaccuccgggccaacaacacgaaggggucccugcccaucaacgugaucgucuucgacggcaagagcaagugcgaggaguccagcgccaaguccgccagcguguacuacucccagcugaugugccagcccauccuccugcuggaccaggcgcucgugagcgacgucggcgacagcgccgagguggccgugaagauguucgacgccuacgucaacaccuucuccagcaccuucaacgugccgauggagaagcugaagacccugguggccacggcggaggccgagcucgccaagaacgucucccuggacaacgugcugagcaccuucaucuccgccgcgcgccagggguucguggacagcgacgucgagaccaaggacgugguggagugccucaagcugucccaccagagcgacaucgaggucaccggcgacuccugcaacaacuacaugcugacguacaacaagguggagaacaugaccccccgggaccucggggccugcaucgacugcagcgcccgccacaucaacgcccagguggccaagucccacaacaucgcgcugaucuggaacgucaaggacuucaugagccuguccgagcagcuccggaagcagauccgcagcgccgccaagaagaacaaccugcccuucaagcugaccugcgccaccacgcgccagguggugaacgucgugaccaccaagaucgcccucaagggcggguga

SEQ ID NO: 17871 - RNA, 5841 nt, Artificial Sequence
  SARS-CoV-2__MT811487.1__non-structural protein 3 (NSP3) CDS gc
auggcccccaccaaggugaccuucggcgacgacacggucaucgaggugcagggguacaagagcgugaacaucaccuucgagcuggacgagcgcaucgacaagguccucaacgagaagugcuccgccuacaccguggagcugggcaccgaggugaacgaguucgcgugcgucguggccgacgccgugaucaagacgcugcagccggucagcgagcuccugaccccccuggggaucgaccucgacgagugguccauggccaccuacuaccuguucgacgagagcggcgaguucaagcuggccucccacauguacugcagcuucuacccccccgacgaggacgaggaggagggggacugcgaggaggaggaguucgagccguccacccaguacgaguacggcacggaggacgacuaccagggcaagcccagcgaguucggggcgaccuccgccgcccuccagcccgaggaggagcaggaggaggacuggcuggacgacgacagccagcagaccgugggccagcaggacggguccgaggacaaccagaccacgaccauccagaccaucguggagguccagccccagcuggagauggagcucaccccgguggugcagacgaucgaggucaacagcuucuccggcuaccugaagcugaccgacaacguguacaucaagaacgccgacaucguggaggaggcgaagaaggucaagcccaccgugguggucaacgccgccaacguguaccucaagcacgggggcggcguggccggggcccugaacaaggcgaccaacaacgccaugcaggucgagagcgacgacuacaucgccacgaacggcccccugaagguggggggcuccugcguccucagcggccacaaccuggccaagcacugccugcacgugguggggcccaacgucaacaagggcgaggacauccagcuccugaaguccgccuacgagaacuucaaccagcacgaggugcugcucgcgccgcugcugagcgccgggaucuucggcgccgaccccauccacucccuccgggugugcgucgacaccgugcgcaccaacguguaccuggccgucuucgacaagaaccuguacgacaagcucgugagcagcuuccuggagaugaaguccgagaagcagguggagcagaagaucgccgagauccccaaggaggaggucaagcccuucaucaccgagagcaagccguccguggagcagcggaagcaggacgacaagaagaucaaggcgugcguggaggaggucacgaccacccuggaggagaccaaguuccucacggagaaccugcugcucuacaucgacaucaacgggaaccugcaccccgacagcgccacccugguguccgacaucgacaucaccuuccucaagaaggacgcccccuacaucgugggcgacgucgugcaggagggcgugcugaccgccgucgugauccccacgaagaaggccgggggcaccaccgagaugcuggcgaaggcccuccgcaaggugccgaccgacaacuacaucacgaccuaccccgggcagggccugaacggguacaccgucgaggaggccaagaccgugcugaagaagugcaagagcgccuucuacauccuccccuccaucaucagcaacgagaagcaggagauccugggcaccguguccuggaaccugcgggagaugcucgcgcacgccgaggagacgcgcaagcugaugcccgucugcguggagaccaaggccaucgugagcaccauccagcggaaguacaagggcaucaagauccaggagggggucguggacuacggcgcccgcuucuacuucuacaccuccaagacgaccguggccagccugaucaacacccugaacgaccucaacgagacccuggucacgaugccgcugggguacgugacccacggccucaaccuggaggaggcggcccgguacaugcgcucccugaaggugcccgccaccgucagcguguccagccccgacgccgugaccgccuacaacggguaccucacguccagcuccaagacccccgaggagcacuucaucgagaccaucagccuggcgggcagcuacaaggacugguccuacagcggccaguccacccagcuggggaucgaguuccucaagcggggcgacaagagcgucuacuacacguccaacccgaccaccuuccaccuggacggggaggugaucaccuucgacaaccugaagacgcuccugagccugcgcgaggugcggaccaucaaggucuucaccaccguggacaacaucaaccuccacacgcagguggucgacauguccaugaccuacggccagcaguucggccccaccuaccuggacggggccgacgugaccaagaucaagccccacaacagccacgagggcaagacguucuacgugcugccgaacgacgacacccuccgcgucgaggccuucgaguacuaccacaccaccgaccccuccuuccuggggcgguacaugagcgcccugaaccacacgaagaaguggaaguacccccaggugaacggccucaccuccaucaagugggccgacaacaacugcuaccuggcgaccgcccugcucacccugcagcagaucgagcugaaguucaaccccccggcccuccaggacgccuacuaccgcgcgcgggccggggaggccgccaacuucugcgcccugauccuggcguacugcaacaagacggugggcgagcucggcgacguccgcgagaccaugagcuaccuguuccagcacgccaaccuggacuccugcaagcgggugcucaacgucgugugcaagaccugcgggcagcagcagaccacccugaagggcguggaggccgucauguacauggggacgcugagcuacgagcaguucaagaagggcgugcagauccccugcaccugcgggaagcaggccaccaaguaccucgugcagcaggagucccccuucgucaugaugagcgcccccccggcgcaguacgagcugaagcacggcaccuucacgugcgccuccgaguacaccggcaacuaccagugcgggcacuacaagcacaucaccagcaaggagacccuguacugcaucgacggcgcccuccugacgaagagcuccgaguacaaggggcccaucaccgacguguucuacaaggagaacagcuacaccaccacgaucaagcccgugaccuacaagcuggacggcgucgugugcaccgagaucgaccccaagcucgacaacuacuacaagaaggacaacuccuacuucaccgagcagccgaucgaccuggugcccaaccagcccuaccccaacgccagcuucgacaacuucaaguucgucugcgacaacaucaaguucgccgacgaccugaaccagcucacgggguacaagaagccggcgucccgcgagcugaaggugaccuucuuccccgaccugaacggcgacguggucgccaucgacuacaagcacuacacccccagcuucaagaagggcgccaagcuccugcacaagcccaucguguggcacgugaacaacgccaccaacaaggcgacguacaagccgaacaccuggugcauccggugccugugguccaccaagcccgucgagaccagcaacuccuucgacgugcucaagagcgaggacgcccaggggauggacaaccuggccugcgaggaccugaagcccguguccgaggaggucguggagaaccccacgauccagaaggacgugcucgagugcaacgucaagaccaccgagguggugggcgacaucauccugaagccggccaacaacagccugaagaucaccgaggaggucgggcacacggaccucauggccgcguacguggacaacuccagccugaccaucaagaagcccaacgagcugucccgcgugcucggccugaagacccuggccacccacgggcucgccgccgucaacagcgugcccugggacacgaucgccaacuacgcgaagccguuccugaacaagguggucuccaccaccaccaacaucgugacgcgcugccugaaccgggugugcaccaacuacaugcccuacuucuucacccuccugcugcagcucugcaccuucacccgcagcacgaacucccggaucaaggccagcaugcccaccaccaucgccaagaacaccgucaagagcgugggcaaguucugccuggaggccuccuucaacuaccugaagagccccaacuucuccaagcucaucaacaucaucaucugguuccugcugcucagcgugugccugggcucccugaucuacagcacggccgcgcucgggguccugauguccaaccugggcaugccgagcuacugcaccggguaccgcgagggcuaccucaacuccaccaacgugaccaucgccacguacugcaccggcagcauccccugcuccgugugccugagcgggcuggacucccucgacaccuaccccagccuggagaccauccagaucacgaucuccagcuucaagugggaccugaccgccuucggccucgucgccgagugguuccuggccuacauccuguucacccgguucuucuacgugcucgggcuggcggccaucaugcagcuguucuucuccuacuucgccgugcacuucaucagcaacuccuggcucauguggcugaucaucaaccugguccagauggcccccaucagcgcgauggugcgcauguacaucuucuucgccagcuucuacuacguguggaaguccuacguccacgugguggacggcugcaacagcuccaccugcaugaugugcuacaagcggaaccgcgccacgcgggucgagugcaccaccaucgugaacgggguccgccggagcuucuacguguacgccaacggcggcaagggguucugcaagcugcacaacuggaacugcgugaacugcgacaccuucugcgccggcuccacguucaucagcgacgaggucgcgcgcgaccucucccugcaguucaagcggccgaucaaccccaccgaccagagcuccuacaucguggacagcgugaccgucaagaacggguccauccaccuguacuucgacaaggccggccagaagaccuacgagcgccacagccucucccacuucgugaaccuggacaaccugcgggccaacaacacgaaggggagccuccccaucaacgugaucgucuucgacggcaaguccaagugcgaggagagcuccgccaagagcgccuccguguacuacagccagcugaugugccagcccauccugcuccuggaccaggcgcuggugagcgacgucggcgacuccgccgagguggccgugaagauguucgacgccuacgucaacaccuucagcuccaccuucaacgugccgauggagaagcucaagacccugguggccacggcggaggccgagcuggccaagaacgucagccucgacaacgugcuguccaccuucaucagcgccgcgcgccagggguucguggacuccgacgucgagaccaaggacgugguggagugccugaagcucagccaccaguccgacaucgaggucaccggcgacagcugcaacaacuacaugcugacguacaacaagguggagaacaugaccccccgggaccugggggccugcaucgacugcuccgcccgccacaucaacgcccagguggccaagagccacaacaucgcgcucaucuggaacgucaaggacuucaugucccugagcgagcagcugcggaagcagauccgcuccgccgccaagaagaacaaccuccccuucaagcugaccugcgccaccacgcgccagguggugaacgucgugaccaccaagaucgcccugaagggcggguga

SEQ ID NO: 17872 - RNA, 5841 nt, Artificial Sequence
  SARS-CoV-2__MT811489.1__non-structural protein 3 (NSP3) CDS gc
auggcccccaccaaggugaccuucggcgacgacacggucaucgaggugcagggguacaagagcgugaacaucaccuucgagcuggacgagcgcaucgacaagguccucaacgagaagugcuccgccuacaccguggagcugggcaccgaggugaacgaguucgcgugcgucguggccgacgccgugaucaagacgcugcagccggucagcgagcuccugaccccccuggggaucgaccucgacgagugguccauggccaccuacuaccuguucgacgagagcggcgaguucaagcuggccucccacauguacugcagcuucuacccccccgacgaggacgaggaggagggggacugcgaggaggaggaguucgagccguccacccaguacgaguacggcacggaggacgacuaccagggcaagccccucgaguucggggcgaccagcgccgcccugcagcccgaggaggagcaggaggaggacuggcuggacgacgacucccagcagaccgugggccagcaggacgggagcgaggacaaccagaccacgaccauccagaccaucguggagguccagccccagcucgagauggagcugaccccgguggugcagacgaucgaggucaacuccuucagcggcuaccugaagcucaccgacaacguguacaucaagaacgccgacaucguggaggaggcgaagaaggucaagcccaccgugguggucaacgccgccaacguguaccugaagcacgggggcggcguggccggggcccugaacaaggcgaccaacaacgccaugcaggucgaguccgacgacuacaucgccacgaacggcccccucaagguggggggcagcugcguccuguccggccacaaccuggccaagcacugccuccacgugguggggcccaacgucaacaagggcgaggacauccagcugcugaagagcgccuacgagaacuucaaccagcacgaggugcuccuggcgccgcugcucuccgccgggaucuucggcgccgaccccauccacagccugcgggugugcgucgacaccgugcgcaccaacguguaccuggccgucuucgacaagaaccucuacgacaagcugguguccagcuuccuggagaugaagagcgagaagcagguggagcagaagaucgccgagauccccaaggaggaggucaagcccuucaucaccgaguccaagccgagcguggagcagcggaagcaggacgacaagaagaucaaggcgugcguggaggaggucacgaccacccucgaggagaccaaguuccugacggagaaccugcuccuguacaucgacaucaacgggaaccugcaccccgacuccgccacccucgugagcgacaucgacaucaccuuccugaagaaggacgcccccuacaucgugggcgacgucgugcaggagggcgugcugaccgccgucgugauccccacgaagaaggccgggggcaccaccgagaugcucgcgaaggcccugcgcaaggugccgaccgacaacuacaucacgaccuaccccgggcagggccugaacggguacaccgucgaggaggccaagaccgugcucaagaagugcaaguccgccuucuacauccugcccagcaucaucuccaacgagaagcaggagauccugggcaccgugagcuggaaccuccgggagaugcuggcgcacgccgaggagacgcgcaagcugaugcccgucugcguggagaccaaggccaucguguccaccauccagcggaaguacaagggcaucaagauccaggagggggucguggacuacggcgcccgcuucuacuucuacaccagcaagacgaccguggccucccugaucaacacccucaacgaccugaacgagacccuggucacgaugccgcucggguacgugacccacggccugaaccuggaggaggcggcccgguacaugcgcagccucaaggugcccgccaccgucuccgugagcucccccgacgccgugaccgccuacaacggguaccugacgagcuccagcaagacccccgaggagcacuucaucgagaccaucucccuggcgggcagcuacaaggacuggagcuacuccggccagagcacccagcucgggaucgaguuccugaagcggggcgacaaguccgucuacuacacgagcaacccgaccaccuuccaccuggacggggaggugaucaccuucgacaaccucaagacgcugcugucccuccgcgaggugcggaccaucaaggucuucaccaccguggacaacaucaaccugcacacgcagguggucgacaugagcaugaccuacggccagcaguucggccccaccuaccuggacggggccgacgugaccaagaucaagccccacaacucccacgagggcaagacguucuacgugcucccgaacgacgacacccugcgcgucgaggccuucgaguacuaccacaccaccgaccccagcuuccuggggcgguacauguccgcccucaaccacacgaagaaguggaaguacccccaggugaacggccugaccagcaucaagugggccgacaacaacugcuaccuggcgaccgcccuccugacccugcagcagaucgagcucaaguucaaccccccggcccugcaggacgccuacuaccgcgcgcgggccggggaggccgccaacuucugcgcccugauccucgcguacugcaacaagacggugggcgagcugggcgacguccgcgagaccauguccuaccuguuccagcacgccaaccucgacagcugcaagcgggugcugaacgucgugugcaagaccugcgggcagcagcagaccacccugaagggcguggaggccgucauguacauggggacgcucuccuacgagcaguucaagaagggcgugcagauccccugcaccugcgggaagcaggccaccaaguaccuggugcagcaggagagccccuucgucaugauguccgcccccccggcgcaguacgagcugaagcacggcaccuucacgugcgccagcgaguacaccggcaacuaccagugcgggcacuacaagcacaucaccuccaaggagacccucuacugcaucgacggcgcccugcugacgaagagcagcgaguacaaggggcccaucaccgacguguucuacaaggagaacuccuacaccaccacgaucaagcccgugaccuacaagcucgacggcgucgugugcaccgagaucgaccccaagcuggacaacuacuacaagaaggacaacagcuacuucaccgagcagccgaucgaccuggugcccaaccagcccuaccccaacgccuccuucgacaacuucaaguucgucugcgacaacaucaaguucgccgacgaccucaaccagcugacgggguacaagaagccggcgagccgcgagcugaaggugaccuucuuccccgaccucaacggcgacguggucgccaucgacuacaagcacuacacccccuccuucaagaagggcgccaagcugcugcacaagcccaucguguggcacgugaacaacgccaccaacaaggcgacguacaagccgaacaccuggugcauccggugccucuggagcaccaagcccgucgagaccuccaacagcuucgacgugcugaaguccgagggggcccagggcauggacaaccuggccugcgaggaccucaagcccgugagcgaggaggucguggagaaccccacgauccagaaggacgugcuggagugcaacgucaagaccaccgagguggugggggacaucauccugaagccggccaacaacucccucaagaucaccgaggaggucggccacacggaccugauggccgcguacguggacaacagcucccugaccaucaagaagcccaacgagcucagccgcgugcuggggcugaagacccucgccacccacggccuggccgccgucaacuccgugcccugggacacgaucgccaacuacgcgaagccguuccugaacaagguggucagcaccaccaccaacaucgugacgcgcugccucaaccgggugugcaccaacuacaugcccuacuucuucacccugcugcuccagcugugcaccuucacccgcuccacgaacagccggaucaaggccuccaugcccaccaccaucgccaagaacaccgucaagagcgugggcaaguucugccuggaggccagcuucaacuaccucaagucccccaacuucagcaagcugaucaacaucaucaucugguuccugcuccuguccgugugccuggggagccucaucuacuccacggccgcgcugggcguccugaugagcaaccucgggaugccguccuacugcaccggcuaccgcgagggcuaccugaacagcaccaacgugaccaucgccacguacugcaccggguccauccccugcagcgugugccuguccggccucgacagccuggacaccuaccccucccuggagaccauccagaucacgaucagcuccuucaagugggaccucaccgccuucgggcuggucgccgagugguuccuggccuacauccucuucacccgguucuucuacgugcugggccuggcggccaucaugcagcucuucuucagcuacuucgccgugcacuucaucuccaacagcuggcugauguggcugaucaucaaccugguccagauggcccccaucuccgcgauggugcgcauguacaucuucuucgccagcuucuacuacguguggaagagcuacguccacgugguggacgggugcaacuccagcaccugcaugaugugcuacaagcggaaccgcgccacgcgggucgagugcaccaccaucgugaacggcguccgccgguccuucuacguguacgccaacggcgggaagggcuucugcaagcuccacaacuggaacugcgugaacugcgacaccuucugcgccgggagcacguucaucuccgacgaggucgcgcgcgaccugagccugcaguucaagcggccgaucaaccccaccgaccaguccagcuacaucguggacuccgugaccgucaagaacggcagcauccaccucuacuucgacaaggccgggcagaagaccuacgagcgccacucccugagccacuucgugaaccuggacaaccuccgggccaacaacacgaagggcucccugcccaucaacgugaucgucuucgacggcaagagcaagugcgaggaguccagcgccaaguccgccagcguguacuacucccagcugaugugccagcccauccuccugcuggaccaggcgcucgugagcgacgucggggacagcgccgagguggccgugaagauguucgacgccuacgucaacaccuucuccagcaccuucaacgugccgauggagaagcugaagacccugguggccacggcggaggccgagcucgccaagaacgucucccuggacaacgugcugagcaccuucaucuccgccgcgcgccagggcuucguggacagcgacgucgagaccaaggacgugguggagugccucaagcugucccaccagagcgacaucgaggucaccggggacuccugcaacaacuacaugcugacguacaacaagguggagaacaugaccccccgggaccucggcgccugcaucgacugcagcgcccgccacaucaacgcccagguggccaagucccacaacaucgcgcugaucuggaacgucaaggacuucaugagccuguccgagcagcuccggaagcagauccgcagcgccgccaagaagaacaaccugcccuucaagcugaccugcgccaccacgcgccagguggugaacgucgugaccaccaagaucgcccucaaggggggcuga

SEQ ID NO: 17873 - RNA, 5841 nt, Artificial Sequence
  SARS-CoV-2__MT811494.1__non-structural protein 3 (NSP3) CDS gc
auggcccccaccaaggugaccuucggcgacgacacggucaucgaggugcagggguacaagagcgugaacaucaccuucgagcuggacgagcgcaucgacaagguccucaacgagaagugcuccgccuacaccguggagcugggcaccgaggugaacgaguucgcgugcgucguggccgacgccgugaucaagacgcugcagccggucagcgagcuccugaccccccuggggaucgaccucgacgagugguccauggccaccuacuaccuguucgacgagagcggcgaguucaagcuggccucccacauguacugcagcuucuacccccccgacgaggacgaggaggagggggacugcgaggaggaggaguucgagccguccacccaguacgaguacggcacggaggacgacuaccagggcaagccccucgaguucggggcgaccagcgccgcccugcagcccgaggaggagcaggaggaggacuggcuggacgacgacucccagcagaccgugggccagcaggacgggagcgaggacaaccagaccacgaccauccagaccaucguggagguccagccccagcucgagauggagcugaccccgguggugcagacgaucgaggucaacuccuucagcggcuaccugaagcucaccgacaacguguacaucaagaacgccgacaucguggaggaggcgaagaaggucaagcccaccgugguggucaacgccgccaacguguaccugaagcacgggggcggcguggccggggcccugaacaaggcgaccaacaacgccaugcaggucgaguccgacgacuacaucgccacgaacggcccccucaagguggggggcagcugcguccuguccggccacaaccuggccaagcacugccuccacgugguggggcccaacgucaacaagggcgaggacauccagcugcugaagagcgccuacgagaacuucaaccagcacgaggugcuccuggcgccgcugcucuccgccgggaucuucggcgccgaccccauccacagccugcgggugugcgucgacaccgugcgcaccaacguguaccuggccgucuucgacaagaaccucuacgacaagcugguguccagcuuccuggagaugaagagcgagaagcagguggagcagaagaucgccgagauccccaaggaggaggucaagcccuucaucaccgaguccaagccgagcguggagcagcggaagcaggacgacaagaagaucaaggcgugcuucgaggaggugacgaccacccucgaggagaccaaguuccugacggagaaccugcuccuguacaucgacaucaacgggaaccugcaccccgacuccgccacccucgucagcgacaucgacaucaccuuccugaagaaggacgcccccuacaucgugggcgacgugguccaggagggcgugcugaccgccguggucauccccacgaagaaggccgggggcaccaccgagaugcucgcgaaggcccugcgcaaggugccgaccgacaacuacaucacgaccuaccccgggcagggccugaacggguacaccguggaggaggccaagaccguccucaagaagugcaaguccgccuucuacauccugcccagcaucaucuccaacgagaagcaggagauccugggcaccgugagcuggaaccuccgggagaugcuggcgcacgccgaggagacgcgcaagcugaugcccgugugcgucgagaccaaggccaucguguccaccauccagcggaaguacaagggcaucaagauccaggaggggguggucgacuacggcgcccgcuucuacuucuacaccagcaagacgaccguggccucccugaucaacacccucaacgaccugaacgagacccuggugacgaugccgcucggguacgucacccacggccugaaccuggaggaggcggcccgguacaugcgcagccucaaggugcccgccaccguguccgucagcucccccgacgccgugaccgccuacaacggguaccugacgagcuccagcaagacccccgaggagcacuucaucgagaccaucucccuggcgggcagcuacaaggacuggagcuacuccggccagagcacccagcucgggaucgaguuccugaagcggggcgacaaguccguguacuacacgagcaacccgaccaccuuccaccuggacggggaggucaucaccuucgacaaccucaagacgcugcugucccuccgcgaggugcggaccaucaagguguucaccaccgucgacaacaucaaccugcacacgcaggugguggacaugagcaugaccuacggccagcaguucggccccaccuaccuggacggggccgacgucaccaagaucaagccccacaacucccacgagggcaagacguucuacgugcucccgaacgacgacacccugcgcguggaggccuucgaguacuaccacaccaccgaccccagcuuccuggggcgguacauguccgcccucaaccacacgaagaaguggaaguacccccaggucaacggccugaccagcaucaagugggccgacaacaacugcuaccuggcgaccgcccuccugacccugcagcagaucgagcucaaguucaaccccccggcccugcaggacgccuacuaccgcgcgcgggccggggaggccgccaacuucugcgcccugauccucgcguacugcaacaagacggugggcgagcugggcgacgugcgcgagaccauguccuaccuguuccagcacgccaaccucgacagcugcaagcggguccugaacguggucugcaagaccugcgggcagcagcagaccacccugaagggcguggaggccgugauguacauggggacgcucuccuacgagcaguucaagaagggcguccagauccccugcaccugcgggaagcaggccaccaaguaccuggugcagcaggagagccccuucgugaugauguccgcccccccggcgcaguacgagcugaagcacggcaccuucacgugcgccagcgaguacaccggcaacuaccagugcgggcacuacaagcacaucaccuccaaggagacccucuacugcaucgacggcgcccugcugacgaagagcagcgaguacaaggggcccaucaccgacgucuucuacaaggagaacuccuacaccaccacgaucaagcccgugaccuacaagcucgacggcguggucugcaccgagaucgaccccaagcuggacaacuacuacaagaaggacaacagcuacuucaccgagcagccgaucgaccuggugcccaaccagcccuaccccaacgccuccuucgacaacuucaaguucgugugcgacaacaucaaguucgccgacgaccucaaccagcugacgggguacaagaagccggcgagccgcgagcugaaggucaccuucuuccccgaccucaacggcgacgugguggccaucgacuacaagcacuacacccccuccuucaagaagggcgccaagcugcugcacaagcccaucgucuggcacgugaacaacgccaccaacaaggcgacguacaagccgaacaccuggugcauccggugccucuggagcaccaagcccguggagaccuccaacagcuucgacguccugaaguccgaggacgcccaggggauggacaaccuggccugcgaggaccucaagcccgugagcgaggagguggucgagaaccccacgauccagaaggacgugcuggagugcaacgugaagaccaccgaggucgugggcgacaucauccugaagccggccaacaacucccucaagaucaccgaggagguggggcacacggaccugauggccgcguacgucgacaacagcucccugaccaucaagaagcccaacgagcucagccgcgugcugggccugaagacccucgccacccacgggcuggccgccgugaacuccguccccugggacacgaucgccaacuacgcgaagccguuccugaacaagguggugagcaccaccaccaacaucgucacgcgcugccucaaccgggugugcaccaacuacaugcccuacuucuucacccugcugcuccagcugugcaccuucacccgcuccacgaacagccggaucaaggccuccaugcccaccaccaucgccaagaacaccgugaagagcgucggcaaguucugccuggaggccagcuucaacuaccucaagucccccaacuucagcaagcugaucaacaucaucaucugguuccugcuccuguccgugugccugggcagccucaucuacuccacggccgcgcugggggugcugaugagcaaccucggcaugccguccuacugcaccggguaccgcgagggcuaccugaacagcaccaacgucaccaucgccacguacugcaccggcuccauccccugcagcgugugccuguccgggcucgacagccuggacaccuaccccucccuggagaccauccagaucacgaucagcuccuucaagugggaccucaccgccuucggccugguggccgagugguuccuggccuacauccucuucacccgguucuucuacguccuggggcuggcggccaucaugcagcucuucuucagcuacuucgccgugcacuucaucuccaacagcuggcugauguggcugaucaucaaccuggugcagauggcccccaucuccgcgaugguccgcauguacaucuucuucgccagcuucuacuacguguggaagagcuacgugcacgucguggacggcugcaacuccagcaccugcaugaugugcuacaagcggaaccgcgccacgcggguggagugcaccaccaucgucaacggggugcgccgguccuucuacgucuacgccaacggcggcaagggguucugcaagcuccacaacuggaacugcgugaacugcgacaccuucugcgccggcagcacguucaucuccgacgagguggcgcgcgaccugagccugcaguucaagcggccgaucaaccccaccgaccaguccagcuacaucgucgacuccgugaccgugaagaacgggagcauccaccucuacuucgacaaggccggccagaagaccuacgagcgccacucccugagccacuucgucaaccuggacaaccuccgggccaacaacacgaaggggucccugcccaucaacgugaucguguucgacggcaagagcaagugcgaggaguccagcgccaaguccgccagcgucuacuacucccagcugaugugccagcccauccuccugcuggaccaggcgcucgugagcgacgugggcgacagcgccgaggucgccgugaagauguucgacgccuacgugaacaccuucuccagcaccuucaacgucccgauggagaagcugaagacccugguggccacggcggaggccgagcucgccaagaacgugucccuggacaacguccugagcaccuucaucuccgccgcgcgccagggguucguggacagcgacguggagaccaaggacgucguggagugccucaagcugucccaccagagcgacaucgaggugaccggcgacuccugcaacaacuacaugcugacguacaacaaggucgagaacaugaccccccgggaccucggggccugcaucgacugcagcgcccgccacaucaacgcccagguggccaagucccacaacaucgcgcugaucuggaacgugaaggacuucaugagccuguccgagcagcuccggaagcagauccgcagcgccgccaagaagaacaaccugcccuucaagcugaccugcgccaccacgcgccaggucgugaacguggucaccaccaagaucgcccucaagggcggguga

SEQ ID NO: 17874 - RNA, 5841 nt, Artificial Sequence
  SARS-CoV-2__MT811496.1__non-structural protein 3 (NSP3) CDS gc
auggcccccaccaaggugaccuucggcgacgacacggucaucgaggugcagggguacaagagcgugaacaucaccuucgagcuggacgagcgcaucgacaagguccucaacgagaagugcuccgccuacaccguggagcugggcaccgaggugaacgaguucgcgugcgucguggccgacgccgugaucaagacguuccagccggucagcgagcugcucaccccccuggggaucgaccuggacgagugguccauggccaccuacuaccucuucgacgagagcggcgaguucaagcuggccucccacauguacugcagcuucuacccccccgacgaggacgaggaggagggggacugcgaggaggaggaguucgagccguccacccaguacgaguacggcacggaggacgacuaccagggcaagccccuggaguucggggcgaccagcgccgcccuccagcccgaggaggagcaggaggaggacuggcuggacgacgacucccagcagaccgugggccagcaggacgggagcgaggacaaccagaccacgaccauccagaccaucguggagguccagccccagcuggagauggagcucaccccgguggugcagacgaucgaggucaacuccuucagcggcuaccugaagcugaccgacaacguguacaucaagaacgccgacaucguggaggaggcgaagaaggucaagcccaccgugguggucaacgccgccaacguguaccucaagcacgggggcggcguggccggggcccugaacaaggcgaccaacaacgccaugcaggucgaguccgacgacuacaucgccacgaacggcccccugaagguggggggcagcugcguccucuccggccacaaccuggccaagcacugccugcacgugguggggcccaacgucaacaagggcgaggacauccagcuccugaagagcgccuacgagaacuucaaccagcacgaggugcugcucgcgccgcugcuguccgccgggaucuucggcgccgaccccauccacagccuccgggugugcgucgacaccgugcgcaccaacguguaccuggccgucuucgacaagaaccuguacgacaagcucguguccagcuuccuggagaugaagagcgagaagcagguggagcagaagaucgccgagauccccaaggaggaggucaagcccuucaucaccgaguccaagccgagcguggagcagcggaagcaggacgacaagaagaucaaggcgugcguggaggaggucacgaccacccuggaggagaccaaguuccucacggagaaccugcugcucuacaucgacaucaacgggaaccugcaccccgacuccgccacccuggugagcgacaucgacaucaccuuccucaagaaggacgcccccuacaucgugggcgacgucgugcaggagggcgugcugaccgccgucgugauccccacgaagaaggccgggggcaccaccgagaugcuggcgaaggcccuccgcaaggugccgaccgacaacuacaucacgaccuaccccgggcagggccugaacggguacaccgucgaggaggccaagaccgugcugaagaagugcaaguccgccuucuacauccuccccagcaucaucuccaacgagaagcaggagauccugggcaccgugagcuggaaccugcgggagaugcucgcgcacgccgaggagacgcgcaagcugaugcccgucugcguggagaccaaggccaucguguccaccauccagcggaaguacaagggcaucaagauccaggagggggucguggacuacggcgcccgcuucuacuucuacaccagcaagacgaccguggccucccugaucaacacccugaacgaccucaacgagacccuggucacgaugccgcugggguacgugacccacggccucaaccuggaggaggcggcccgguacaugcgcagccugaaggugcccgccaccgucuccgugagcucccccgacgccgugaccgccuacaacggguaccucacgagcuccagcaagacccccgaggagcacuucaucgagaccaucucccuggcgggcagcuacaaggacuggagcuacuccggccagagcacccagcuggggaucgaguuccucaagcggggcgacaaguccgucuacuacacgagcaacccgaccaccuuccaccuggacggggaggugaucaccuucgacaaccugaagacgcuccugucccugcgcgaggugcggaccaucaaggucuucaccaccguggacaacaucaaccuccacacgcagguggucgacaugagcaugaccuacggccagcaguucggccccaccuaccuggacggggccgacgugaccaagaucaagccccacaacucccacgagggcaagacguucuacgugcugccgaacgacgacacccuccgcgucgaggccuucgaguacuaccacaccaccgaccccagcuuccuggggcgguacauguccgcccugaaccacacgaagaaguggaaguacccccaggugaacggccucaccagcaucaagugggccgacaacaacugcuaccuggcgaccgcccugcucacccugcagcagaucgagcugaaguucaaccccccggcccuccaggacgccuacuaccgcgcgcgggccggggaggccgccaacuucugcgcccugauccuggcguacugcaacaagacggugggcgagcucggcgacguccgcgagaccauguccuaccuguuccagcacgccaaccuggacagcugcaagcgggugcucaacgucgugugcaagaccugcgggcagcagcagaccacccugaagggcguggaggccgucauguacauggggacgcuguccuacgagcaguucaagaagggcgugcagauccccugcaccugcgggaagcaggccaccaaguaccucgugcagcaggagagccccuucgucaugauguccgcccccccggcgcaguacgagcugaagcacggcaccuucacgugcgccagcgaguacaccggcaacuaccagugcgggcacuacaagcacaucaccuccaaggagacccuguacugcaucgacggcgcccuccugacgaagagcagcgaguacaaggggcccaucaccgacguguucuacaaggagaacuccuacaccaccacgaucaagcccgugaccuacaagcuggacggcgucgugugcaccgagaucgaccccaagcucgacaacuacuacaagaaggacaacagcuacuucaccgagcagccgaucgaccuggugcccaaccagcccuaccccaacgccuccuucgacaacuucaaguucgucugcgacaacaucaaguucgccgacgaccugaaccagcucacgggguacaagaagccggcgagccgcgagcugaaggugaccuucuuccccgaccugaacggcgacguggucgccaucgacuacaagcacuacacccccuccuucaagaagggcgccaagcuccugcacaagcccaucguguggcacgugaacaacgccaccaacaaggcgacguacaagccgaacaccuggugcauccggugccuguggagcaccaagcccgucgagaccuccaacagcuucgacgugcucaaguccgaggacgcccaggggauggacaaccuggccugcgaggaccugaagcccgugagcgaggaggucguggagaaccccacgauccagaaggacgugcucgagugcaacgucaagaccaccgagguggugggcgacaucauccugaagccggccaacaacucccugaagaucaccgaggaggucgggcacacggaccucauggccgcguacguggacaacagcucccugaccaucaagaagcccaacgagcugagccgcgugcucggccugaagacccuggccacccacgggcucgccgccgucaacuccgugcccugggacacgaucgccaacuacgcgaagccguuccugaacaagguggucagcaccaccaccaacaucgugacgcgcugccugaaccgggugugcaccaacuacaugcccuacuucuucacccuccugcugcagcucugcaccuucacccgcuccacgaacagccggaucaaggccuccaugcccaccaccaucgccaagaacaccgucaagagcgugggcaaguucugccuggaggccagcuucaacuaccugaagucccccaacuucagcaagcucaucaacaucaucaucugguuccugcugcucuccgugugccugggcagccugaucuacuccacggccgcgcucgggguccugaugagcaaccugggcaugccguccuacugcaccggguaccgcgagggcuaccucaacagcaccaacgugaccaucgccacguacugcaccggcuccauccccugcagcgugugccuguccgggcuggacagccucgacaccuaccccucccuggagaccauccagaucacgaucagcuccuucaagugggaccugaccgccuucggccucgucgccgagugguuccuggccuacauccuguucacccgguucuucuacgugcucgggcuggcggccaucaugcagcuguucuucagcuacuucgccgugcacuucaucuccaacagcuggcucauguggcugaucaucaaccugguccagauggcccccaucuccgcgauggugcgcauguacaucuucuucgccagcuucuacuacguguggaagagcuacguccacgugguggacggcugcaacuccagcaccugcaugaugugcuacaagcggaaccgcgccacgcgggucgagugcaccaccaucgugaacgggguccgccgguccuucuacguguacgccaacggcggcaagggguucugcaagcugcacaacuggaacugcgugaacugcgacaccuucugcgccggcagcacguucaucuccgacgaggucgcgcgcgaccucagccugcaguucaagcggccgaucaaccccaccgaccaguccagcuacaucguggacuccgugaccgucaagaacgggagcauccaccuguacuucgacaaggccggccagaagaccuacgagcgccacucccucagccacuucgugaaccuggacaaccugcgggccaacaacacgaaggggucccuccccaucaacgugaucgucuucgacggcaagagcaagugcgaggaguccagcgccaaguccgccagcguguacuacucccagcugaugugccagcccauccugcuccuggaccaggcgcuggugagcgacgucggcgacagcgccgagguggccgugaagauguucgacgccuacgucaacaccuucuccagcaccuucaacgugccgauggagaagcucaagacccugguggccacggcggaggccgagcuggccaagaacgucucccucgacaacgugcugagcaccuucaucuccgccgcgcgccagggguucguggacagcgacgucgagaccaaggacgugguggagugccugaagcucucccaccagagcgacaucgaggucaccggcgacuccugcaacaacuacaugcugacguacaacaagguggagaacaugaccccccgggaccugggggccugcaucgacugcagcgcccgccacaucaacgcccagguggccaagucccacaacaucgcgcucaucuggaacgucaaggacuucaugagccuguccgagcagcugcggaagcagauccgcagcgccgccaagaagaacaaccuccccuucaagcugaccugcgccaccacgcgccagguggugaacgucgugaccaccaagaucgcccugaagggcggguga

SEQ ID NO: 17875 - RNA, 5841 nt, Artificial Sequence
  SARS-CoV-2__MT811506.1__non-structural protein 3 (NSP3) CDS gc
auggcccccaccaaggugaccuucggcgacgacacggucaucgaggugcagggguacaagagcgugaacaucaccuucgagcuggacgagcgcaucgacaagguccucaacgagaagugcuccgccuacaccguggagcugggcaccgaggugaacgaguucgcgugcgucguggccgacgccgugaucaagacgcugcagccggucagcgagcuccugaccccccuggggaucgaccucgacgagugguccauggccaccuacuaccuguucgacgagagcggcgaguucaagcuggccucccacauguacugcagcuucuacccccccgacgaggacgaggaggagggggacugcgaggaggaggaguucgagccguccacccaguacgaguacggcacggaggacgacuaccagggcaagccccucgaguucggggcgaccagcgccgcccugcagcccgaggaggagcaggaggaggacuggcuggacgacgacucccagcagaccgugggccagcaggacgggagcgaggacaaccagaccacgaccauccagaccaucguggagguccagccccagcucgagauggagcugaccccgguggugcagacgaucgaggucaacuccuucagcggcuaccugaagcucaccgacaacguguacaucaagaacgccgacaucguggaggaggcgaagaaggucaagcccaccgugguggucaacgccgccaacguguaccugaagcacgggggcggcguggccggggcccugaacaaggcgaccaacaacgccaugcaggucgaguccgacgacuacaucgccacgaacggcccccucaagguggggggcagcugcguccuguccggccacaaccuggccaagcacugccuccacgugguggggcccaacgucaacaagggcgaggacauccagcugcugaagagcgccuacgagaacuucaaccagcacgaggugcuccuggcgccgcugcucuccgccgggaucuucggcgccgaccccauccacagccugcgggugugcgucgacaccgugcgcaccaacguguaccuggccgucuucgacaagaaccucuacgacaagcugguguccagcuuccuggagaugaagagcgagaagcagguggagcagaagaucgccgagauccccaaggaggaggucaagcccuucaucaccgaguccaagccgagcguggagcagcggaagcaggacgacaagaagaucaaggcgugcguggaggaggucacgaccacccucgaggagaccaaguuccugacggagaaccugcuccuguacaucgacaucaacgggaaccugcaccccgacuccgccacccucgugagcgacaucgacaucaccuuccugaagaaggacgcccccuacaucgugggcgacgucgugcaggagggcgugcugaccgccgucgugauccccacgaagaaggccgggggcaccaccgagaugcucgcgaaggcccugcgcaaggugccgaccgacaacuacaucacgaccuaccccgggcagggccugaacggguacaccgucgaggaggccaagaccgugcucaagaagugcaaguccgccuucuacauccugcccagcaucaucuccaacgagaagcaggagauccugggcaccgugagcuggaaccuccgggagaugcuggcgcacgccgaggagacgcgcaagcugaugcccgucugcguggagaccaaggccaucguguccaccauccagcggaaguacaagggcaucaagauccaggagggggucguggacuacggcgcccgcuucuacuucuacaccagcaagacgaccguggccucccugaucaacacccucaacgaccugaacgagacccuggucacgaugccgcucggguacgugacccacggccugaaccuggaggaggcggcccgguacaugcgcagccucaaggugcccgccaccgucuccgugagcucccccgacgccgugaccgccuacaacggguaccugacgagcuccagcaagacccccgaggagcacuucaucgagaccaucucccuggcgggcagcuacaaggacuggagcuacuccggccagagcacccagcucgggaucgaguuccugaagcggggcgacaaguccgucuacuacacgagcaacccgaccaccuuccaccuggacggggaggugaucaccuucgacaaccucaagacgcugcugucccuccgcgaggugcggaccaucaaggucuucaccaccguggacaacaucaaccugcacacgcagguggucgacaugagcaugaccuacggccagcaguucggccccaccuaccuggacggggccgacgugaccaagaucaagccccacaacucccacgagggcaagacguucuacgugcucccgaacgacgacacccugcgcgucgaggccuucgaguacuaccacaccaccgaccccagcuuccuggggcgguacauguccgcccucaaccacacgaagaaguggaaguacccccaggugaacggccugaccagcaucaagugggccgacaacaacugcuaccuggcgaccgcccuccugacccugcagcagaucgagcucaaguucaaccccccggcccugcaggacgccuacuaccgcgcgcgggccggggaggccgccaacuucugcgcccugauccucgcguacugcaacaagacggugggcgagcugggcgacguccgcgagaccauguccuaccuguuccagcacgccaaccucgacagcugcaagcgggugcugaacgucgugugcaagaccugcgggcagcagcagaccacccugaagggcguggaggccgucauguacauggggacgcucuccuacgagcaguucaagaagggcgugcagauccccugcaccugcgggaagcaggccaccaaguaccuggugcagcaggagagccccuucgucaugauguccgcccccccggcgcaguacgagcugaagcacggcaccuucacgugcgccagcgaguacaccggcaacuaccagugcgggcacuacaagcacaucaccuccaaggagacccucuacugcaucgacggcgcccugcugacgaagagcagcgaguacaaggggcccaucaccgacguguucuacaaggagaacuccuacaccaccacgaucaagcccgugaccuacaagcucgacggcgucgugugcaccgagaucgaccccaagcuggacaacuacuacaagaaggacaacagcuacuucaccgagcagccgaucgaccuggugcccaaccagcccuaccccaacgccuccuucgacaacuucaaguucgucugcgacaacaucaaguucgccgacgaccucaaccagcugacgggguacaagaagccggcgagccgcgagcugaaggugaccuucuuccccgaccucaacggcgacguggucgccaucgacuacaagcacuacacccccuccuucaagaagggcgccaagcugcugcacaagcccaucguguggcacgugaacaacgccaccaacaaggcgacguacaagccgaacaccuggugcauccggugccucuggagcaccaagcccgucgagaccuccaacagcuucgacgugcugaaguccgaggacgcccaggggauggacaaccuggccugcgaggaccucaagcccgugagcgaggaggucguggagaaccccacgauccagaaggacgugcuggagugcaacgucaagaccaccgagguggugggcgacaucauccugaagccggccaacaacucccucaagaucaccgaggaggucgggcacacggaccugauggccgcguacguggacaacagcucccugaccaucaagaagcccaacgagcucagccgcgugcugggccugaagacccucgucacccacgggcuggccgccgugaacuccgugcccugggacacgaucgccaacuacgccaagccguuccugaacaaggucgugagcaccaccaccaacaucgugacgcgcugccucaaccgggucugcaccaacuacaugcccuacuucuucacccugcugcuccagcugugcaccuucacccgcuccacgaacagccggaucaaggcguccaugcccaccaccaucgccaagaacaccgugaagagcgugggcaaguucugccuggaggccagcuucaacuaccucaagucccccaacuucagcaagcugaucaacaucaucaucugguuccugcuccuguccgucugccugggcagccucaucuacuccacggccgcccugggggugcugaugagcaaccucggcaugccguccuacugcaccggguaccgcgagggcuaccugaacagcaccaacgugaccaucgcgacguacugcaccggcuccauccccugcagcgucugccuguccgggcucgacagccuggacaccuaccccucccuggagaccauccagaucacgaucagcuccuucaagugggaccucaccgccuucggccugguggccgagugguuccuggccuacauccucuucacccgguucuucuacgugcuggggcuggccgcgaucaugcagcucuucuucagcuacuucgccguccacuucaucuccaacagcuggcugauguggcugaucaucaaccuggugcagauggcccccaucuccgccauggugcgcauguacaucuucuucgcgagcuucuacuacgucuggaagagcuacgugcacguggucgacggcugcaacuccagcaccugcaugaugugcuacaagcggaaccgcgccacgcggguggagugcaccaccaucgucaacggggugcgccgguccuucuacguguacgccaacggcggcaagggguucugcaagcuccacaacuggaacugcgucaacugcgacaccuucugcgccggcagcacguucaucuccgacgagguggcccgcgaccugagccugcaguucaagcggccgaucaaccccaccgaccaguccagcuacaucguggacuccgucaccgugaagaacgggagcauccaccucuacuucgacaaggcgggccagaagaccuacgagcgccacucccugagccacuucgugaaccuggacaaccuccgggccaacaacacgaaggggucccugcccaucaacgucaucguguucgacggcaagagcaagugcgaggaguccagcgccaaguccgccagcguguacuacucccagcugaugugccagcccauccuccugcuggaccaggcccucgucagcgacgugggcgacagcgcggagguggccgucaagauguucgacgccuacgugaacaccuucuccagcaccuucaacgugccgauggagaagcugaagacccuggucgccacggccgaggcggagcucgccaagaacgugucccuggacaacgugcugagcaccuucaucuccgccgcccgccagggguucgucgacagcgacguggagaccaaggacguggucgagugccucaagcugucccaccagagcgacaucgaggugaccggcgacuccugcaacaacuacaugcugacguacaacaagguggagaacaugaccccccgggaccucggggcgugcaucgacugcagcgcccgccacaucaacgcccaggucgccaagucccacaacaucgcccugaucuggaacgugaaggacuucaugagccuguccgagcagcuccggaagcagauccgcagcgcggccaagaagaacaaccugcccuucaagcugaccugcgccaccacgcgccagguggucaacguggugaccaccaagaucgcccucaagggcggguga

SEQ ID NO: 17876 - RNA, 5841 nt, Artificial Sequence
  SARS-CoV-2__MT811507.1__non-structural protein 3 (NSP3) CDS gc
auggcccccaccaaggugaccuucggcgacgacacggucaucgaggugcagggguacaagagcgugaacaucaccuucgagcuggacgagcgcaucgacaagguccucaacgagaagugcuccgccuacaccguggagcugggcaccgaggugaacgaguucgcgugcgucguggccgacgccgugaucaagacgcugcagccggucagcgagcuccugaccccccuggggaucgaccucgacgagugguccauggccaccuacuaccuguucgacgagagcggcgaguucaagcuggccucccacauguacugcagcuucuacccccccgacgaggacgaggaggagggggacugcgaggaggaggaguucgagccguccacccaguacgaguacggcacggaggacgacuaccagggcaagccccucgaguucggggcgaccagcgccgcccugcagcccgaggaggagcaggaggaggacuggcuggacgacgacucccagcagaccgugggccagcaggacgggagcgaggacaaccagaccacgaccauccagaccaucguggagguccagccccagcucgagauggagcugaccccgguggugcagacgaucgaggucaacuccuucagcggcuaccugaagcucaccgacaacguguacaucaagaacgccgacaucguggaggaggcgaagaaggucaagcccaccgugguggucaacgccgccaacguguaccugaagcacgggggcggcguggccggggcccugaacaaggcgaccaacaacgccaugcaggucgaguccgacgacuacaucgccacgaacggcccccucaagguggggggcagcugcguccuguccggccacaaccuggccaagcacugccuccacgugguggggcccaacgucaacaagggcgaggacauccagcugcugaagagcgccuacgagaacuucaaccagcacgaggugcuccuggcgccgcugcucuccgccgggaucuucggcgccgaccccauccacagccugcgggugugcgucgacaccgugcgcaccaacguguaccuggccgucuucgacaagaaccucuacgacaagcugguguccagcuuccuggagaugaagagcgagaagcagguggagcagaagaucgccgagauccccaaggaggaggucaagcccuucaucaccgaguccaagccgagcguggagcagcggaagcaggacgacaagaagaucaaggcgugcguggaggaggucacgaucacccucgaggagaccaaguuccugaccgagaaccugcuccuguacaucgacaucaacgggaaccugcaccccgacuccgccacgcucgugagcgacaucgacaucaccuuccugaagaaggacgcccccuacaucgugggcgacgucgugcaggagggcgugcugaccgccgucgugauccccaccaagaaggccgggggcacgaccgagaugcucgcgaaggcccugcgcaaggugccgaccgacaacuacaucaccacguaccccgggcagggccugaacggguacaccgucgaggaggccaagaccgugcucaagaagugcaaguccgccuucuacauccugcccagcaucaucuccaacgagaagcaggagauccugggcaccgugagcuggaaccuccgggagaugcuggcgcacgccgaggagacccgcaagcugaugcccgucugcguggagacgaaggccaucguguccaccauccagcggaaguacaagggcaucaagauccaggagggggucguggacuacggcgcccgcuucuacuucuacaccagcaagaccacgguggccucccugaucaacacccucaacgaccugaacgagacccuggucaccaugccgcucggguacgugacgcacggccugaaccuggaggaggcggcccgguacaugcgcagccucaaggugcccgccaccgucuccgugagcucccccgacgccgugaccgccuacaacggguaccugaccagcuccagcaagacgcccgaggagcacuucaucgagaccaucucccuggcgggcagcuacaaggacuggagcuacuccggccagagcacccagcucgggaucgaguuccugaagcggggcgacaaguccgucuacuacaccagcaacccgacgaccuuccaccuggacggggaggugaucaccuucgacaaccucaagacccugcugucccuccgcgaggugcggacgaucaaggucuucaccaccguggacaacaucaaccugcacacccagguggucgacaugagcaugacguacggccagcaguucggccccaccuaccuggacggggccgacgugaccaagaucaagccccacaacucccacgagggcaagaccuucuacgugcucccgaacgacgacacgcugcgcgucgaggccuucgaguacuaccacaccaccgaccccagcuuccuggggcgguacauguccgcccucaaccacaccaagaaguggaaguacccccaggugaacggccugacgagcaucaagugggccgacaacaacugcuaccuggcgaccgcccuccugacccugcagcagaucgagcucaaguucaaccccccggcccugcaggacgccuacuaccgcgcgcgggccggggaggccgccaacuucugcgcccugauccucgcguacugcaacaagaccgugggcgagcugggcgacguccgcgagacgauguccuaccuguuccagcacgccaaccucgacagcugcaagcgggugcugaacgucgugugcaagaccugcgggcagcagcagaccacccugaagggcguggaggccgucauguacauggggacccucuccuacgagcaguucaagaagggcgugcagauccccugcacgugcgggaagcaggccaccaaguaccuggugcagcaggagagccccuucgucaugauguccgcccccccggcgcaguacgagcugaagcacggcaccuucaccugcgccagcgaguacacgggcaacuaccagugcgggcacuacaagcacaucaccuccaaggagacccucuacugcaucgacggcgcccugcugaccaagagcagcgaguacaaggggcccaucacggacguguucuacaaggagaacuccuacaccaccaccaucaagcccgugacguacaagcucgacggcgucgugugcaccgagaucgaccccaagcuggacaacuacuacaagaaggacaacagcuacuucaccgagcagccgaucgaccuggugcccaaccagcccuaccccaacgccuccuucgacaacuucaaguucgucugcgacaacaucaaguucgccgacgaccucaaccagcugaccggguacaagaagccggcgagccgcgagcugaaggugacguucuuccccgaccucaacggcgacguggucgccaucgacuacaagcacuacacccccuccuucaagaagggcgccaagcugcugcacaagcccaucguguggcacgugaacaacgccaccaacaaggcgaccuacaagccgaacacguggugcauccggugccucuggagcaccaagcccgucgagaccuccaacagcuucgacgugcugaaguccgaggacgcccaggggauggacaaccuggccugcgaggaccucaagcccgugagcgaggaggucguggagaaccccaccauccagaaggacgugcuggagugcaacgucaagacgaccgagguggugggcgacaucauccugaagccggccaacaacucccucaagaucaccgaggaggucgggcacaccgaccugauggccgcguacguggacaacagcucccugacgaucaagaagcccaacgagcucagccgcgugcugggccugaagacccucgccacccacgggcuggccgccgucaacuccgugcccugggacaccaucgccaacuacgcgaagccguuccugaacaagguggucagcacgaccaccaacaucgugacccgcugccucaaccgggugugcacgaacuacaugcccuacuucuucacccugcugcuccagcugugcaccuucacccgcuccaccaacagccggaucaaggccuccaugcccacgaccaucgccaagaacaccgucaagagcgugggcaaguucugccuggaggccagcuucaacuaccucaagucccccaacuucagcaagcugaucaacaucaucaucugguuccugcuccuguccgugugccugggcagccucaucuacuccaccgccgcgcuggggguccugaugagcaaccucggcaugccguccuacugcacgggguaccgcgagggcuaccugaacagcaccaacgugaccaucgccaccuacugcacgggcuccauccccugcagcgugugccuguccgggcucgacagccuggacaccuaccccucccuggagaccauccagaucaccaucagcuccuucaagugggaccucacggccuucggccuggucgccgagugguuccuggccuacauccucuucacccgguucuucuacgugcuggggcuggcggccaucaugcagcucuucuucagcuacuucgccgugcacuucaucuccaacagcuggcugauguggcugaucaucaaccugguccagauggcccccaucuccgcgauggugcgcauguacaucuucuucgccagcuucuacuacguguggaagagcuacguccacgugguggacggcugcaacuccagcaccugcaugaugugcuacaagcggaaccgcgccacccgggucgagugcacgaccaucgugaacgggguccgccgguccuucuacguguacgccaacggcggcaagggguucugcaagcuccacaacuggaacugcgugaacugcgacaccuucugcgccggcagcaccuucaucuccgacgaggucgcgcgcgaccugagccugcaguucaagcggccgaucaaccccacggaccaguccagcuacaucguggacuccgugaccgucaagaacgggagcauccaccucuacuucgacaaggccggccagaagaccuacgagcgccacucccugagccacuucgugaaccuggacaaccuccgggccaacaacaccaaggggucccugcccaucaacgugaucgucuucgacggcaagagcaagugcgaggaguccagcgccaaguccgccagcguguacuacucccagcugaugugccagcccauccuccugcuggaccaggcgcucgugagcgacgucggcgacagcgccgagguggccgugaagauguucgacgccuacgucaacacguucuccagcaccuucaacgugccgauggagaagcugaagacccugguggccaccgcggaggccgagcucgccaagaacgucucccuggacaacgugcugagcacguucaucuccgccgcgcgccagggguucguggacagcgacgucgagaccaaggacgugguggagugccucaagcugucccaccagagcgacaucgaggucaccggcgacuccugcaacaacuacaugcugaccuacaacaagguggagaacaugacgccccgggaccucggggccugcaucgacugcagcgcccgccacaucaacgcccagguggccaagucccacaacaucgcgcugaucuggaacgucaaggacuucaugagccuguccgagcagcuccggaagcagauccgcagcgccgccaagaagaacaaccugcccuucaagcugaccugcgccaccacccgccagguggugaacgucgugacgaccaagaucgcccucaagggcggguga

SEQ ID NO: 17877 - RNA, 5841 nt, Artificial Sequence
  SARS-CoV-2__MT811514.1__non-structural protein 3 (NSP3) CDS gc
auggcccccaccaaggugaccuucggcgacgacacggucaucgaggugcagggguacaagagcgugaacaucaccuucgagcuggacgagcgcaucgacaagguccucaacgagaagugcuccgccuacaccguggagcugggcaccgaggugaacgaguucgcgugcgucguggccgacgccgugaucaagacgcugcagccggucagcgagcuccugaccccccuggggaucgaccucgacgagugguccauggccaccuacuaccuguucgacgagagcggcgaguucaagcuggccucccacauguacugcagcuucuacccccccgacgaggacgaggaggagggggacugcgaggaggaggaguucgagccguccacccaguacgaguacggcacggaggacgacuaccagggcaagccccucgaguucggggcgaccagcgccgcccugcagcccgaggaggagcaggaggaggacuggcuggacgacgacucccagcagaccgugggccagcaggacgggagcgaggacaaccagaccacgaccauccagaccaucguggagguccagccccagcucgagauggagcugaccccgguggugcagacgaucgaggucaacuccuucagcggcuaccugaagcucaccgacaacguguacaucaagaacgccgacaucguggaggaggcgaagaaggucaagcccaccgugguggucaacgccgccaacguguaccugaagcacgggggcggcguggccggggcccugaacaaggcgaccaacaacgccaugcaggucgaguccgacgacuacaucgccacgaacggcccccucaagguggggggcagcugcguccuguccggccacaaccuggccaagcacugccuccacgugguggggcccaacgucaacaagggcgaggacauccagcugcugaagagcgccuacgagaacuucaaccagcacgaggugcuccuggcgccgcugcucuccgccgggaucuucggcgccgaccccauccacagccugcgggugugcgucgacaccgugcgcaccaacguguaccuggccgucuucgacaagaaccucuacgacaagcugguguccagcuuccuggagaugaagagcgagaagcagguggagcagaagaucgccgagauccccaaggaggaggucaagcccuucaucaccgaguccaagccgagcguggagcagcggaagcaggacgacaagaagaucaaggcgugcguggaggaggucacgaccacccucgaggagaccaaguuccugacggagaaccugcuccuguacaucgacaucaacgggaaccugcaccccgacuccgccacccucgugagcgacaucgacaucaccuuccugaagaaggacgcccccuacaucgugggcgacgucgugcaggagggcgugcugaccgccgucgugauccccacgaagaaggccgggggcaccaccgagaugcucgcgaaggcccugcgcaaggugccgaccgacaacuacaucacgaccuaccccgggcagggccugaacggguacaccgucgaggaggccaagaccgugcucaagaagugcaaguccgccuucuacauccugcccagcaucaucuccaacgagaagcaggagauccugggcaccgugagcuggaaccuccgggagaugcuggcgcacgccgaggagacgcgcaagcugaugcccgucugcguggagaccaaggccaucguguccaccauccagcggaaguacaagggcaucaagauccaggagggggucguggacuacggcgcccgcuucuacuucuacaccagcaagacgaccguggccucccugaucaacacccucaacgaccugaacgagacccuggucacgaugccgcucggguacgugacccacggccugaaccuggaggaggcggcccgguacaugcgcagccucaaggugcccgccaccgucuccgugagcucccccgacgccgugaccgccuacaacggguaccugacgagcuccagcaagacccccgaggagcacuucaucgagaccaucucccuggcgggcagcuacaaggacuggagcuacuccggccagagcacccagcucgggaucgaguuccugaagcggggcgacaaguccgucuacuacacgagcaacccgaccaccuuccaccuggacggggaggugaucaccuucgacaaccucaagacgcugcugucccuccgcgaggugcggaccaucaaggucuucaccaccguggacaacaucaaccugcacacgcagguggucgacaugagcaugaccuacggccagcaguucggccccaccuaccuggacggggccgacgugaccaagaucaagccccacaacucccacgagggcaagacguucuacgugcucccgaacgacgacacccugcgcgucgaggccuucgaguacuaccacaccaccgaccccagcuuccuggggcgguacauguccgcccucaaccacacgaagaaguggaaguacccccaggugaacggccugaccagcaucaagugggccgacaacaacugcuaccuggcgaccgcccuccugacccugcagcagaucgagcucaaguucaaccccccggcccugcaggacgccuacuaccgcgcgcgggccggggaggccgccaacuucugcgcccugauccucgcguacugcaacaagacggugggcgagcugggcgacguccgcgagaccauguccuaccuguuccagcacgccaaccucgacagcugcaagcgggugcugaacgucgugugcaagaccugcgggcagcagcagaccacccugaagggcguggaggccgucauguacauggggacgcucuccuacgagcaguucaagaagggcgugcagauccccugcaccugcgggaagcaggccaccaaguaccuggugcagcaggagagccccuucgucaugauguccgcccccccggcgcacuacgagcugaagcacggcaccuucacgugcgccagcgaguacaccggcaacuaccagugcgggcacuacaagcacaucaccuccaaggagacccucuacugcaucgacggcgcccugcugacgaagagcagcgaguacaaggggcccaucaccgacguguucuacaaggagaacuccuacaccaccacgaucaagcccgugaccuacaagcucgacggcgucgugugcaccgagaucgaccccaagcuggacaacuacuacaagaaggacaacagcuacuucaccgagcagccgaucgaccuggugcccaaccagcccuaccccaacgccuccuucgacaacuucaaguucgucugcgacaacaucaaguucgccgacgaccucaaccagcugacgggguacaagaagccggcgagccgcgagcugaaggugaccuucuuccccgaccucaacggcgacguggucgccaucgacuacaagcacuacacccccuccuucaagaagggcgccaagcugcugcacaagcccaucguguggcacgugaacaacgccaccaacaaggcgacguacaagccgaacaccuggugcauccggugccucuggagcaccaagcccgucgagaccuccaacagcuucgacgugcugaaguccgaggacgcccaggggauggacaaccuggccugcgaggaccucaagcccgugagcgaggaggucguggagaaccccacgauccagaaggacgugcuggagugcaacgucaagaccaccgagguggugggcgacaucauccugaagccggccaacaacucccucaagaucaccgaggaggucgggcacacggaccugauggccgcguacguggacaacagcucccugaccaucaagaagcccaacgagcucagccgcgugcugggccugaagacccucgccacccacgggcuggccgccgucaacuccgugcccugggacacgaucgccaacuacgcgaagccguuccugaacaagguggucagcaccaccaccaacaucgugacgcgcugccucaaccgggugugcaccaacuacaugcccuacuucuucacccugcugcuccagcugugcaccuucacccgcuccacgaacagccggaucaaggccuccaugcccaccaccaucgccaagaacaccgucaagagcgugggcaaguucugccuggaggccagcuucaacuaccucaagucccccaacuucagcaagcugaucaacaucaucaucugguuccugcuccuguccgugugccugggcagccucaucuacuccacggccgcgcuggggguccugaugagcaaccucggcaugccguccuacugcaccggguaccgcgagggcuaccugaacagcaccaacgugaccaucgccacguacugcaccggcuccauccccugcagcgugugccuguccgggcucgacagccuggacaccuaccccucccuggagaccauccagaucacgaucagcuccuucaagugggaccucaccgccuucggccuggucgccgagugguuccuggccuacauccucuucacccgguucuucuacgugcuggggcuggcggccaucaugcagcucuucuucagcuacuucgccgugcacuucaucuccaacagcuggcugauguggcugaucaucaaccugguccagauggcccccaucuccgcgauggugcgcauguacaucuucuucgccagcuucuacuacguguggaagagcuacguccacgugguggacggcugcaacuccagcaccugcaugaugugcuacaagcggaaccgcgccacgcgggucgagugcaccaccaucgugaacgggguccgccgguccuucuacguguacgccaacggcggcaagggguucugcaagcuccacaacuggaacugcgugaacugcgacaccuucugcgccggcagcacguucaucuccgacgaggucgcgcgcgaccugagccugcaguucaagcggccgaucaaccccaccgaccaguccagcuacaucguggacuccgugaccgucaagaacgggagcauccaccucuacuucgacaaggccggccagaagaccuacgagcgccacucccugagccacuucgugaaccuggacaaccuccgggccaacaacacgaaggggucccugcccaucaacgugaucgucuucgacggcaagagcaagugcgaggaguccagcgccaaguccgccagcguguacuacucccagcugaugugccagcccauccuccugcuggaccaggcgcucgugagcgacgucggcgacagcgccgagguggccgugaagauguucgacgccuacgucaacaccuucuccagcaccuucaacgugccgauggagaagcugaagacccugguggccacggcggaggccgagcucgccaagaacgucucccuggacaacgugcugagcaccuucaucuccgccgcgcgccagggguucguggacagcgacgucgagaccaaggacgugguggagugccucaagcugucccaccagagcgacaucgaggucaccggcgacuccugcaacaacuacaugcugacguacaacaagguggagaacaugaccccccgggaccucggggccugcaucgacugcagcgcccgccacaucaacgcccagguggccaagucccacaacaucgcgcugaucuggaacgucaaggacuucaugagccuguccgagcagcuccggaagcagauccgcagcgccgccaagaagaacaaccugcccuucaagcugaccugcgccaccacgcgccagguggugaacgucgugaccaccaagaucgcccucaagggcggguga

SEQ ID NO: 17878 - RNA, 5841 nt, Artificial Sequence
  SARS-CoV-2__MT811515.1__non-structural protein 3 (NSP3) CDS gc
auggcccccaccaaggugaccuucggcgacgacacggucaucgaggugcagggguacaagagcgugaacaucaccuucgagcuggacgagcgcaucgacaagguccucaacgagaagugcuccgccuacaccguggagcugggcaccgaggugaacgaguucgcgugcgucguggccgacgccgugaucaagacgcugcagccggucagcgagcuccugaccccccuggacaucgaccucgacgagugguccauggccaccuacuaccuguucgacgagagcggggaguucaagcuggccucccacauguacugcagcuucuacccccccgacgaggacgaggaggagggcgacugcgaggaggaggaguucgagccguccacccaguacgaguacgggacggaggacgacuaccagggcaagccccucgaguucggcgcgaccagcgccgcccugcagcccgaggaggagcaggaggaggacuggcuggacgacgacucccagcagaccguggggcagcaggacggcagcgaggacaaccagaccacgaccauccagaccaucguggagguccagccccagcucgagauggagcugaccccgguggugcagacgaucgaggucaacuccuucagcggguaccugaagcucaccgacaacguguacaucaagaacgccgacaucguggaggaggcgaagaaggucaagcccaccgugguggucaacgccgccaacguguaccugaagcacggcgggggcguggccggcgcccugaacaaggcgaccaacaacgccaugcaggucgaguccgacgacuacaucgccacgaacgggccccucaaggugggcgggagcugcguccuguccggccacaaccuggccaagcacugccuccacguggugggccccaacgucaacaagggggaggacauccagcugcugaagagcgccuacgagaacuucaaccagcacgaggugcuccuggcgccgcugcucuccgccggcaucuucggggccgaccccauccacagccugcgggugugcgucgacaccgugcgcaccaacguguaccuggccgucuucgacaagaaccucuacgacaagcugguguccagcuuccuggagaugaagagcgagaagcagguggagcagaagaucgccgagauccccaaggaggaggucaagcccuucaucaccgaguccaagccgagcguggagcagcggaagcaggacgacaagaagaucaaggcgugcguggaggaggucacgaccacccucgaggagaccaaguuccugacggagaaccugcuccuguacaucgacaucaacggcaaccugcaccccgacuccgccacccucgugagcgacaucgacaucaccuuccugaagaaggacgcccccuacaucgugggggacgucgugcaggagggcgugcugaccgccgucgugauccccacgaagaaggccggcgggaccaccgagaugcucgcgaaggcccugcgcaaggugccgaccgacaacuacaucacgaccuaccccggccaggggcugaacggcuacaccgucgaggaggccaagaccgugcucaagaagugcaaguccgccuucuacauccugcccagcaucaucuccaacgagaagcaggagauccuggggaccgugagcuggaaccuccgggagaugcuggcgcacgccgaggagacgcgcaagcugaugcccgucugcguggagaccaaggccaucguguccaccauccagcggaaguacaagggcaucaagauccaggagggcgucguggacuacggggcccgcuucuacuucuacaccagcaagacgaccguggccucccugaucaacacccucaacgaccugaacgagacccuggucacgaugccgcucggcuacgugacccacgggcugaaccuggaggaggcggcccgguacaugcgcagccucaaggugcccgccaccgucuccgugagcucccccgacgccgugaccgccuacaacggcuaccugacgagcuccagcaagacccccgaggagcacuucaucgagaccaucucccuggcggggagcuacaaggacuggagcuacuccggccagagcacccagcucggcaucgaguuccugaagcggggggacaaguccgucuacuacacgagcaacccgaccaccuuccaccuggacggcgaggugaucaccuucgacaaccucaagacgcugcugucccuccgcgaggugcggaccaucaaggucuucaccaccguggacaacaucaaccugcacacgcagguggucgacaugagcaugaccuacgggcagcaguucggccccaccuaccuggacggcgccgacgugaccaagaucaagccccacaacucccacgaggggaagacguucuacgugcucccgaacgacgacacccugcgcgucgaggccuucgaguacuaccacaccaccgaccccagcuuccugggccgguacauguccgcccucaaccacacgaagaaguggaaguacccccaggugaacgggcugaccagcaucaagugggccgacaacaacugcuaccuggcgaccgcccuccugacccugcagcagaucgagcucaaguucaaccccccggcccugcaggacgccuacuaccgcgcgcgggccggcgaggccgccaacuucugcgcccugauccucgcguacugcaacaagacggugggggagcugggcgacguccgcgagaccauguccuaccuguuccagcacgccaaccucgacagcugcaagcgggugcugaacgucgugugcaagaccugcggccagcagcagaccacccugaaggggguggaggccgucauguacaugggcacgcucuccuacgagcaguucaagaagggggugcagauccccugcaccugcggcaagcaggccaccaaguaccuggugcagcaggagagccccuucgucaugauguccgcccccccggcgcaguacgagcugaagcacgggaccuucacgugcgccagcgaguacaccggcaacuaccagugcggccacuacaagcacaucaccuccaaggagacccucuacugcaucgacggggcccugcugacgaagagcagcgaguacaagggccccaucaccgacguguucuacaaggagaacuccuacaccaccacgaucaagcccgugaccuacaagcucgacggggucgugugcaccgagaucgaccccaagcuggacaacuacuacaagaaggacaacagcuacuucaccgagcagccgaucgaccuggugcccaaccagcccuaccccaacgccuccuucgacaacuucaaguucgucugcgacaacaucaaguucgccgacgaccucaaccagcugacgggcuacaagaagccggcgagccgcgagcugaaggugaccuucuuccccgaccucaacggggacguggucgccaucgacuacaagcacuacacccccuccuucaagaagggcgccaagcugcugcacaagcccaucguguggcacgugaacaacgccaccaacaaggcgacguacaagccgaacaccuggugcauccggugccucuggagcaccaagcccgucgagaccuccaacagcuucgacgugcugaaguccgaggacgcccagggcauggacaaccuggccugcgaggaccucaagcccgugagcgaggaggucguggagaaccccacgauccagaaggacgugcuggagugcaacgucaagaccaccgagguggugggggacaucauccugaagccggccaacaacucccucaagaucaccgaggaggucggccacacggaccugauggccgcguacguggacaacagcucccugaccaucaagaagcccaacgagcucagccgcgugcuggggcugaagacccucgccacccacggccuggccgccgucaacuccgugcccugggacacgaucgccaacuacgcgaagccguuccugaacaagguggucagcaccaccaccaacaucgugacgcgcugccucaaccgggugugcaccaacuacaugcccuacuucuucacccugcugcuccagcugugcaccuucacccgcuccacgaacagccggaucaaggccuccaugcccaccaccaucgccaagaacaccgucaagagcguggggaaguucugccuggaggccagcuucaacuaccucaagucccccaacuucagcaagcugaucaacaucaucaucugguuccugcuccuguccgugugccugggcagccucaucuacuccacggccgcgcugggcguccugaugagcaaccucgggaugccguccuacugcaccggcuaccgcgagggguaccugaacagcaccaacgugaccaucgccacguacugcaccggcuccauccccugcagcgugugccuguccggccucgacagccuggacaccuaccccucccuggagaccauccagaucacgaucagcuccuucaagugggaccucaccgccuucgggcuggucgccgagugguuccuggccuacauccucuucacccgguucuucuacgugcugggccuggcggccaucaugcagcucuucuucagcuacuucgccgugcacuucaucuccaacagcuggcugauguggcugaucaucaaccugguccagauggcccccaucuccgcgauggugcgcauguacaucuucuucgccagcuucuacuacguguggaagagcuacguccacgugguggacgggugcaacuccagcaccugcaugaugugcuacaagcggaaccgcgccacgcgggucgagugcaccaccaucgugaacggcguccgccgguccuucuacguguacgccaacgggggcaagggcuucugcaagcuccacaacuggaacugcgugaacugcgacaccuucugcgccgggagcacguucaucuccgacgaggucgcgcgcgaccugagccugcaguucaagcggccgaucaaccccaccgaccaguccagcuacaucguggacuccgugaccgucaagaacggcagcauccaccucuacuucgacaaggccgggcagaagaccuacgagcgccacucccugagccacuucgugaaccuggacaaccuccgggccaacaacacgaagggcucccugcccaucaacgugaucgucuucgacgggaagagcaagugcgaggaguccagcgccaaguccgccagcguguacuacucccagcugaugugccagcccauccuccugcuggaccaggcgcucgugagcgacgucggcgacagcgccgagguggccgugaagauguucgacgccuacgucaacaccuucuccagcaccuucaacgugccgauggagaagcugaagacccugguggccacggcggaggccgagcucgccaagaacgucucccuggacaacgugcugagcaccuucaucuccgccgcgcgccagggcuucguggacagcgacgucgagaccaaggacgugguggagugccucaagcugucccaccagagcgacaucgaggucaccggggacuccugcaacaacuacaugcugacguacaacaagguggagaacaugaccccccgggaccucggcgccugcaucgacugcagcgcccgccacaucaacgcccagguggccaagucccacaacaucgcgcugaucuggaacgucaaggacuucaugagccuguccgagcagcuccggaagcagauccgcagcgccgccaagaagaacaaccugcccuucaagcugaccugcgccaccacgcgccagguggugaacgucgugaccaccaagaucgcccucaaggggggcuga

SEQ ID NO: 17879 - RNA, 5841 nt, Artificial Sequence
  SARS-CoV-2__MT811519.1__non-structural protein 3 (NSP3) CDS gc
auggcccccaccaaggugaccuucggcgacgacacggucaucgaggugcagggguacaagagcgugaacaucaccuucgagcuggacgagcgcaucgacaagguccucaacgagaagugcuccgccuacaccguggagcugggcaccgaggugaacgaguucgcgugcgucguggccgacgccgugaucaagacgcugcagccggucagcgagcuccugaccccccuggggaucgaccucgacgagugguccauggccaccuacuaccuguucgacgagagcggcgaguucaagcuggccucccacauguacugcuucuucuacccccccgacgaggacgaggaggagggggacugcgaggaggaggaguucgagccgagcacccaguacgaguacggcacggaggacgacuaccagggcaagccccucgaguucggggcgaccuccgccgcccugcagcccgaggaggagcaggaggaggacuggcuggacgacgacagccagcagaccgugggccagcaggacggguccgaggacaaccagaccacgaccauccagaccaucguggagguccagccccagcucgagauggagcugaccccgguggugcagacgaucgaggucaacagcuucuccggcuaccugaagcucaccgacaacguguacaucaagaacgccgacaucguggaggaggcgaagaaggucaagcccaccgugguggucaacgccgccaacguguaccugaagcacgggggcggcguggccggggcccugaacaaggcgaccaacaacgccaugcaggucgagagcgacgacuacaucgccacgaacggcccccucaagguggggggcuccugcguccugagcggccacaaccuggccaagcacugccuccacgugguggggcccaacgucaacaagggcgaggacauccagcugcugaaguccgccuacgagaacuucaaccagcacgaggugcuccuggcgccgcugcucagcgccgggaucuucggcgccgaccccauccacucccugcgggugugcgucgacaccgugcgcaccaacguguaccuggccgucuucgacaagaaccucuacgacaagcuggugagcuccuuccuggagaugaagagcgagaagcagguggagcagaagaucgccgagauccccaaggaggaggucaagcccuucaucaccgagagcaagccguccguggagcagcggaagcaggacgacaagaagaucaaggcgugcguggaggaggucacgaccacccucgaggagaccaaguuccugacggagaaccugcuccuguacaucgacaucaacgggaaccugcaccccgacagcgccacccucguguccgacaucgacaucaccuuccugaagaaggacgcccccuacaucgugggcgacgucgugcaggagggcgugcugaccgccgucgugauccccacgaagaaggccgggggcaccaccgagaugcucgcgaaggcccugcgcaaggugccgaccgacaacuacaucacgaccuaccccgggcagggccugaacggguacaccgucgaggaggccaagaccgugcucaagaagugcaagagcgccuucuacauccugcccuccaucaucagcaacgagaagcaggagauccugggcaccguguccuggaaccuccgggagaugcuggcgcacgccgaggagacgcgcaagcugaugcccgucugcguggagaccaaggccaucgugagcaccauccagcggaaguacaagggcaucaagauccaggagggggucguggacuacggcgcccgcuucuacuucuacaccuccaagacgaccguggccagccugaucaacacccucaacgaccugaacgagacccuggucacgaugccgcucggguacgugacccacggccugaaccuggaggaggcggcccgguacaugcgcucccucaaggugcccgccaccgucagcguguccagccccgacgccgugaccgccuacaacggguaccugacguccagcuccaagacccccgaggagcacuucaucgagaccaucagccuggcgggcuccuacaaggacuggagcuacagcggccaguccacccagcucgggaucgaguuccugaagcggggcgacaagagcgucuacuacacguccaacccgaccaccuuccaccuggacggggaggugaucaccuucgacaaccucaagacgcugcugagccuccgcgaggugcggaccaucaaggucuucaccaccguggacaacaucaaccugcacacgcagguggucgacauguccaugaccuacggccagcaguucggccccaccuaccuggacggggccgacgugaccaagaucaagccccacaacagccacgagggcaagacguucuacgugcucccgaacgacgacacccugcgcgucgaggccuucgaguacuaccacaccaccgaccccuccuuccuggggcgguacaugagcgcccucaaccacacgaagaaguggaaguacccccaggugaacggccugaccuccaucaagugggccgacaacaacugcuaccuggcgaccgcccuccugacccugcagcagaucgagcucaaguucaaccccccggcccugcaggacgccuacuaccgcgcgcgggccggggaggccgccaacuucugcgcccugauccucgcguacugcaacaagacggugggcgagcugggcgacguccgcgagaccaugagcuaccuguuccagcacgccaaccucgacuccugcaagcgggugcugaacgucgugugcaagaccugcgggcagcagcagaccacccugaagggcguggaggccgucauguacauggggacgcucagcuacgagcaguucaagaagggcgugcagauccccugcaccugcgggaagcaggccaccaaguaccuggugcagcaggagucccccuucgucaugaugagcgcccccccggcgcaguacgagcugaagcacggcaccuucacgugcgccuccgaguacaccggcaacuaccagugcgggcacuacaagcacaucaccagcaaggagacccucuacugcaucgacggcgcccugcugacgaaguccagcgaguacaaggggcccaucaccgacguguucuacaaggagaacagcuacaccaccacgaucaagcccgugaccuacaagcucgacggcgucgugugcaccgagaucgaccccaagcuggacaacuacuacaagaaggacaacuccuacuucaccgagcagccgaucgaccuggugcccaaccagcccuaccccaacgccagcuucgacaacuucaaguucgucugcgacaacaucaaguucgccgacgaccucaaccagcugacgggguacaagaagccggcgucccgcgagcugaaggugaccuucuuccccgaccucaacggcgacguggucgccaucgacuacaagcacuacacccccagcuucaagaagggcgccaagcugcugcacaagcccaucguguggcacgugaacaacgccaccaacaaggcgacguacaagccgaacaccuggugcauccggugccucugguccaccaagcccgucgagaccagcaacuccuucgacgugcugaagagcgaggacgcccaggggauggacaaccuggccugcgaggaccucaagcccguguccgaggaggucguggagaaccccacgauccagaaggacgugcuggagugcaacgucaagaccaccgagguggugggcgacaucauccugaagccggccaacaacagccucaagaucaccgaggaggucgggcacacggaccugauggccgcguacguggacaacuccagccugaccaucaagaagcccaacgagcucucccgcgugcugggccugaagacccucgccacccacgggcuggccgccgucaacagcgugcccugggacacgaucgccaacuacgcgaagccguuccugaacaagguggucuccaccaccaccaacaucgugacgcgcugccucaaccgggugugcaccaacuacaugcccuacuucuucacccugcugcuccagcugugcaccuucacccgcagcacgaacucccggaucaaggccagcaugcccaccaccaucgccaagaacaccgucaaguccgugggcaaguucugccuggaggccagcuucaacuaccucaagagccccaacuucuccaagcugaucaacaucaucaucugguuccugcuccugagcgugugccugggcucccucaucuacagcacggccgcgcuggggguccugauguccaaccucggcaugccgagcuacugcaccggguaccgcgagggcuaccugaacuccaccaacgugaccaucgccacguacugcaccggcagcauccccugcuccgugugccugagcgggcucgacucccuggacaccuaccccagccuggagaccauccagaucacgaucuccagcuucaagugggaccucaccgccuucggccuggucgccgagugguuccuggccuacauccucuucacccgguucuucuacgugcuggggcuggcggccaucaugcagcucuucuucuccuacuucgccgugcacuucaucagcaacuccuggcugauguggcugaucaucaaccugguccagauggcccccaucagcgcgauggugcgcauguacaucuucuucgccuccuucuacuacguguggaagagcuacguccacgugguggacggcugcaacagcuccaccugcaugaugugcuacaagcggaaccgcgccacgcgggucgagugcaccaccaucgugaacgggguccgccggagcuucuacguguacgccaacggcggcaagggguucugcaagcuccacaacuggaacugcgugaacugcgacaccuucugcgccggcuccacguucaucagcgacgaggucgcgcgcgaccugucccugcaguucaagcggccgaucaaccccaccgaccagagcuccuacaucguggacagcgugaccgucaagaacggguccauccaccucuacuucgacaaggccggccagaagaccuacgagcgccacagccugucccacuucgugaaccuggacaaccuccgggccaacaacacgaaggggagccugcccaucaacgugaucgucuucgacggcaaguccaagugcgaggagagcuccgccaagagcgccuccguguacuacagccagcugaugugccagcccauccuccugcuggaccaggcgcucguguccgacgucggcgacagcgccgagguggccgugaagauguucgacgccuacgucaacaccuucagcuccaccuucaacgugccgauggagaagcugaagacccugguggccacggcggaggccgagcucgccaagaacgucagccuggacaacgugcuguccaccuucaucagcgccgugcgccagggguucgucgacuccgacguggagaccaaggacguggucgagugccucaagcugagccaccaguccgacaucgaggugaccggcgacagcugcaacaacuacaugcugacguacaacaagguggagaacaugaccccccgggaccucggggcgugcaucgacugcuccgcccgccacaucaacgcccaggucgccaagagccacaacaucgcccugaucuggaacgugaaggacuucaugucccugagcgagcagcuccggaagcagauccgcuccgcggccaagaagaacaaccugcccuucaagcugaccugcgccaccacgcgccagguggucaacguggugaccaccaagaucgcccucaagggcggguga

SEQ ID NO: 17880 - RNA, 5841 nt, Artificial Sequence
  SARS-CoV-2__MT811521.1__non-structural protein 3 (NSP3) CDS gc
auggcccccaccaaggugaccuucggcgacgacacggucaucgaggugcagggguacaagagcgugaacaucaccuucgagcuggacgagcgcaucgacaagguccucaacgagaagugcuccgccuacaccguggagcugggcaccgaggugaacgaguucgcgugcgucguggccgacgccgugaucaagacgcugcagccggucagcgagcuccugaccccccuggggaucgaccucgacgagugguccauggccaccuacuaccuguucgacgagagcggcgaguucaagcuggccucccacauguacugcagcuucuacccccccgacgaggacgaggaggagggggacugcgaggaggaggaguucgagccguccacccaguacgaguacggcacggaggacgacuaccagggcaagccccucgaguucggggcgaccagcgccgcccugcagcccgaggaggagcaggaggaggacuggcuggacgacgacucccagcagaccgugggccagcaggacgggagcgaggacaaccagaccacgaccauccagaccaucguggagguccagccccagcucgagauggagcugaccccgguggugcagacgaucgaggucaacuccuucagcggcuaccugaagcucaccgacaacguguacaucaagaacgccgacaucguggaggaggcgaagaaggucaagcccaccgugguggucaacgccgccaacguguaccugaagcacgggggcggcguggccggggcccugaacaaggcgaccaacaacgccaugcaggucgaguccgacgacuacaucgccacgaacggcccccucaagguggggggcagcugcguccuguccggccacaaccuggccaagcacugccuccacgugguggggcccaacgucaacaagggcgaggacauccagcugcugaagagcgccuacgagaacuucaaccagcacgaggugcuccuggcgccgcugcucuccgccgggaucuucggcgccgaccccauccacagccugcgggugugcgucgacaccgugcgcaccaacguguaccuggccgucuucgacaagaaccucuacgacaagcugguguccagcuuccuggagaugaagagcgagaagcagguggagcagaagaucgccgagauccccaaggaggaggucaagcccuucaucaccgaguccaagccgagcguggagcagcggaagcaggacgacaagaagaucaaggcgugcguggaggaggucacgaccacccucgaggagaccaaguuccugacggagaaccugcuccuguacaucgacaucaacgggaaccugcaccccgacuccgccacccucgugagcgacaucgacaucaccuuccugaagaaggacgcccccuacaucgugggcgacgucgugcaggagggcgugcugaccgccgucgugauccccacgaagaaggccgggggcaccaccgagaugcucgcgaaggcccugcgcaaggugccgaccgacaacuacaucacgaccuaccccgggcagggccugaacggguacaccgucgaggaggccaagaccgugcucaagaagugcaaguccgccuucuacauccugcccagcaucaucuccaacgagaagcaggagauccugggcaccgugagcuggaaccuccgggagaugcuggcgcacgccgaggagacgcgcaagcugaugcccgucugcguggagaccaaggccaucguguccaccauccagcggaaguacaagggcaucaagauccaggagggggucguggacuacggcgcccgcuucuacuucuacaccagcaagacgaccguggccucccugaucaacacccucaacgaccugaacgagacccuggucacgaugccgcucggguacgugacccacggccugaaccuggaggaggcggcccgguacaugcgcagccucaaggugcccgccaccgucuccgugagcucccccgacgccgugaccgccuacaacggguaccugacgagcuccagcaagacccccgaggagcacuucaucgagaccaucucccuggcgggcagcuacaaggacuggagcuacuccggccagagcacccagcucgggaucgaguuccugaagcggggcgacaaguccgucuacuacacgagcaacccgaccaccuuccaccuggacggggaggugaucaccuucgacaaccucaagacgcugcugucccuccgcgaggugcggaccaucaaggucuucaccaccguggacaacaucaaccugcacacgcagguggucgacaugagcaugaccuacggccagcaguucggccccaccuaccuggacggggccgacgugaccaagaucaagccccacaacucccacgagggcaagacguucuacgugcucccgaacgacgacacccugcgcgucgaggccuucgaguacuaccacaccaccgaccccagcuuccuggggcgguacauguccgcccucaaccacacgaagaaguggaaguacccccaggugaacggccugaccagcaucaagugggccgacaacaacugcuaccuggcgaccgcccuccugacccugcagcagaucgagcucaaguucaaccccccggcccugcaggacgccuacuaccgcgcgcgggccggggaggccgccaacuucugcgcccugauccucgcguacugcaacaagacggugggcgagcugggcgacguccgcgagaccauguccuaccuguuccagcacgccaaccucgacagcugcaagcgggugcugaacgucgugugcaagaccugcgggcagcagcagaccacccugaagggcguggaggccgucauguacauggggacgcucuccuacgagcaguucaagaagggcgugcagauccccugcaccugcgggaagcaggccaccaaguaccuggugcagcaggagagccccuucgucaugauguccgcccccccggcgcaguacgagcugaagcacggcaccuucacgugcgccagcgaguacaccggcaacuaccagugcgggcacuacaagcacaucaccuccaaggagacccucuacugcaucgacggcgcccugcugacgaagagcagcgaguacaaggggcccaucaccgacguguucuacaaggagaacuccuacaccaccacgaucaagcccgugaccuacaagcucgacggcgucgugugcaccgagaucgaccccaagcuggacaacuacuacaagaaggacaacagcuacuucaccgagcagccgaucgaccugauccccaaccagcccuaccccaacgccuccuucgacaacuucaaguucgugugcgacaacaucaaguucgccgacgaccucaaccagcugacgggguacaagaagccggcgagccgcgagcugaaggucaccuucuuccccgaccucaacggcgacgugguggccaucgacuacaagcacuacacccccuccuucaagaagggcgccaagcugcugcacaagcccaucgucuggcacgugaacaacgccaccaacaaggcgacguacaagccgaacaccuggugcauccggugccucuggagcaccaagcccguggagaccuccaacagcuucgacguccugaaguccgaggacgcccaggggauggacaaccuggccugcgaggaccucaagcccgugagcgaggagguggucgagaaccccacgauccagaaggacgugcuggagugcaacgugaagaccaccgaggucgugggcgacaucauccugaagccggccaacaacucccucaagaucaccgaggagguggggcacacggaccugauggccgcguacgucgacaacagcucccugaccaucaagaagcccaacgagcucagccgcgugcugggccugaagacccucgccacccacgggcuggccgccgccaacuccgugcccugggacacgaucgcgaacuacgccaagccguuccugaacaaggucgugagcaccaccaccaacaucgugacgcgcugccucaaccgggucugcaccaacuacaugcccuacuucuucacccugcugcuccagcugugcaccuucacccgcuccacgaacagccggaucaaggccuccaugcccaccaccaucgccaagaacaccgugaagagcgugggcaaguucugccuggaggccagcuucaacuaccucaagucccccaacuucagcaagcugaucaacaucaucaucugguuccugcuccuguccgucugccugggcagccucaucuacuccacggcggcccugggggugcugaugagcaaccucggcaugccguccuacugcaccggguaccgcgagggcuaccugaacagcaccaacgugaccaucgccacguacugcaccggcuccauccccugcagcgucugccuguccgggcucgacagccuggacaccuaccccucccuggagaccauccagaucacgaucagcuccuucaagugggaccucaccgccuucggccugguggccgagugguuccuggcguacauccucuucacccgguucuucuacgugcuggggcuggccgccaucaugcagcucuucuucagcuacuucgccguccacuucaucuccaacagcuggcugauguggcugaucaucaaccuggugcagauggcgcccaucuccgccauggugcgcauguacaucuucuucgccagcuucuacuacgucuggaagagcuacgugcacguggucgacggcugcaacuccagcaccugcaugaugugcuacaagcggaaccgcgccacgcggguggagugcaccaccaucgugaacgggguccgccgguccuucuacguguacgccaacggcggcaagggguucugcaagcuccacaacuggaacugcgucaacugcgacaccuucugcgcgggcagcacguucaucuccgacgagguggcccgcgaccugagccugcaguucaagcggccgaucaaccccaccgaccaguccagcuacaucguggacuccgucaccgugaagaacgggagcauccaccucuacuucgacaaggccggccagaagaccuacgagcgccacucccugagccacuucgugaaccuggacaaccuccgggccaacaacacgaaggggucccugcccaucaacgucaucguguucgacggcaagagcaagugcgaggaguccagcgccaaguccgcgagcguguacuacucccagcugaugugccagcccauccuccugcuggaccaggcccucgucagcgacgugggcgacagcgccgagguggccgucaagauguucgacgccuacgugaacaccuucuccagcaccuucaacgugccgauggagaagcugaagacccuggucgcgacggccgaggccgagcucgccaagaacgugucccuggacaacgugcugagcaccuucaucuccgcggcccgccagggguucgucgacagcgacguggagaccaaggacguggucgagugccucaagcugucccaccagagcgacaucgaggugaccggcgacuccugcaacaacuacaugcugacguacaacaagguggagaacaugaccccccgggaccucggggccugcaucgacugcagcgcccgccacaucaacgcccaggucgcgaagucccacaacaucgcccugaucuggaacgugaaggacuucaugagccuguccgagcagcuccggaagcagauccgcagcgccgccaagaagaacaaccugcccuucaagcugaccugcgccaccacgcgccagguggucaacguggugaccaccaagaucgcgcucaagggcggguga

SEQ ID NO: 17881 - RNA, 5841 nt, Artificial Sequence
  SARS-CoV-2__MT811528.1__non-structural protein 3 (NSP3) CDS gc
auggcccccaccaaggugaccuucggcgacgacacggucaucgaggugcagggguacaagagcgugaacaucaccuucgagcuggacgagcgcaucgacaagguccucaacgagaagugcuccgccuacaccguggagcugggcaccgaggugaacgaguucgcgugcgucguggccgacgccgugaucaagacgcugcagccggucagcgagcuccugaccccccuggggaucgaccucgacgagugguccauggccaccuacuaccuguucgacgagagcggcgaguucaagcuggccucccacauguacugcagcuucuacccccccgacgaggacgaggaggagggggacugcgaggaggaggaguucgagccguccacccaguacgaguacggcacggaggacgacuaccagggcaagccccucgaguucggggcgaccagcgccgcccugcagcccgaggaggagcaggaggaggacuggcuggacgacgacucccagcagaccgugggccagcaggacgggagcgaggacaaccagaccacgaccauccagaccaucguggagguccagccccagcucgagauggagcugaccccgguggugcagacgaucgaggucaacuccuucagcggcuaccugaagcucaccgacaacguguacaucaagaacgccgacaucguggaggaggcgaagaaggucaagcccaccgugguggucaacgccgccaacguguaccugaagcacgggggcggcguggccggggcccugaacaaggcgaccaacaacgccaugcaggucgaguccgacgacuacaucgccacgaacggcccccucaagguggggggcagcugcguccuguccggccacaaccuggccaagcacugccuccacgugguggggcccaacgucaacaagggcgaggacauccagcugcugaagagcgccuacgagaacuucaaccagcacgaggugcuccuggcgccgcugcucuccgccgggaucuucggcgccgaccccauccacagccugcgggugugcgucgacaccgugcgcaccaacguguaccuggccgucuucgacaagaaccucuacgacaagcugguguccagcuuccuggagaugaagagcgagaagcagguggagcagaagaucgccgagauccccaaggaggaggucaagcccuucaucaccgaguccaagccgagcguggagcagcggaagcaggacgacaagaagaucaaggcgugcguggaggaggucacgaccacccucgaggagaccaaguuccugacggagaaccugcuccuguacaucgacaucaacgggaaccugcaccccgacuccgccacccucgugagcgacaucgacaucaccuuccugaagaaggacgcccccuacaucgugggcgacgucgugcaggagggcgugcugaccgccgucgugauccccacgaagaaggccgggggcaccaccgagaugcucgcgaaggcccugcgcaaggugccgaccgacaacuacaucacgaccuaccccgggcagggccugaacggguacaccgucgaggaggccaagaccgugcucaagaagugcaaguccgccuucuacauccugcccagcaucaucuccaacgagaagcaggagauccugggcaccgugagcuggaaccuccgggagaugcuggcgcacgccgaggagacgcgcaagcugaugcccgucugcguggagaccaaggccaucguguccaccauccagcggaaguacaagggcaucaagauccaggagggggucguggacuacggcgcccgcuucuacuucuacaccagcaagacgaccguggccucccugaucaacacccucaacgaccugaacgagacccuggucacgaugccgcucggguacgugacccacggccugaaccuggaggaggcggcccgguacaugcgcagccucaaggugcccgccaccgucuccgugagcucccccgacgccgugaccgccuacaacggguaccugacgagcuccagcaagacccccgaggagcacuucaucgagaccaucucccuggcgggcagcuacaaggacuggagcuacuccggccagagcacccagcucgggaucgaguuccugaagcggggcgacaaguccgucuacuacacgagcaacccgaccaccuuccaccuggacggggaggugaucaccuucgacaaccucaagacgcugcugucccuccgcgaggugcggaccaucaaggucuucaccaccguggacaacaucaaccugcacacgcagguggucgacaugagcaugaccuacggccagcaguucggccccaccuaccuggacggggccgacgugaccaagaucaagccccacaacucccacgagggcaagacguucuacgugcucccgaacgacgacacccugcgcgucgaggccuucgaguacuaccacaccaccgaccccagcuuccuggggcgguacauguccgcccucaaccacacgaagaaguggaaguacccccaggugaacggccugaccagcaucaagugggccgacaacaacugcuaccuggcgaccgcccuccugacccugcagcagaucgagcucaaguucaaccccccggcccugcaggacgccuacuaccgcgcgcgggccggggaggccgccaacuucugcgcccugauccucgcguacugcaacaagacggugggcgagcugggcgacguccgcgagaccauguccuaccuguuccagcacgccaaccucgacagcugcaagcgggugcugaacgucgugugcaagaccugcgggcagcagcagaccacccugaagggcguggaggccgucauguacauggggacgcucuccuacgagcaguucaagaagggcgugcagauccccugcaccugcgggaagcaggccaccaaguaccuggugcagcaggagagccccuucgucaugauguccgcccccccggcgcaguacgagcugaagcacggcaccuucacgugcgccagcgaguacaccggcaacuaccagugcgggcacuacaagcacaucaccuccaaggagacccucuacugcaucgacggcgcccugcugacgaagagcagcgaguacaaggggcccaucaccgacguguucuacaaggagaacuccuacaccaccacgaucaagcccgugaccuacaagcucgacggcgucgugugcaccgagaucgaccccaagcuggacaacuacuacaagaaggacaacagcuacuucaccgagcagccgaucgaccuggugcccaaccagcccuaccccaacgccuccuucgacaacuucaaguucgucugcgacaacaucaaguucgccgacgaccucaaccagcugacgggguacaagaagccggcgagccgcgagcugaaggugaccuucuuccccgaccucaacggcgacguggucgccaucgacuacaagcacuacacccccuccuucaagaagggcgccaagcugcugcacaagcccaucguguggcacgugaacaacgccaccaacaaggcgacguacaagccgaacaccuggugcauccggugccucuggagcaccaagcccgucgagaccuccaacagcuucgacgugcugaaguccgaggacgcccaggggauggacaaccuggccugcgaggaccucaagcccgugagcgaggaggucguggagaaccccacgauccagaaggacgugcuggagugcaacgucaagaccaccgagguggugggcgacaucauccugaagccggccaacaacucccucaagaucaccgaggaggucgggcacacggaccugauggccgcguacguggacaacagcucccugaccaucaagaagcccaacgagcucagccgcgugcugggccugaagacccucgccacccacgggcuggccgccgucaacuccgugcccugggacacgaucgccaacuacgcgaagccguuccugaacaagguggucagcaccaccaccaacaucgugacgcgcugccucaaccgggugugcaccaacuacaugcccuacuucuucacccugcugcuccagcugugcaccuucacccgcuccacgaacagccggaucaaggccuccaugcccaccaccaucgccaagaacaccgucaagagcgugggcaaguucugccuggaggccagcuucaacuaccucaagucccugaacuucagcaagcugaucaacaucaucaucugguuccuccugcuguccgugugccucggcagccugaucuacuccacggccgcgcuggggguccucaugagcaaccugggcaugcccuccuacugcaccggguaccgcgagggcuaccugaacagcaccaacgugaccaucgccacguacugcaccggcuccaucccgugcagcgugugccucuccgggcuggacagccuggacaccuaccccucccucgagaccauccagaucacgaucagcuccuucaagugggaccugaccgccuucggccuggucgccgagugguuccucgccuacauccuguucacccgguucuucuacgugcuggggcucgcggccaucaugcagcuguucuucagcuacuucgccgugcacuucaucuccaacagcuggcugauguggcugaucaucaaccucguccagauggcccccaucuccgcgauggugcgcauguacaucuucuucgccagcuucuacuacguguggaagagcuacguccacgugguggacggcugcaacuccagcaccugcaugaugugcuacaagcggaaccgcgccacgcgggucgagugcaccaccaucgugaacgggguccgccgguccuucuacguguacgccaacggcggcaagggguucugcaagcugcacaacuggaacugcgugaacugcgacaccuucugcgccggcagcacguucaucuccgacgaggucgcgcgcgaccugagccuccaguucaagcggcccaucaacccgaccgaccaguccagcuacaucguggacuccgugaccgucaagaacgggagcauccaccuguacuucgacaaggccggccagaagaccuacgagcgccacucccugagccacuucgugaaccucgacaaccugcgggccaacaacacgaaggggucccugcccaucaacgugaucgucuucgacggcaagagcaagugcgaggaguccagcgccaaguccgccagcguguacuacucccagcucaugugccagcccauccugcugcucgaccaggcgcuggugagcgacgucggcgacagcgccgagguggccgugaagauguucgacgccuacgucaacaccuucuccagcaccuucaacgugcccauggagaagcugaagacccucguggccacggcggaggccgagcuggccaagaacgucucccuggacaacgugcucagcaccuucaucuccgccgcgcgccagggguucguggacagcgacgucgagaccaaggacgugguggagugccugaagcugucccaccagagcgacaucgaggucaccggcgacuccugcaacaacuacaugcucacguacaacaagguggagaacaugaccccgcgggaccugggggccugcaucgacugcagcgcccgccacaucaacgcccagguggccaagucccacaacaucgcgcugaucuggaacgucaaggacuucaugagccucuccgagcagcugcggaagcagauccgcagcgccgccaagaagaacaaccugcccuucaagcucaccugcgccaccacgcgccagguggugaacgucgugaccaccaagaucgcccugaagggcggguga

SEQ ID NO: 17882 - RNA, 5841 nt, Artificial Sequence
  SARS-CoV-2__MT811530.1__non-structural protein 3 (NSP3) CDS gc
auggcccccaccaaggugaccuucggcgacgacacggucaucgaggugcagggguacaagagcgugaacaucaccuucgagcuggacgagcgcaucgacaagguccucaacgagaagugcuccgccuacaccguggagcugggcaccgaggugaacgaguucgcgugcgucguggccgacgccgugaucaagacgcugcagccggucagcgagcuccugaccccccuggggaucgaccucgacgagugguccauggccaccuacuaccuguucgacgagagcggcgaguucaagcuggccucccacauguacugcagcuucuacccccccgacgaggacgaggaggagggggacugcgaggaggaggaguucgagccguccacccaguacgaguacggcacggaggacgacuaccagggcaagccccucgaguucggggcgaccagcgccgcccugcagcccgaggaggagcaggaggaggacuggcuggacgacgacucccagcagaccgugggccagcaggacgggagcgaggacaaccagaccacgaccauccagaccaucguggagguccagccccagcucgagauggagcugaccccgguggugcagacgaucgaggucaacuccuucagcggcuaccugaagcucaucgacaacguguacaucaagaacgccgacaucguggaggaggcgaagaaggucaagcccaccgugguggucaacgccgccaacguguaccugaagcacgggggcggcguggccggggcccugaacaaggcgaccaacaacgccaugcaggucgaguccgacgacuacaucgccaccaacggcccccucaagguggggggcagcugcguccuguccggccacaaccuggccaagcacugccuccacgugguggggcccaacgucaacaagggcgaggacauccagcugcugaagagcgccuacgagaacuucaaccagcacgaggugcuccuggcgccgcugcucuccgccgggaucuucggcgccgaccccauccacagccugcgggugugcgucgacacggugcgcaccaacguguaccuggccgucuucgacaagaaccucuacgacaagcugguguccagcuuccuggagaugaagagcgagaagcagguggagcagaagaucgccgagauccccaaggaggaggucaagcccuucaucaccgaguccaagccgagcguggagcagcggaagcaggacgacaagaagaucaaggcgugcguggaggaggucaccacgacccucgaggagaccaaguuccugaccgagaaccugcuccuguacaucgacaucaacgggaaccugcaccccgacuccgccacgcucgugagcgacaucgacaucaccuuccugaagaaggacgcccccuacaucgugggcgacgucgugcaggagggcgugcugaccgccgucgugauccccaccaagaaggccgggggcacgaccgagaugcucgcgaaggcccugcgcaaggugccgaccgacaacuacaucaccacguaccccgggcagggccugaacggguacaccgucgaggaggccaagaccgugcucaagaagugcaaguccgccuucuacauccugcccagcaucaucuccaacgagaagcaggagauccugggcaccgugagcuggaaccuccgggagaugcuggcgcacgccgaggagacccgcaagcugaugcccgucugcguggagacgaaggccaucguguccaccauccagcggaaguacaagggcaucaagauccaggagggggucguggacuacggcgcccgcuucuacuucuacaccagcaagaccacgguggccucccugaucaacacccucaacgaccugaacgagacccuggucaccaugccgcucggguacgugacgcacggccugaaccuggaggaggcggcccgguacaugcgcagccucaaggugcccgccaccgucuccgugagcucccccgacgccgugaccgccuacaacggguaccugaccagcuccagcaagacgcccgaggagcacuucaucgagaccaucucccuggcgggcagcuacaaggacuggagcuacuccggccagagcacccagcucgggaucgaguuccugaagcggggcgacaaguccgucuacuacaccagcaacccgacgaccuuccaccuggacggggaggugaucaccuucgacaaccucaagacccugcugucccuccgcgaggugcggacgaucaaggucuucaccaccguggacaacaucaaccugcacacccagguggucgacaugagcaugacguacggccagcaguucggccccaccuaccuggacggggccgacgugaccaagaucaagccccacaacucccacgagggcaagaccuucuacgugcucccgaacgacgacacgcugcgcgucgaggccuucgaguacuaccacaccaccgaccccagcuuccuggggcgguacauguccgcccucaaccacaccaagaaguggaaguacccccaggugaacggccugacgagcaucaagugggccgacaacaacugcuaccuggcgaccgcccuccugacccugcagcagaucgagcucaaguucaaccccccggcccugcaggacgccuacuaccgcgcgcgggccggggaggccgccaacuucugcgcccugauccucgcguacugcaacaagaccgugggcgagcugggcgacguccgcgagacgauguccuaccuguuccagcacgccaaccucgacagcugcaagcgggugcugaacgucgugugcaagaccugcgggcagcagcagaccacccugaagggcguggaggccgucauguacauggggacccucuccuacgagcaguucaagaagggcgugcagauccccugcacgugcgggaagcaggccaccaaguaccuggugcagcaggagagccccuucgucaugauguccgcccccccggcgcaguacgagcugaagcacggcaccuucaccugcgccagcgaguacacgggcaacuaccagugcgggcacuacaagcacaucaccuccaaggagacccucuacugcaucgacggcgcccugcugaccaagagcagcgaguacaaggggcccaucacggacguguucuacaaggagaacuccuacaccaccaccaucaagcccgugacguacaagcucgacggcgucgugugcaccgagaucgaccccaagcuggacaacuacuacaagaaggacaacagcuacuucaccgagcagccgaucgaccuggugcccaaccagcccuaccccaacgccuccuucgacaacuucaaguucgucugcgacaacaucaaguucgccgacgaccucaaccagcugaccggguacaagaagccggcgagccgcgagcugaaggugacguucuuccccgaccucaacggcgacguggucgccaucgacuacaagcacuacacccccuccuucaagaagggcgccaagcugcugcacaagcccaucguguggcacgugaacaacgccaccaacaaggcgaccuacaagccgaacacguggugcauccggugccucuggagcaccaagcccgucgagaccuccaacagcuucgacgugcugaaguccgaggacgcccaggggauggacaaccuggccugcgaggaccucaagcccgugagcgaggaggucguggagaaccccaccauccagaaggacgugcuggagugcaacgucaagacgaccgagguggugggcgacaucauccugaagccggccaacaacucccucaagaucaccgaggaggucgggcacaccgaccugauggccgcguacguggacaacagcucccugacgaucaagaagcccaacgagcucagccgcgugcugggccugaagacccucgccacccacgggcuggccgccgucaacuccgugcccugggacaccaucgccaacuacgcgaagccguuccugaacaagguggucagcacgaccaccaacaucgugacccgcugccucaaccgggugugcacgaacuacaugcccuacuucuucacccugcugcuccagcugugcaccuucacccgcuccaccaacagccggaucaaggccuccaugcccacgaccaucgccaagaacaccgucaagagcgugggcaaguucugccuggaggccagcuucaacuaccucaagucccccaacuucagcaagcugaucaacaucaucaucugguuccugcuccuguccgugugccugggcagccucaucuacuccaccgccgcgcuggggguccugaugagcaaccucggcaugccguccuacugcacgggguaccgcgagggcuaccugaacagcaccaacgugaccaucgccaccuacugcacgggcuccauccccugcagcgugugccuguccgggcucgacagccuggacaccuaccccucccuggagaccauccagaucaccaucagcuccuucaagugggaccucacggccuucggccuggucgccgagugguuccuggccuacauccucuucacccgguucuucuacgugcuggggcuggcggccaucaugcagcucuucuucagcuacuucgccgugcacuucaucuccaacagcuggcugauguggcugaucaucaaccugguccagauggcccccaucuccgcgauggugcgcauguacaucuucuucgccagcuucuacuacguguggaagagcuacguccacgugguggacggcugcaacuccagcaccugcaugaugugcuacaagcggaaccgcgccacccgggucgagugcacgaccaucgugaacgggguccgccgguccuucuacguguacgccaacggcggcaagggguucugcaagcuccacaacuggaacugcgugaacugcgacaccuucugcgccggcagcaccuucaucuccgacgaggucgcgcgcgaccugagccugcaguucaagcggccgaucaaccccacggaccaguccagcuacaucguggacuccgugaccgucaagaacgggagcauccaccucuacuucgacaaggccggccagaagaccuacgagcgccacucccugagccacuucgugaaccuggacaaccuccgggccaacaacaccaaggggucccugcccaucaacgugaucgucuucgacggcaagagcaagugcgaggaguccagcgccaaguccgccagcguguacuacucccagcugaugugccagcccauccuccugcuggaccaggcgcucgugagcgacgucggcgacagcgccgagguggccgugaagauguucgacgccuacgucaacacguucuccagcaccuucaacgugccgauggagaagcugaagacccugguggccaccgcggaggccgagcucgccaagaacgucucccuggacaacgugcugagcacguucaucuccgccgcgcgccagggguucguggacagcgacgucgagaccaaggacgugguggagugccucaagcugucccaccagagcgacaucgaggucaccggcgacuccugcaacaacuacaugcugaccuacaacaagguggagaacaugacgccccgggaccucggggccugcaucgacugcagcgcccgccacaucaacgcccagguggccaagucccacaacaucgcgcugaucuggaacgucaaggacuucaugagccuguccgagcagcuccggaagcagauccgcagcgccgccaagaagaacaaccugcccuucaagcugaccugcgccaccacccgccagguggugaacgucgugacgaccaagaucgcccucaagggcggguga

SEQ ID NO: 17883 - RNA, 5841 nt, Artificial Sequence
  SARS-CoV-2__MT811552.1__non-structural protein 3 (NSP3) CDS gc
auggcccccaccaaggugaccuucggcgacgacacggucaucgaggugcagggguacaagagcgugaacaucaccuucgagcuggacgagcgcaucgacaagguccucaacgagaagugcuccgccuacaccguggagcugggcaccgaggugaacgaguucgcgugcgucguggccgacgccgugaucaagacgcugcagccggucagcgagcuccugaccccccuggggaucgaccucgacgagugguccauggccaccuacuaccuguucgacgagagcggcgaguucaagcuggccucccacauguacugcagcuucuacccccccgacgaggacgaggaggagggggacugcgaggaggaggaguucgagccguccacccaguacgaguacggcacggaggacgacuaccagggcaagccccucgaguucggggcgaccagcgccgcccugcagcccgaggaggagcaggaggaggacuggcuggacgacgacucccagcagaccgugggccagcaggacgggagcgaggacaaccagaccacgaccauccagaccaucguggagguccagccccagcucgagauggagcugaccccgguggugcagacgaucgaggucaacuccuucagcggcuaccugaagcucaccgacaacguguacaucaagaacgccgacaucguggaggaggcgaagaaggucaagcccaccgugguggucaacgccgccaacguguaccugaagcacgggggcggcguggccggggcccugaacaaggcgaccaacaacgccaugcaggucgaguccgacgacuacaucgccacgaacggcccccucaagguggggggcagcugcguccuguccggccacaaccuggccaagcacugccuccacgugguggggcccaacgucaacaagggcgaggacauccagcugcugaagagcgccuacgagaacuucaaccagcacgaggugcuccuggcgccgcugcucuccgccgggaucuucggcgccgaccccauccacagccugcgggugugcgucgacaccgugcgcaccaacguguaccuggccgucuucgacaagaaccucuacgacaagcugguguccagcuuccuggagaugaagagcgagaagcagguggagcagaagaucgccgagauccccaaggaggaggucaagcccuucaucaccgaguccaagccgagcguggagcagcggaagcaggacgacaagaagaucaaggcgugcguggaggaggucacgaccacccucgaggagaccaaguuccugacggagaaccugcuccuguacaucgacaucaacgggaaccugcaccccgacuccgccacccucgugagcgacaucgacaucaccuuccugaagaaggacgcccccuacaucgugggcgacgucgugcaggagggcgugcugaccgccgucgugauccccacgaagaaggccgggggcaccaccgagaugcucgcgaaggcccugcgcaaggugccgaccgacaacuacaucacgaccuaccccgggcagggccugaacggguacaccgucgaggaggccaagaccgugcucaagaagugcaaguccgccuucuacauccugcccagcaucaucuccaacgagaagcaggagauccugggcaccgugagcuggaaccuccgggagaugcuggcgcacgccgaggagacgcgcaagcugaugcccgucugcguggagaccaaggccaucguguccaccauccagcggaaguacaagggcaucaagauccaggagggggucguggacuacggcgcccgcuucuacuucuacaccagcaagacgaccguggccucccugaucaacacccucaacgaccugaacgagacccuggucacgaugccgcucggguacgugacccacggccugaaccuggaggaggcggcccgguacaugcgcagccucaaggugcccgccaccgucuccgugagcucccccgacgccgugaccgccuacaacggguaccugacgagcuccagcaagacccccgaggagcacuucaucgagaccaucucccuggcgggcagcuacaaggacuggagcuacuccggccagagcacccagcucgggaucgaguuccugaagcggggcgacaaguccgucuacuacacgagcaacccgaccaccuuccaccuggacggggaggugaucaccuucgacaaccucaagacgcugcugucccuccgcgaggugcggaccaucaaggucuucaccaccguggacaacaucaaccugcacacgcagguggucgacaugagcaugaccuacggccagcaguucggccccaccuaccuggacggggccgacgugaccaagaucaagccccacaacucccacgagggcaagacguucuacgugcucccgaacgacgacacccugcgcgucgaggccuucgaguacuaccacaccaccgaccccagcuuccuggggcgguacauguccgcccucaaccacacgaagaaguggaaguacccccaggugaacggccugaccagcaucaagugggccgacaacaacugcuaccuggcgaccgcccuccugacccugcagcagaucgagcucaaguucaaccccccggcccugcaggacgccuacuaccgcgcgcgggccggggaggccgccaacuucugcgcccugauccucgcguacugcaacaagacggugggcgagcugggcgacguccgcgagaccauguccuaccuguuccagcacgccaaccucgacagcugcaagcgggugcugaacgucgugugcaagaccugcgggcagcagcagaccacccugaagggcguggaggccgucauguacauggggacgcucuccuacgagcaguucaagaagggcgugcagauccccugcaccugcgggaagcaggccaccaaguaccuggugcagcaggagagccccuucgucaugauguccgcccccccggcgcaguacgagcugaagcacggcaccuucacgugcgccagcgaguacaccggcaacuaccagugcgggcacuacaagcacaucaccuccaaggagacccucuacugcaucgacggcgcccugcugacgaagagcagcgaguacaaggggcccaucaccgacguguucuacaaggagaacuccuacaccaccacgaucaagcccgugaccuacaagcucgacggcgucgugugcaccgagaucgaccccaagcuggacaacuacuacaagaaggacaacagcuacuucaccgagcagccgaucgaccuggugcccaaccagcccuaccccaacgccuccuucgacaacuucaaguucgucugcgacaacaucaaguucgccgacgaccucaaccagcugacgggguacaagaagccggcgagccgcgagcugaaggugaccuucuuccccgaccucaacggcgacguggucgccaucgacuacaagcacuacacccccuccuucaagaagggcgccaagcugcugcacaagcccaucguguggcacgugaacaacgccaccaacaaggcgacguacaagccgaacaccuggugcauccggugccucuggagcaccaagcccgucgagaccuccaacagcuucgacgugcugaaguccgaggacgcccaggggauggacaaccuggccugcgaggaccucaagcccgugagcgaggaggucguggagaaccccacgauccagaaggacgugcuggagugcaacgucaagaccaccgagguggugggcgacaucauccugaagccggccaacaacucccucaagaucaccgaggaggucgggcacacggaccugauggccgcguacguggacaacagcucccugaccaucaagaagcccaacgagcucagccgcgugcugggccugaagacccucgccacccacgggcuggccgccgucaacuccgugcccugggacacgaucgccaacuacgcgaagccguuccugaacaagguggucagcaccaccaccaacaucgugacgcgcugccucaaccgggugugcaccaacuacaugcccuacuucuucacccugcugcuccagcugugcaccuucacccgcuccacgaacagccggaucaaggccuccaugcccaccaccaucgccaagaacaccgucaagagcgugggcaaguucugccuggaggccagcuucaacuaccucaagucccccaacuucagcaagcugaucaacaucaucaucugguuccugcuccuguccgugugccugggcagccucaucuacuccacggccgcgcuggggguccugaugagcaaccucggcaugccguccuacugcaccggguaccgcgagggcuaccugaacagcaccaacgugaccaucgccacguacugcaccggcuccauccccugcagcgugugccuguccgggcucgacagccuggacaccuaccccucccuggagaccauccagaucacgaucagcuccuucaagugggaccucaccgccuucggccuggucgccgagugguuccuggccuacauccucuucacccgguucuucuacgugcuggggcuggcggccaucaugcagcucuucuucagcuacuucgccgugcacuucaucuccaacagcuggcugauguggcugaucaucaaccugguccagauggcccccaucuccgcgauggugcgcauguacaucuucuucgccagcuucuacuacguguggaagagcuacguccacgugguggacggcugcuccagcuccaccugcaugaugugcuacaagcggaaccgcgccacgcgggucgagugcaccaccaucgugaacgggguccgccggagcuucuacguguacgccaacggcggcaagggguucugcaagcuccacaacuggaacugcgugaacugcgacaccuucugcgccggcuccacguucaucagcgacgaggucgcgcgcgaccugucccugcaguucaagcggccgaucaaccccaccgaccagagcuccuacaucguggacagcgugaccgucaagaacggguccauccaccucuacuucgacaaggccggccagaagaccuacgagcgccacagccugucccacuucgugaaccuggacaaccuccgggccaacaacacgaaggggagccugcccaucaacgugaucgucuucgacggcaaguccaagugcgaggagagcuccgccaagagcgccuccguguacuacagccagcugaugugccagcccauccuccugcuggaccaggcgcucgugagcgacgucggcgacuccgccgagguggccgugaagauguucgacgccuacgucaacaccuucagcuccaccuucaacgugccgauggagaagcugaagacccugguggccacggcggaggccgagcucgccaagaacgucagccuggacaacgugcuguccaccuucaucagcgccgcgcgccagggguucguggacuccgacgucgagaccaaggacgugguggagugccucaagcugagccaccaguccgacaucgaggucaccggcgacagcugcaacaacuacaugcugacguacaacaagguggagaacaugaccccccgggaccucggggccugcaucgacugcuccgcccgccacaucaacgcccagguggccaagagccacaacaucgcgcugaucuggaacgucaaggacuucaugucccugagcgagcagcuccggaagcagauccgcuccgccgccaagaagaacaaccugcccuucaagcugaccugcgccaccacgcgccagguggugaacgucgugaccaccaagaucgcccucaagggcggguga

SEQ ID NO: 17884 - RNA, 5841 nt, Artificial Sequence
  SARS-CoV-2__MT811557.1__non-structural protein 3 (NSP3) CDS gc
auggcccccaccaaggugaccuucggcgacgacacggucaucgaggugcagggguacaagagcgugaacaucaccuucgagcuggacgagcgcaucgacaagguccucaacgagaagugcuccgccuacaccguggagcugggcaccgaggugaacgaguucgcgugcgucguggccgacgccgugaucaagacgcugcagccggucagcgagcuccugaccccccuggggaucgaccucgacgagugguccauggccaccuacuaccuguucgacgagagcggcgaguucaagcuggccucccacauguacugcagcuucuacccccccgacgaggacgaggaggagggggacugcgaggaggaggaguucgagccguccacccaguacgaguacggcacggaggacgacuaccagggcaagccccucgaguucggggcgaccagcgccgcccugcagcccgaggaggagcaggaggaggacuggcuggacgacgacucccagcagaccgugggccagcaggacgggagcgaggacaaccagaccacgaccauccagaccaucguggagguccagccccagcucgagauggagcugaccccgguggugcagacgaucgaggucaacuccuucagcggcuaccugaagcucaccgacaacguguacaucaagaacgccgacaucguggaggaggcgaagaaggucaagcccaccgugguggucaacgccgccaacguguaccugaagcacgggggcggcguggccggggcccugaacaaggcgaccaacaacgccaugcaggucgaguccgacgacuacaucgccacgaacggcccccucaagguggggggcagcugcguccuguccggccacaaccuggccaagcacugccuccacgugguggggcccaacgucaacaagggcgaggacauccagcugcugaagagcgccuacgagaacuucaaccagcacgaggugcuccuggcgccgcugcucuccgccgggaucuucggcgccgaccccauccacagccugcgggugugcgucgacaccgugcgcaccaacguguaccuggccgucuucgacaagaaccucuacgacaagcugguguccagcuuccuggagaugaagagcgagaagcagguggagcagaagaucgccgagauccccaaggaggaggucaagcccuucaucaccgaguccaagccgagcguggagcagcggaagcaggacgacaagaagaucaaggcgugcguggaggaggucacgaccacccucgaggagaccaaguuccugacggagaaccugcuccuguacaucgacaucaacgggaaccugcaccccgacuccgccacccucgugagcgacaucgacaucaccuuccugaagaaggacgcccccuacaucgugggcgacgucgugcaggagggcgugcugaccgccgucgugauccccacgaagaaggccgggggcaccaccgagaugcucgcgaaggcccugcgcaaggugccgaccgacaacuacaucacgaccuaccccgggcagggccugaacggguacaccgucgaggaggccaagaccgugcucaagaagugcaaguccgccuucuacauccugcccagcaucaucuccaacgagaagcaggagauccugggcaccgugagcuggaaccuccgggagaugcuggcgcacgccgaggagacgcgcaagcugaugcccgucugcguggagaccaaggccaucguguccaccauccagcggaaguacaagggcaucaagauccaggagggggucguggacuacggcgcccgcuucuacuucuacaccagcaagacgaccguggccucccugaucaacacccucaacgaccugaacgagacccuggucacgaugccgcucggguacgugacccacggccugaaccuggaggaggcggcccgguacaugcgcagccucaaggugcccgccaccgucuccgugagcucccccgacgccgugaccgccuacaacggguaccugacgagcuccagcaagacccccgaggagcacuucaucgagaccaucucccuggcgggcagcuacaaggacuggagcuacuccggccagagcacccagcucgggaucgaguuccugaagcggggcgacaaguccgucuacuacacgagcaacccgaccaccuuccaccuggacggggaggugaucaccuucgacaaccucaagacgcugcugucccuccgcgaggugcggaccaucaaggucuucaccaccguggacaacaucaaccugcacacgcagguggucgacaugagcaugaccuacggccagcaguucggccccaccuaccuggacggggccgacgugaccaagaucaagccccacaacucccacgagggcaagacguucuacgugcucccgaacgacgacacccugcgcgucgaggccuucgaguacuaccacaccaccgaccccagcuuccuggggcgguacauguccgcccucaaccacacgaagaaguggaaguacccccaggugaacggccugaccagcaucaagugggccgacaacaacugcuaccuggcgaccgcccuccugacccugcagcagaucgagcucaaguucaaccccccggcccugcaggacgccuacuaccgcgcgcgggccggggaggccgccaacuucugcgcccugauccucgcguacugcaacaagacggugggcgagcugggcgacguccgcgagaccauguccuaccuguuccagcacgccaaccucgacagcugcaagcgggugcugaacgucgugugcaagaccugcgggcagcagcagaccacccugaagggcguggaggccgucauguacauggggacgcucuccuacgagcaguucaagaagggcgugcagauccccugcaccugcgggaagcaggccaccaaguaccuggugcagcaggagagccccuucgucaugauguccgcccccccggcgcaguacgagcugaagcacggcaccuucacgugcgccagcgaguacaccggcaacuaccagugcgggcacuacaagcacaucaccuccaaggagacccucuacugcaucgacggcgcccugcugacgaagagcagcgaguacaaggggcccaucaccgacguguucuacaaggagaacuccuacaccaccacgaucaagcccgugaccuacaagcucgacggcgucgugugcaccgagaucgaccccaagcuggacaacuacuacaagaaggacaacagcuacuucaccgagcagccgaucgaccuggugcccaaccagcccuaccccaacgccuccuucgacaacuucaaguucgucugcgacaacaucaaguucgccgacgaccucaaccagcugacgggguacaagaagccggcgagccgcgagcugaaggugaccuucuuccccgaccucaacggcgacguggucgccaucgacuacaagcacuacacccccuccuucaagaagggcgccaagcugcugcacaagcccaucguguggcacgugaacaacgccaccaacaaggcgacguacaagccgaacaccuggugcauccggugccucuggagcaccaagcccgucgagaccuccaacagcuucgacgugcugaaguccgaggacgcccaggggauggacaaccuggccugcgaggaccucaagcccgugagcgaggaggucguggagaaccccacgauccagaaggacgugcuggagugcaacgucaagaccaccgagguggugggcgacaucauccugaagccggccaacaacucccucaagaucaccgaggaggucgggcacacggaccugauggccgcguacguggacaacagcucccugaccaucaagaagcccaacgagcucagccgcgugcugggccugaagacccucgccacccacgggcuggccgccgucaacuccgugcccugggacacgaucgccaacuacgcgaagccguuccugaacaagguggucagcaccaccaccaacaucgugacgcgcugccucaaccgggugugcaccaacuacaugcccuacuucuucacccugcugcuccagcugugcaccuucacccgcuccacgaacagccggaucaaggccuccaugcccaccaccaucgccaagaacaccgucaagagcgugggcaaguucugccuggaggccagcuucaacuaccucaagucccccaacuucagcaagcugaucaacaucaucaucugguuccugcuccuguccgugugccugggcagccucaucuacuccacggccgcgcuggggguccugaugagcaaccucggcaugccguccuacugcaccggguaccgcgagggcuaccugaacagcaccaacgugaccaucgccacguacugcaccggcuccauccccugcagcgugugccuguccgggcucgacagccuggacaccuacuccagccuggagaccauccagaucacgaucuccagcuucaagugggaccucaccgccuucggccuggucgccgagugguuccuggccuacauccucuucacccgguucuucuacgugcuggggcuggcggccaucaugcagcucuucuucuccuacuucgccgugcacuucaucagcaacuccuggcugauguggcugaucaucaaccugguccagauggcccccaucagcgcgauggugcgcauguacaucuucuucgccagcuucuacuacguguggaaguccuacguccacgugguggacggcugcaacagcuccaccugcaugaugugcuacaagcggaaccgcgccacgcgggucgagugcaccaccaucgugaacgggguccgccggagcuucuacguguacgccaacggcggcaagggguucugcaagcuccacaacuggaacugcgugaacugcgacaccuucugcgccggcuccacguucaucagcgacgaggucgcgcgcgaccugucccugcaguucaagcggcccaucaacccgaccgaccagagcuccuacaucguggacagcgugaccgucaagaacggguccauccaccucuacuucgacaaggccggccagaagaccuacgagcgccacagccugucccacuucgugaaccuggacaaccuccgggccaacaacacgaaggggagccugcccaucaacgugaucgucuucgacggcaaguccaagugcgaggagagcuccgccaagagcgccuccguguacuacagccagcugaugugccagcccauccuccugcuggaccaggcgcucgugagcgacgucggcgacuccgccgagguggccgugaagauguucgacgccuacgucaacaccuucagcuccaccuucaacgugcccauggagaagcugaagacccugguggccacggcggaggccgagcucgccaagaacgucagccuggacaacgugcuguccaccuucaucagcgccgcgcgccagggguucguggacuccgacgucgagaccaaggacgugguggagugccucaagcugagccaccaguccgacaucgaggucaccggcgacagcugcaacaacuacaugcugacguacaacaagguggagaacaugaccccgcgggaccucggggccugcaucgacugcuccgcccgccacaucaacgcccagguggccaagagccacaacaucgcgcugaucuggaacgucaaggacuucaugucccugagcgagcagcuccggaagcagauccgcuccgccgccaagaagaacaaccugcccuucaagcugaccugcgccaccacgcgccagguggugaacgucgugaccaccaagaucgcccucaagggcggguga

SEQ ID NO: 17885 - RNA, 5841 nt, Artificial Sequence
  SARS-CoV-2__MT811659.1__non-structural protein 3 (NSP3) CDS gc
auggcccccaccaaggugaccuucggcgccgacacggucaucgaggugcagggguacaagagcgugaacaucaccuucgagcuggacgagcgcaucgacaagguccucaacgagaagugcuccgcguacaccguggagcugggcaccgaggugaacgaguucgccugcgucguggccgacgccgugaucaagacgcugcagccggucagcgagcuccugaccccccuggggaucgaccucgacgagugguccauggccaccuacuaccuguucgacgagagcggcgaguucaagcuggcgucccacauguacugcagcuucuacccccccgacgaggacgaggaggagggggacugcgaggaggaggaguucgagccguccacccaguacgaguacggcacggaggacgacuaccagggcaagccccucgaguucggggccaccagcgccgcccugcagcccgaggaggagcaggaggaggacuggcuggacgacgacucccagcagaccgugggccagcaggacgggagcgaggacaaccagaccacgaccauccagaccaucguggagguccagccccagcucgagauggagcugaccccgguggugcagacgaucgaggucaacuccuucagcggcuaccugaagcucaccgacaacguguacaucaagaacgcggacaucguggaggaggccaagaaggucaagcccaccgugguggucaacgccgccaacguguaccugaagcacgggggcggcguggccggggcgcugaacaaggccaccaacaacgccaugcaggucgaguccgacgacuacaucgccacgaacggcccccucaagguggggggcagcugcguccuguccggccacaaccuggccaagcacugccuccacgugguggggcccaacgucaacaagggcgaggacauccagcugcugaagagcgcguacgagaacuucaaccagcacgaggugcuccuggccccgcugcucuccgccgggaucuucggcgccgaccccauccacagccugcgggugugcgucgacaccgugcgcaccaacguguaccuggccgucuucgacaagaaccucuacgacaagcugguguccagcuuccuggagaugaagagcgagaagcagguggagcagaagaucgcggagauccccaaggaggaggucaagcccuucaucaccgaguccaagccgagcguggagcagcggaagcaggacgacaagaagaucaaggccugcguggaggaggucacgaccacccucgaggagaccaaguuccugacggagaaccugcuccuguacaucgacaucaacgggaaccugcaccccgacuccgccacccucgugagcgacaucgacaucaccuuccugaagaaggacgcccccuacaucgugggcgacgucgugcaggagggcgugcugaccgccgucgugauccccacgaagaaggcggggggcaccaccgagaugcucgccaaggcccugcgcaaggugccgaccgacaacuacaucacgaccuaccccgggcagggccugaacggguacaccgucgaggaggccaagaccgugcucaagaagugcaaguccgcguucuacauccugcccagcaucaucuccaacgagaagcaggagauccugggcaccgugagcuggaaccuccgggagaugcuggcccacgccgaggagacgcgcaagcugaugcccgucugcguggagaccaaggccaucguguccaccauccagcggaaguacaagggcaucaagauccaggagggggucguggacuacggcgcccgcuucuacuucuacaccagcaagacgaccguggcgucccugaucaacacccucaacgaccugaacgagacccuggucacgaugccgcucggguacgugacccacggccugaaccuggaggaggccgcccgguacaugcgcagccucaaggugcccgccaccgucuccgugagcucccccgacgccgugaccgcguacaacggguaccugacgagcuccagcaagacccccgaggagcacuucaucgagaccaucucccuggccggcagcuacaaggacuggagcuacuccggccagagcacccagcucgggaucgaguuccugaagcggggcgacaaguccgucuacuacacgagcaacccgaccaccuuccaccuggacggggaggugaucaccuucgacaaccucaagacgcugcugucccuccgcgaggugcggaccaucaaggucuucaccaccguggacaacaucaaccugcacacgcagguggucgacaugagcaugaccuacggccagcaguucggccccaccuaccuggacggggccgacgugaccaagaucaagccccacaacucccacgagggcaagacguucuacgugcucccgaacgacgacacccugcgcgucgaggccuucgaguacuaccacaccaccgaccccagcuuccuggggcgguacauguccgcccucaaccacacgaagaaguggaaguacccccaggugaacggccugaccagcaucaagugggcggacaacaacugcuaccuggccaccgcccuccugacccugcagcagaucgagcucaaguucaaccccccggcccugcaggacgcguacuaccgcgcccgggccggggaggccgccaacuucugcgcgcugauccucgccuacugcaacaagacggugggcgagcugggcgacguccgcgagaccauguccuaccuguuccagcacgccaaccucgacagcugcaagcgggugcugaacgucgugugcaagaccugcgggcagcagcagaccacccugaagggcguggaggccgucauguacauggggacgcucuccuacgagcaguucaagaagggcgugcagauccccugcaccugcgggaagcaggccaccaaguaccuggugcagcaggagagccccuucgucaugauguccgcgcccccggcccaguacgagcugaagcacggcaccuucacgugcgccagcgaguacaccggcaacuaccagugcgggcacuacaagcacaucaccuccaaggagacccucuacugcaucgacggcgcccugcugacgaagagcagcgaguacaaggggcccaucaccgacguguucuacaaggagaacuccuacaccaccacgaucaagcccgugaccuacaagcucgacggcgucgugugcaccgagaucgaccccaagcuggacaacuacuacaagaaggacaacagcuacuucaccgagcagccgaucgaccuggugcccaaccagcccuaccccaacgccuccuucgacaacuucaaguucgucugcgacaacaucaaguucgcggacgaccucaaccagcugacgggguacaagaagccggccagccgcgagcugaaggugaccuucuuccccgaccucaacggcgacguggucgccaucgacuacaagcacuacacccccuccuucaagaagggcgccaagcugcugcacaagcccaucguguggcacgugaacaacgcgaccaacaaggccacguacaagccgaacaccuggugcauccggugccucuggagcaccaagcccgucgagaccuccaacagcuucgacgugcugaaguccgaggacgcccaggggauggacaaccuggccugcgaggaccucaagcccgugagcgaggaggucguggagaaccccacgauccagaaggacgugcuggagugcaacgucaagaccaccgagguggugggcgacaucauccugaagccggccaacaacucccucaagaucaccgaggaggucgggcacacggaccugauggcggccuacguggacaacagcucccugaccaucaagaagcccaacgagcucagccgcgugcugggccugaagacccucgccacccacgggcuggccgccgucaacuccgugcccugggacacgaucgcgaacuacgccaagccguuccugaacaagguggucagcaccaccaccaacaucgugacgcgcugccucaaccgggugugcaccaacuacaugcccuacuucuucacccugcugcuccagcugugcaccuucacccgcuccacgaacagccggaucaaggccuccaugcccaccaccaucgccaagaacaccgucaagagcgugggcaaguucugccuggaggccagcuucaacuaccucaagucccccaacuucagcaagcugaucaacaucaucaucugguuccugcuccuguccgugugccugggcagccucaucuacuccacggcggcccuggggguccugaugagcaaccucggcaugccguccuacugcaccggguaccgcgagggcuaccugaacagcaccaacgugaccaucgccacguacugcaccggcuccauccccugcagcgugugccuguccgggcucgacagccuggacaccuaccccucccuggagaccauccagaucacgaucagcuccuucaagugggaccucaccgccuucggccuggucgccgagugguuccuggcguacauccucuucacccgguucuucuacgugcuggggcuggccgccaucaugcagcucuucuucagcuacuucgccgugcacuucaucuccaacagcuggcugauguggcugaucaucaaccugguccagauggcgcccaucuccgccauggugcgcauguacaucuucuucgccagcuucuacuacguguggaagagcuacguccacgugguggacggcugcaacuccagcaccugcaugaugugcuacaagcggaaccgcgccacgcgggucgagugcaccaccaucgugaacgggguccgccgguccuucuacguguacgccaacggcggcaagggguucugcaagcuccacaacuggaacugcgugaacugcgacaccuucugcgcgggcagcacguucaucuccgacgaggucgcccgcgaccugagccugcaguucaagcggccgaucaaccccaccgaccaguccagcuacaucguggacuccgugaccgucaagaacgggagcauccaccucuacuucgacaaggccggccagaagaccuacgagcgccacucccugagccacuucgugaaccuggacaaccuccgggccaacaacacgaaggggucccugcccaucaacgugaucgucuucgacggcaagagcaagugcgaggaguccagcgccaaguccgcgagcguguacuacucccagcugaugugccagcccauccuccugcuggaccaggcccucgugagcgacgucggcgacagcgccgagguggccgugaagauguucgacgccuacgucaacaccuucuccagcaccuucaacgugccgauggagaagcugaagacccugguggcgacggccgaggccgagcucgccaagaacgucucccuggacaacgugcugagcaccuucaucuccgcggcccgccagggguucguggacagcgacgucgagaccaaggacgugguggagugccucaagcugucccaccagagcgacaucgaggucaccggcgacuccugcaacaacuacaugcugacguacaacaagguggagaacaugaccccccgggaccucggggccugcaucgacugcagcgcccgccacaucaacgcccagguggcgaagucccacaacaucgcccugaucuggaacgucaaggacuucaugagccuguccgagcagcuccggaagcagauccgcagcgccgccaagaagaacaaccugcccuucaagcugaccugcgccaccacgcgccagguggugaacgucgugaccaccaagaucgcgcucaagggcggguga

SEQ ID NO: 17886 - RNA, 5841 nt, Artificial Sequence
  SARS-CoV-2__MT811670.1__non-structural protein 3 (NSP3) CDS gc
auggcccccaccaaggugaccuucggcgacgacacggucaucgaggugcagggguacaagagcgugaacaucaccuucgagcuggacgagcgcaucgacaagguccucaacgagaagugcuccgccuacaccguggagcugggcaccgaggugaacgaguucgcgugcgucguggccgacgccgugaucaagacgcugcagccggucagcgagcuccugaccccccuggggaucgaccucgacgagugguccauggccaccuacuaccuguucgacgagagcggcgaguucaagcuggccucccacauguacugcagcuucuacccccccgacgaggacgaggaggagggggacugcgaggaggaggaguucgagccguccacccaguacgaguacggcacggaggacgacuaccagggcaagccccucgaguucggggcgaccagcgccgcccugcagcccgaggaggagcaggaggaggacuggcuggacgacgacucccagcagaccgugggccagcaggacgggagcgaggacaaccagaccacgaccauccagaccaucguggagguccagccccagcucgagauggagcugaccccgguggugcagacgaucgaggucaacuccuucagcggcuaccugaagcucaccgacaacguguacaucaagaacgccgacaucguggaggaggcgaagaaggucaagcccaccgugguggucaacgccgccaacguguaccugaagcacgggggcggcguggccggggcccugaacaaggcgaccaacaacgccaugcaggucgaguccgacgacuacaucgccacgaacggcccccucaagguggggggcagcugcguccuguccggccacaaccuggccaagcacugccuccacgugguggggcccaacgucaacaagggcgaggacauccagcugcugaagagcgccuacgagaacuucaaccagcacgaggugcuccuggcgccgcugcucuccgccgggaucuucggcgccgaccccauccacagccugcgggugugcgucgacaccgugcgcaccaacguguaccuggccgucuucgacaagaaccucuacgacaagcugguguccagcuuccuggagaugaagagcgagaagcagguggagcagaacaucgccgagauccccaaggaggaggucaagcccuucaucaccgaguccaagccgagcguggagcagcggaagcaggacgacaagaagaucaaggcgugcguggaggaggucacgaccacccucgaggagaccaaguuccugacggagaaccugcuccuguacaucgacaucaacgggaaccugcaccccgacuccgccacccucgugagcgacaucgacaucaccuuccugaagaaggacgcccccuacaucgugggcgacgucgugcaggagggcgugcugaccgccgucgugauccccacgaagaaggccgggggcaccaccgagaugcucgcgaaggcccugcgcaaggugccgaccgacaacuacaucacgaccuaccccgggcagggccugaacggguacaccgucgaggaggccaagaccgugcucaagaagugcaaguccgccuucuacauccugcccagcaucaucuccaacgagaagcaggagauccugggcaccgugagcuggaaccuccgggagaugcuggcgcacgccgaggagacgcgcaagcugaugcccgucugcguggagaccaaggccaucguguccaccauccagcggaaguacaagggcaucaagauccaggagggggucguggacuacggcgcccgcuucuacuucuacaccagcaagacgaccguggccucccugaucaacacccucaacgaccugaacgagacccuggucacgaugccgcucggguacgugacccacggccugaaccuggaggaggcggcccgguacaugcgcagccucaaggugcccgccaccgucuccgugagcucccccgacgccgugaccgccuacaacggguaccugacgagcuccagcaagacccccgaggagcacuucaucgagaccaucucccuggcgggcagcuacaaggacuggagcuacuccggccagagcacccagcucgggaucgaguuccugaagcggggcgacaaguccgucuacuacacgagcaacccgaccaccuuccaccuggacggggaggugaucaccuucgacaaccucaagacgcugcugucccuccgcgaggugcggaccaucaaggucuucaccaccguggacaacaucaaccugcacacgcagguggucgacaugagcaugaccuacggccagcaguucggccccaccuaccuggacggggccgacgugaccaagaucaagccccacaacucccacgagggcaagacguucuacgugcucccgaacgacgacacccugcgcgucgaggccuucgaguacuaccacaccaccgaccccagcuuccuggggcgguacauguccgcccucaaccacacgaagaaguggaaguacccccaggugaacggccugaccagcaucaagugggccgacaacaacugcuaccuggcgaccgcccuccugacccugcagcagaucgagcucaaguucaaccccccggcccugcaggacgccuacuaccgcgcgcgggccggggaggccgccaacuucugcgcccugauccucgcguacugcaacaagacggugggcgagcugggcgacguccgcgagaccauguccuaccuguuccagcacgccaaccucgacagcugcaagcgggugcugaacgucgugugcaagaccugcgggcagcagcagaccacccugaagggcguggaggccgucauguacauggggacgcucuccuacgagcaguucaagaagggcgugcagauccccugcaccugcgggaagcaggccaccaaguaccuggugcagcaggagagccccuucgucaugauguccgcccccccggcgcaguacgagcugaagcacggcaccuucacgugcgccagcgaguacaccggcaacuaccagugcgggcacuacaagcacaucaccuccaaggagacccucuacugcaucgacggcgcccugcugacgaagagcagcgaguacaaggggcccaucaccgacguguucuacaaggagaacuccuacaccaccacgaucaagcccgugaccuacaagcucgacggcgucgugugcaccgagaucgaccccaagcuggacaacuacuacaagaaggacaacagcuacuucaccgagcagccgaucgaccuggugcccaaccagcccuaccccaacgccuccuucgacaacuucaaguucgucugcgacaacaucaaguucgccgacgaccucaaccagcugacgggguacaagaagccggcgagccgcgagcugaaggugaccuucuuccccgaccucaacggcgacguggucgccaucgacuacaagcacuacacccccuccuucaagaagggcgccaagcugcugcacaagcccaucguguggcacgugaacaacgccaccaacaaggcgacguacaagccgaacaccuggugcauccggugccucuggagcaccaagcccgucgagaccuccaacagcuucgacgugcugaaguccgaggacgcccaggggauggacaaccuggccugcgaggaccucaagcccgugagcgaggaggucguggagaaccccacgauccagaaggacgugcuggagugcaacgucaagaccaccgagguggugggcgacaucauccugaagccggccaacaacucccucaagaucaccgaggaggucgggcacacggaccugauggccgcguacguggacaacagcucccugaccaucaagaagcccaacgagcucagccgcgugcugggccugaagacccucgccacccacgggcuggccgccgucaacuccgugcccugggacacgaucgccaacuacgcgaagccguuccugaacaagguggucagcaccaccaccaacaucgugacgcgcugccucaaccgggugugcaccaacuacaugcccuacuucuucacccugcugcuccagcugugcaccuucacccgcuccacgaacagccggaucaaggccuccaugcccaccaccaucgccaagaacaccgucaagagcgugggcaaguucugccuggaggccagcuucaacuaccucaagucccccaacuucagcaagcugaucaacaucaucaucugguuccugcuccuguccgugugccugggcagccucaucuacuccacggccgcgcuggggguccugaugagcaaccucggcaugccguccuacugcaccggguaccgcgagggcuaccugaacagcaccaacgugaccaucgccacguacugcaccggcuccauccccugcagcgugugccuguccgggcucgacagccuggacaccuaccccucccuggagaccauccagaucacgaucagcuccuucaagugggaccucaccgccuucggccuggucgccgagugguuccuggccuacauccucuucacccgguucuucuacgugcuggggcuggcggccaucaugcagcucuucuucagcuacuucgccgugcacuucaucuccaacagcuggcugauguggcugaucaucaaccugguccagauggcccccaucuccgcgauggugcgcauguacaucuucuucgccagcuucuacuacguguggaagagcuacguccacgugguggacggcugcaacuccagcaccugcaugaugugcuacaagcggaaccgcgccacgcgggucgagugcaccaccaucgugaacgggguccgccgguccuucuacguguacgccaacggcggcaagggguucugcaagcuccacaacuggaacugcgugaacugcgacaccuucugcgccggcagcacguucaucuccgacgaggucgcgcgcgaccugagccugcaguucaagcggccgaucaaccccaccgaccaguccagcuacaucguggacuccgugaccgucaagaacgggagcauccaccucuacuucgacaaggccggccagaagaccuacgagcgccacucccugagccacuucgugaaccuggacaaccuccgggccaacaacacgaaggggucccugcccaucaacgugaucgucuucgacggcaagagcaagugcgaggaguccagcgccaaguccgccagcguguacuacucccagcugaugugccagcccauccuccugcuggaccaggcgcucgugagcgacgucggcgacagcgccgagguggccgugaagauguucgacgccuacgucaacaccuucuccagcaccuucaacgugccgauggagaagcugaagacccugguggccacggcggaggccgagcucgccaagaacgucucccuggacaacgugcugagcaccuucaucuccgccgcgcgccagggguucguggacagcgacgucgagaccaaggacgugguggagugccucaagcugucccaccagagcgacaucgaggucaccggcgacuccugcaacaacuacaugcugacguacaacaagguggagaacaugaccccccgggaccucggggccugcaucgacugcagcgcccgccacaucaacgcccagguggccaagucccacaacaucgcgcugaucuggaacgucaaggacuucaugagccuguccgagcagcuccggaagcagauccgcagcgccgccaagaagaacaaccugcccuucaagcugaccugcgccaccacgcgccagguggugaacgucgugaccaccaagaucgcccucaagggcggguga

SEQ ID NO: 17887 - RNA, 5841 nt, Artificial Sequence
  SARS-CoV-2__MT811680.1__non-structural protein 3 (NSP3) CDS gc
auggcccccaccaaggugaccuucggcgacgacacggucaucgaggugcagggguacaagagcgugaacaucaccuucgagcuggacgagcgcaucgacaagguccucaacgagaagugcuccgccuacaccguggagcugggcaccgaggugaacgaguucgcgugcgucguggccgacgccgugaucaagacgcugcagccggucagcgagcuccugaccccccuggggaucgaccucgacgagugguccauggccaccuacuaccuguucgacgagagcggcgaguucaagcuggccucccacauguacugcagcuucuacccccccgacgaggacgaggaggagggggacugcgaggaggaggaguucgagccguccacccaguacgaguacggcacggaggacgacuaccagggcaagccccucgaguucggggcgaccagcgccgcccugcagcccgaggaggagcaggaggaggacuggcuggacgacgacucccagcagaccgugggccagcaggacgggagcgaggacaaccagaccacgaccauccagaccaucguggagguccagccccagcucgagauggagcugaccccgguggugcagacgaucgaggucaacuccuucagcggcuaccugaagcucaccgacaacguguacaucaagaacgccgacaucguggaggaggcgaagaaggucaagcccaccgugguggucaacgccgccaacguguaccugaagcacgggggcggcguggccggggcccugaacaaggcgaccaacaacgccaugcaggucgaguccgacgacuacaucgccacgaacggcccccucaagguggggggcagcugcguccuguccggccacaaccuggccaagcacugccuccacgugguggggcccaacgucaacaagggcgaggacauccagcugcugaagagcgccuacgagaacuucaaccagcacgaggugcuccuggcgccgcugcucuccgccgggaucuucggcgccgaccugauccacagccugcgggugugcgucgacaccgugcgcaccaacguguaccucgccgucuucgacaagaaccuguacgacaagcugguguccagcuuccucgagaugaagagcgagaagcagguggagcagaagaucgccgagauccccaaggaggaggucaagcccuucaucaccgaguccaagcccagcguggagcagcggaagcaggacgacaagaagaucaaggcgugcguggaggaggucacgaccacccuggaggagaccaaguuccugacggagaaccuccugcuguacaucgacaucaacgggaaccuccacccggacuccgccacccuggugagcgacaucgacaucaccuuccugaagaaggacgcccccuacaucgugggcgacgucgugcaggagggcgugcucaccgccgucgugauccccacgaagaaggccgggggcaccaccgagaugcuggcgaaggcccugcgcaaggugcccaccgacaacuacaucacgaccuacccggggcagggccucaacggguacaccgucgaggaggccaagaccgugcugaagaagugcaaguccgccuucuacauccugcccagcaucaucuccaacgagaagcaggagauccucggcaccgugagcuggaaccugcgggagaugcuggcgcacgccgaggagacgcgcaagcugaugcccgucugcguggagaccaaggccaucguguccaccauccagcggaaguacaagggcaucaagauccaggagggggucguggacuacggcgcccgcuucuacuucuacaccagcaagacgaccguggccucccucaucaacacccugaacgaccugaacgagacccucgucacgaugccccugggguacgugacccacggccugaaccucgaggaggcggcccgguacaugcgcagccugaaggugccggccaccgucuccgugagcucccccgacgccgugaccgccuacaacggguaccugacgagcuccagcaagacccccgaggagcacuucaucgagaccaucucccucgcgggcagcuacaaggacuggagcuacuccggccagagcacccagcuggggaucgaguuccugaagcggggcgacaaguccgucuacuacacgagcaaccccaccaccuuccaccucgacggggaggugaucaccuucgacaaccugaagacgcugcucucccugcgcgaggugcggaccaucaaggucuucaccaccguggacaacaucaaccugcacacgcagguggucgacaugagcaugaccuacggccagcaguucggcccgaccuaccucgacggggccgacgugaccaagaucaagccccacaacucccacgagggcaagacguucuacgugcugcccaacgacgacacccugcgcgucgaggccuucgaguacuaccacaccaccgacccgagcuuccucgggcgguacauguccgcccugaaccacacgaagaaguggaaguacccccaggugaacggccugaccagcaucaagugggccgacaacaacugcuaccucgcgaccgcccugcugacccuccagcagaucgagcugaaguucaacccccccgcccugcaggacgccuacuaccgcgcgcgggccggggaggccgccaacuucugcgcccucauccuggcguacugcaacaagacggugggcgagcugggcgacguccgcgagaccauguccuaccucuuccagcacgccaaccuggacagcugcaagcgggugcugaacgucgugugcaagaccugcgggcagcagcagaccacccucaagggcguggaggccgucauguacauggggacgcuguccuacgagcaguucaagaagggcgugcagaucccgugcaccugcgggaagcaggccaccaaguaccuggugcagcaggagagccccuucgucaugauguccgccccccccgcgcaguacgagcucaagcacggcaccuucacgugcgccagcgaguacaccggcaacuaccagugcgggcacuacaagcacaucaccuccaaggagacccuguacugcaucgacggcgcccugcucacgaagagcagcgaguacaaggggccgaucaccgacguguucuacaaggagaacuccuacaccaccacgaucaagcccgugaccuacaagcuggacggcgucgugugcaccgagaucgaccccaagcuggacaacuacuacaagaaggacaacagcuacuucaccgagcagcccaucgaccucgugccgaaccagcccuaccccaacgccuccuucgacaacuucaaguucgucugcgacaacaucaaguucgccgacgaccugaaccagcugacgggguacaagaagcccgcgagccgcgagcucaaggugaccuucuucccggaccugaacggcgacguggucgccaucgacuacaagcacuacacccccuccuucaagaagggcgccaagcugcuccacaagcccaucguguggcacgugaacaacgccaccaacaaggcgacguacaagcccaacaccuggugcauccggugccuguggagcaccaagccggucgagaccuccaacagcuucgacgugcugaaguccgaggacgcccaggggauggacaaccucgccugcgaggaccugaagcccgugagcgaggaggucguggagaaccccacgauccagaaggacgugcuggagugcaacgucaagaccaccgagguggugggcgacaucauccucaagcccgccaacaacucccugaagaucaccgaggaggucgggcacacggaccugauggccgcguacguggacaacagcucccucaccaucaagaagccgaacgagcugagccgcgugcugggccucaagacccuggccacccacgggcuggccgccgucaacuccgugcccugggacacgaucgccaacuacgcgaagcccuuccucaacaagguggucagcaccaccaccaacaucgugacgcgcugccugaaccgggugugcaccaacuacaugccguacuucuucacccugcuccugcagcugugcaccuucacccgcuccacgaacagccggaucaaggccuccaugcccaccaccaucgccaagaacaccgucaagagcgugggcaaguucugccucgaggccagcuucaacuaccugaagucccccaacuucagcaagcugaucaacaucaucaucugguuccuccugcuguccgugugccucggcagccugaucuacuccacggccgcgcuggggguccucaugagcaaccugggcaugcccuccuacugcaccggguaccgcgagggcuaccugaacagcaccaacgugaccaucgccacguacugcaccggcuccaucccgugcagcgugugccucuccgggcuggacagccuggacaccuaccccucccucgagaccauccagaucacgaucagcuccuucaagugggaccugaccgccuucggccuggucgccgagugguuccucgccuacauccuguucacccgguucuucuacgugcuggggcucgcggccaucaugcagcuguucuucagcuacuucgccgugcacuucaucuccaacagcuggcugauguggcugaucaucaaccucguccagauggcccccaucuccgcgauggugcgcauguacaucuucuucgccagcuucuacuacguguggaagagcuacguccacgugguggacggcugcaacuccagcaccugcaugaugugcuacaagcggaaccgcgccacgcgggucgagugcaccaccaucgugaacgggguccgccgguccuucuacguguacgccaacggcggcaagggguucugcaagcugcacaacuggaacugcgugaacugcgacaccuucugcgccggcagcacguucaucuccgacgaggucgcgcgcgaccugagccuccaguucaagcggcccaucaacccgaccgaccaguccagcuacaucguggacuccgugaccgucaagaacgggagcauccaccuguacuucgacaaggccggccagaagaccuacgagcgccacucccugagccacuucgugaaccucgacaaccugcgggccaacaacacgaaggggucccugcccaucaacgugaucgucuucgacggcaagagcaagugcgaggaguccagcgccaaguccgccagcguguacuacucccagcucaugugccagcccauccugcugcucgaccaggcgcuggugagcgacgucggcgacagcgccgagguggccgugaagauguucgacgccuacgucaacaccuucuccagcaccuucaacgugcccauggagaagcugaagacccucguggccacggcggaggccgagcuggccaagaacgucucccuggacaacgugcucagcaccuucaucuccgccgcgcgccagggguucguggacagcgacgucgagaccaaggacgugguggagugccugaagcugucccaccagagcgacaucgaggucaccggcgacuccugcaacaacuacaugcucacguacaacaagguggagaacaugaccccgcgggaccugggggccugcaucgacugcagcgcccgccacaucaacgcccagguggccaagucccacaacaucgcgcugaucuggaacgucaaggacuucaugagccucuccgagcagcugcggaagcagauccgcagcgccgccaagaagaacaaccugcccuucaagcucaccugcgccaccacgcgccagguggugaacgucgugaccaccaagaucgcccugaagggcggguga

SEQ ID NO: 17888 - RNA, 5841 nt, Artificial Sequence
  SARS-CoV-2__MT811683.1__non-structural protein 3 (NSP3) CDS gc
auggcccccaccaaggugaccuucggcgacgacacggucaucgaggugcagggguacaagagcgugaacaucaccuucgagcuggacgagcgcaucgacaagguccucaacgagaagugcuccgccuacaccguggagcugggcaccgaggugaacgaguucgcgugcgucguggccgacgccgugaucaagacgcugcagccggucagcgagcuccugaccccccuggggaucgaccucgacgagugguccauggccaccuacuaccuguucgacgagagcggcgaguucaagcuggccucccacauguacugcagcuucuacccccccgacgaggacgaggaggagggggacugcgaggaggaggaguucgagccguccacccaguacgaguacggcacggaggacgacuaccagggcaagccccucgaguucggggcgaccagcgccgcccugcagcccgaggaggagcaggaggaggacuggcuggacgacgacucccagcagaccgugggccagcaggacgggagcgaggacaaccagaccacgaccauccagaccaucguggagguccagccccagcucgagauggagcugaccccgguggugcagacgaucgaggucaacuccuucagcggcuaccugaagcucaccgacaacguguacaucaagaacgccgacaucguggaggaggcgaagaaggucaagcccaccgugguggucaacgccgccaacguguaccugaagcacgggggcggcguggccggggcccugaacaaggcgaccaacaacgccaugcaggucgaguccgacgacuacaucgccacgaacggcccccucaagguggggggcagcugcguccuguccggccacaaccuggccaagcacugccuccacgugguggggcccaacgucaacaagggcgaggacauccagcugcugaagagcgccuacgagaacuucaaccagcacgaggugcuccuggcgccgcugcucuccgccgggaucuucggcgccgaccccauccacagccugcgggugugcgucgacaccgugcgcaccaacguguaccuggccgucuucgacaagaaccucuacgacaagcugguguccagcuuccuggagaugaagagcgagaagcagguggagcagaagaucgccgagauccccaaggaggaggucaagcccuucaucaccgaguccaagccgagcguggagcagcggaagcaggacgacaagaagaucaaggcgugcguggaggaggucacgaccacccucgaggagaccaaguuccugacggagaaccugcuccuguacaucgacaucaacgggaaccugcaccccgacuccgccacccucgugagcgacaucgacaucaccuuccugaagaaggacgcccccuacaucgugggcgacgucgugcaggagggcgugcugaccgccgucgugauccccacgaagaaggccgggggcaccaccgagaugcucgcgaaggcccugcgcaaggugccgaccgacaacuacaucacgaccuaccccgggcagggccugaacggguacaccgucgaggaggccaagaccgugcucaagaagugcaaguccgccuucuacauccugcccagcaucaucuccaacgagaagcaggagauccugggcaccgugagcuggaaccuccgggagaugcuggcgcacgccgaggagacgcgcaagcugaugcccgucugcguggagaccaaggccaucguguccaccauccagcggaaguacaagggcaucaagauccaggagggggucguggacuacggcgcccgcuucuacuucuacaccagcaagacgaccguggccucccugaucaacacccucaacgaccugaacgagacccuggucacgaugccgcucggguacgugacccacggccugaaccuggaggaggcggcccgguacaugcgcagccucaaggugcccgccaccgucuccgugagcucccccgacgccgugaccgccuacaacggguaccugacgagcuccagcaagacccccgaggagcacuucaucgagaccaucucccuggcgggcagcuacaaggacuggagcuacuccggccagagcacccagcucgggaucgaguuccugaagcggggcgacaaguccgucuacuacacgagcaacccgaccaccuuccaccuggacggggaggugaucaccuucgacaaccucaagacgcugcugucccuccgcgaggugcggaccaucaaggucuucaccaccguggacaacaucaaccugcacacgcagguggucgacaugagcaugaccuacggccagcaguucggccccaccuaccuggacggggccgacgugaccaagaucaagccccacaacucccacgagggcaagacguucuacgugcucccgaacgacgacacccugcgcgucgaggccuucgaguacuaccacaccaccgaccccagcuuccuggggcgguacauguccgcccucaaccacacgaagaaguggaaguacccccaggugaacggccugaccagcaucaagugggccgacaacaacugcuaccuggcgaccgcccuccugacccugcagcagaucgagcucaaguucaaccccccggcccugcaggacgccuacuaccgcgcgcgggccggggaggccgccaacuucugcgcccugauccucgcguacugcaacaagacggugggcgagcugggcgacguccgcgagaccauguccuaccuguuccagcacgccaaccucgacagcugcaagcgggugcugaacgucgugugcaagaccugcgggcagcagcagaccacccugaagggcguggaggccgucauguacauggggacgcucuccuacgagcaguucaagaagggcgugcagauccccugcaccugcgggaagcaggccaccaaguaccuggugcagcaggagagccccuucgucaugauguccgcccccccggcgcaguacgagcugaagcacggcaccuucacgugcgccagcgaguacaccggcaacuaccagugcgggcacuacaagcacaucaccuccaaggagacccucuacugcaucgacggcgcccugcugacgaagagcagcgaguacaaggggcccaucaccgacguguucuacaaggagaacuccuacaccaccacgaucaagcccgugaccuacaagcucgacggcgucgugugcaccgagaucgaccccaagcuggacaacuacuacaagaaggacaacagcuacuucaccgagcagccgaucgaccuggugcccaaccagcccuaccccaacgccuccuucgacaacuucaaguucgucugcgacaacaucaaguucgccgacgaccucaaccagcugacgggguacaagaagccggcgagccgcgagcugaaggugaccuucuuccccgaccucaacggcgacguggucgccaucgacuacaagcacuacacccccuccuucaagaagggcgccaagcugcugcacaagcccaucguguggcacgugaacaacgccaccaacaaggcgacguacaagccgaacaccuggugcauccggugccucuggagcaccaagcccgucgagaccuccaacagcuucgacgugcugaaguccgaggacgcccaggggauggacaaccuggccugcgaggaccucaagcccgugagcgaggaggucguggagaaccccacgauccagaaggacgugcuggagugcaacgucaagaccaccgagguggugggcgacaucauccugaagccggccaacaacucccucaagaucaccgaggaggucgggcacacggaccugauggccgcguacguggacaacagcucccugaccaucaagaagcccaacgagcucagccgcgugcugggccugaagacccucgccacccacgggcuggccgccgucaacuccgugcccugggacacgaucgccaacuacgcgaagccguuccugaacaagguggucagcaccaccaccaacaucgugacgcgcugccucaaccgggugugcaccaacuacaugcccuacuucuucacccugcugcuccagcugugcaccuucacccgcuccacgaacagccggaucaaggccuccaugcccaccaccaucgccaagaacaccgucaagagcgugggcaaguucugccuggaggccagcuucaacuaccucaagucccccaacuucagcaagcugaucaacaucaucaucugguuccugcuccuguccgugugccugggcagccucaucuacuccacggccgcgcuggggguccugaugagcaaccucggcaugccguccuacugcaccggguaccgcgagggcuaccugaacagcaccaacgugaccaucgccacguacugcaccggcuccauccccugcagcgugugccuguccgggcucgacagccuggacaccuaccccucccuggagaccauccagaucacgaucagcuccuucaagugggaccucaccgccuucggccuggucgccgagugguuccuggccuacauccucuucacccgguucuucuacgugcuggggcuggcggccaucaugcagcucuucuucagcuacuucgccgugcacuucaucuccaacagcuggcugauguggcugaucaucaaccugguccagauggcccccaucuccgcgauggugcgcauguacaucuucuucgccagcuucuacuacguguggaagagcuacguccacgugguggacggcugcaacuccagcaccugcaugaugugcuacaagcggaaccgcgccacgcgggucgagugcaccaccaucgugaacgggguccgccggccguucuacguguacgccaacggcggcaagggguucugcaagcuccacaacuggaacugcgugaacugcgacaccuucugcgccggcuccacguucaucagcgacgaggucgcgcgcgaccugucccugcaguucaagcggcccaucaaccccaccgaccagagcuccuacaucguggacagcgugaccgucaagaacggguccauccaccucuacuucgacaaggccggccagaagaccuacgagcgccacagccugucccacuucgugaaccuggacaaccuccgggccaacaacacgaaggggagccugcccaucaacgugaucgucuucgacggcaaguccaagugcgaggagagcuccgccaagagcgccuccguguacuacagccagcugaugugccagccgauccuccugcuggaccaggcgcucguguccgacgucggcgacagcgccgagguggccgugaagauguucgacgccuacgucaacaccuucagcuccaccuucaacgugcccauggagaagcugaagacccugguggccacggcggaggccgagcucgccaagaacgucagccuggacaacgugcuguccaccuucaucagcgccgcgcgccagggguucguggacuccgacgucgagaccaaggacgugguggagugccucaagcugagccaccaguccgacaucgaggucaccggcgacagcugcaacaacuacaugcugacguacaacaagguggagaacaugaccccccgggaccucggggccugcaucgacugcuccgcccgccacaucaacgcccagguggccaagagccacaacaucgcgcugaucuggaacgucaaggacuucaugucccugagcgagcagcuccggaagcagauccgcuccgccgccaagaagaacaaccugcccuucaagcugaccugcgccaccacgcgccagguggugaacgucgugaccaccaagaucgcccucaagggcggguga

SEQ ID NO: 17889 - RNA, 5841 nt, Artificial Sequence
  SARS-CoV-2__MT811688.1__non-structural protein 3 (NSP3) CDS gc
auggcccccaccaaggugaccuucggcgacgacacggucaucgaggugcagggguacaagagcgugaacaucaccuucgagcuggacgagcgcaucgacaagguccucaacgagaagugcuccgccuacaccguggagcugggcaccgaggugaacgaguucgcgugcgucguggccgacgccgugaucaagacgcugcagccggucagcgagcuccugaccccccuggggaucgaccucgacgagugguccauggccaccuacuaccuguucgacgagagcggcgaguucaagcuggccucccacauguacugcagcuucuacccccccgacgaggacgaggaggagggggacugcgaggaggaggaguucgagccguccacccaguacgaguacggcacggaggacgacuaccagggcaagccccucgaguucggggcgaccagcgccgcccugcagcccgaggaggagcaggaggaggacuggcuggacgacgacucccagcagaccgugggccagcaggacgggagcgaggacaaccagaccacgaccauccagaccaucguggagguccagccccagcucgagauggagcugaccccgguggugcagacgaucgaggucaacuccuucagcggcuaccugaagcucaccgacaacguguacaucaagaacgccgacaucguggaggaggcgaagaaggucaagcccaccgugguggucaacgccgccaacguguaccugaagcacgggggcggcguggccggggcccugaacaaggcgaccaacaacgccaugcaggucgaguccgacgacuacaucgccacgaacggcccccucaagguggggggcagcugcguccuguccggccacaaccuggccaagcacugccuccacgugguggggcccaacgucaacaagggcgaggacauccagcugcugaagagcgccuacgagaacuucaaccagcacgaggugcuccuggcgccgcugcucuccgccgggaucuucggcgccgaccccauccacagccugcgggugugcgucgacaccgugcgcaccaacguguaccuggccgucuucgacaagaaccucuacgacaagcugguguccagcuuccuggagaugaagagcgagaagcagguggagcagaagaucgccgagauccccaaggaggaggucaagcccuucaucaccgaguccaagccgagcguggagcagcggaagcaggacgacaagaagaucaaggcgugcguggaggaggucacgaccacccucgaggagaccaaguuccugacggagaaccugcuccuguacaucgacaucaacgggaaccugcaccccgacuccgccacccucgugagcgacaucgacaucaccuuccugaagaaggacgcccccuacaucgugggcgacgucgugcaggagggcuuccugaccgccguggucauccccacgaagaaggccgggggcaccaccgagaugcucgcgaaggcccugcgcaaggugccgaccgacaacuacaucacgaccuaccccgggcagggccugaacggguacaccguggaggaggccaagaccguccucaagaagugcaaguccgccuucuacauccugcccagcaucaucuccaacgagaagcaggagauccugggcaccgugagcuggaaccuccgggagaugcuggcgcacgccgaggagacgcgcaagcugaugcccgugugcgucgagaccaaggccaucguguccaccauccagcggaaguacaagggcaucaagauccaggaggggguggucgacuacggcgcccgcuucuacuucuacaccagcaagacgaccguggccucccugaucaacacccucaacgaccugaacgagacccuggugacgaugccgcucggguacgucacccacggccugaaccuggaggaggcggcccgguacaugcgcagccucaaggugcccgccaccguguccgucagcucccccgacgccgugaccgccuacaacggguaccugacgagcuccagcaagacccccgaggagcacuucaucgagaccaucucccuggcgggcagcuacaaggacuggagcuacuccggccagagcacccagcucgggaucgaguuccugaagcggggcgacaaguccguguacuacacgagcaacccgaccaccuuccaccuggacggggaggucaucaccuucgacaaccucaagacgcugcugucccuccgcgaggugcggaccaucaagguguucaccaccgucgacaacaucaaccugcacacgcaggugguggacaugagcaugaccuacggccagcaguucggccccaccuaccuggacggggccgacgucaccaagaucaagccccacaacucccacgagggcaagacguucuacgugcucccgaacgacgacacccugcgcguggaggccuucgaguacuaccacaccaccgaccccagcuuccuggggcgguacauguccgcccucaaccacacgaagaaguggaaguacccccaggucaacggccugaccagcaucaagugggccgacaacaacugcuaccuggcgaccgcccuccugacccugcagcagaucgagcucaaguucaaccccccggcccugcaggacgccuacuaccgcgcgcgggccggggaggccgccaacuucugcgcccugauccucgcguacugcaacaagacggugggcgagcugggcgacgugcgcgagaccauguccuaccuguuccagcacgccaaccucgacagcugcaagcggguccugaacguggucugcaagaccugcgggcagcagcagaccacccugaagggcguggaggccgugauguacauggggacgcucuccuacgagcaguucaagaagggcguccagauccccugcaccugcgggaagcaggccaccaaguaccuggugcagcaggagagccccuucgugaugauguccgcccccccggcgcaguacgagcugaagcacggcaccuucacgugcgccagcgaguacaccggcaacuaccagugcgggcacuacaagcacaucaccuccaaggagacccucuacugcaucgacggcgcccugcugacgaagagcagcgaguacaaggggcccaucaccgacgucuucuacaaggagaacuccuacaccaccacgaucaagcccgugaccuacaagcucgacggcguggucugcaccgagaucgaccccaagcuggacaacuacuacaagaaggacaacagcuacuucaccgagcagccgaucgaccuggugcccaaccagcccuaccccaacgccuccuucgacaacuucaaguucgugugcgacaacaucaaguucgccgacgaccucaaccagcugacgggguacaagaagccggcgagccgcgagcugaaggucaccuucuuccccgaccucaacggcgacgugguggccaucgacuacaagcacuacacccccuccuucaagaagggcgccaagcugcugcacaagcccaucgucuggcacgugaacaacgccaccaacaaggcgacguacaagccgaacaccuggugcauccggugccucuggagcaccaagcccguggagaccuccaacagcuucgacguccugaaguccgaggacgcccaggggauggacaaccuggccugcgaggaccucaagcccgugagcgaggagguggucgagaaccccacgauccagaaggacgugcuggagugcaacgugaagaccaccgaggucgugggcgacaucauccugaagccggccaacaacucccucaagaucaccgaggagguggggcacacggaccugauggccgcguacgucgacaacagcucccugaccaucaagaagcccaacgagcucagccgcgugcugggccugaagacccucgccacccacgggcuggccgccgugaacuccguccccugggacacgaucgccaacuacgcgaagccguuccugaacaagguggugagcaccaccaccaacaucgucacgcgcugccucaaccgggugugcaccaacuacaugcccuacuucuucacccugcugcuccagcugugcaccuucacccgcuccacgaacagccggaucaaggccuccaugcccaccaccaucgccaagaacaccgugaagagcgucggcaaguucugccuggaggccagcuucaacuaccucaagucccccaacuucagcaagcugaucaacaucaucaucugguuccugcuccuguccgugugccugggcagccucaucuacuccacggccgcgcugggggugcugaugagcaaccucggcaugccguccuacugcaccggguaccgcgagggcuaccugaacagcaccaacgucaccaucgccacguacugcaccggcuccauccccugcagcgugugccuguccgggcucgacagccuggacaccuaccccucccuggagaccauccagaucacgaucagcuccuucaagugggaccucaccgccuucggccugguggccgagugguuccuggccuacauccucuucacccgguucuucuacguccuggggcuggcggccaucaugcagcucuucuucagcuacuucgccgugcacuucaucuccaacagcuggcugauguggcugaucaucaaccuggugcagauggcccccaucuccgcgaugguccgcauguacaucuucuucgccagcuucuacuacguguggaagagcuacgugcacgucguggacggcugcaacuccagcaccugcaugaugugcuacaagcggaaccgcgccacgcggguggagugcaccaccaucgucaacggggugcgccgguccuucuacgucuacgccaacggcggcaagggguucugcaagcuccacaacuggaacugcgugaacugcgacaccuucugcgccggcagcacguucaucuccgacgagguggcgcgcgaccugagccugcaguucaagcggccgaucaaccccaccgaccaguccagcuacaucgucgacuccgugaccgugaagaacgggagcauccaccucuacuucgacaaggccggccagaagaccuacgagcgccacucccugagccacuucgucaaccuggacaaccuccgggccaacaacacgaaggggucccugcccaucaacgugaucguguucgacggcaagagcaagugcgaggaguccagcgccaaguccgccagcgucuacuacucccagcugaugugccagcccauccuccugcuggaccaggcgcucgugagcgacgugggcgacagcgccgaggucgccgugaagauguucgacgccuacgugaacaccuucuccagcaccuucaacgucccgauggagaagcugaagacccugguggccacggcggaggccgagcucgccaagaacgugucccuggacaacguccugagcaccuucaucuccgccgcgcgccagggguucguggacagcgacguggagaccaaggacgucguggagugccucaagcugucccaccagagcgacaucgaggugaccggcgacuccugcaacaacuacaugcugacguacaacaaggucgagaacaugaccccccgggaccucggggccugcaucgacugcagcgcccgccacaucaacgcccagguggccaagucccacaacaucgcgcugaucuggaacgugaaggacuucaugagccuguccgagcagcuccggaagcagauccgcagcgccgccaagaagaacaaccugcccuucaagcugaccugcgccaccacgcgccaggucgugaacguggucaccaccaagaucgcccucaagggcggguga

SEQ ID NO: 17890 - RNA, 5841 nt, Artificial Sequence
  SARS-CoV-2__MT811695.1__non-structural protein 3 (NSP3) CDS gc
auggcccccaccaaggugaccuucggcgacgacacggucaucgaggugcagggguacaagagcgugaacaucaccuucgagcuggacgagcgcaucgacaagguccucaacgagaagugcuccgccuacaccguggagcugggcaccgaggugaacgaguucgcgugcgucguggccgacgccgugaucaagacgcugcagccggucagcgagcuccugaccccccuggggaucgaccucgacgagugguccauggccaccuacuaccuguucgacgagagcggcgaguucaagcuggccucccacauguacugcagcuucuacccccccgacgaggacgaggaggagggggacugcgaggaggaggaguucgagccguccacccaguacgaguacggcacggaggacgacuaccagggcaagccccucgaguucggggcgaccagcgccgcccugcagcccgaggaggagcaggaggaggacuggcuggacgacgacucccagcagaccgugggccagcaggacgggagcgaggacaaccagaccacgaccauccagaccaucguggagguccagccccagcucgagauggagcugaccccgguggugcagacgaucgaggucaacuccuucagcggcuaccugaagcucaccgacaacguguacaucaagaacgccgacaucguggaggaggcgaagaaggucaagcccaccgugguggucaacgccgccaacguguaccugaagcacgggggcggcguggccggggcccugaacaaggcgaccaacaacgccaugcaggucgaguccgacgacuacaucgccacgaacggcccccucaagguggggggcagcugcguccuguccggccacaaccuggccaagcacugccuccacgugguggggcccaacgucaacaagggcgaggacauccagcugcugaagagcgccuacgagaacuucaaccagcacgaggugcuccuggcgccgcugcucuccgccgggaucuucggcgccgaccccauccacagccugcgggugugcgucgacaccgugcgcaccaacguguaccuggccgucuucgacaagaaccucuacgacaagcugguguccagcuuccuggagaugaagagcgagaagcagguggagcagaagaucgccgagauccccaaggaggaggucaagcccuucaucaccgaguccaagccgagcguggagcagcggaagcaggacgacaagaagaucaaggcgugcguggaggaggucacgaccacccucgaggagaccaaguuccugacggagaaccugcuccuguacaucgacaucaacgggaaccugcaccccgacuccgccacccucgugagcgacaucgacaucaccuuccugaagaaggacgcccccuacaucgugggcgacgucgugcaggagggcgugcugaccgccgucgugauccccacgaagaaggccgggggcaccaccgagaugcucgcgaaggcccugcgcaaggugccgaccgacaacuacaucacgaccuaccccgggcagggccugaacggguacaccgucgaggaggccaagaccgugcucaagaagugcaaguccgccuucuacauccugcccagcaucaucuccaacgagaagcaggagauccugggcaccgugagcuggaaccuccgggagaugcuggcgcacgccgaggagacgcgcaagcugaugcccgucugcguggagaccaaggccaucguguccaccauccagcggaaguacaagggcaucaagauccaggagggggucguggacuacggcgcccgcuucuacuucuacaccagcaagacgaccguggccucccugaucaacacccucaacgaccugaacgagacccuggucacgaugccgcucggguacgugacccacggccugaaccuggaggaggcggcccgguacaugcgcagccucaaggugcccgccaccgucuccgugagcucccccgacgccgugaccgccuacaacggguaccugacgagcuccagcaagacccccgaggagcacuucaucgagaccaucucccuggcgggcagcuacaaggacuggagcuacuccggccagagcacccagcucgggaucgaguuccugaagcggggcgacaaguccgucuacuacacgagcaacccgaccaccuuccaccuggacggggaggugaucaccuucgacaaccucaagacgcugcugucccuccgcgaggugcggaccaucaaggucuucaccaccguggacaacaucaaccugcacacgcagguggucgacaugagcaugaccuacggccagcaguucggccccaccuaccuggacggggccgacgugaccaagaucaagccccacaacucccacgagggcaagacguucuacgugcucccgaacgacgacacccugcgcgucgaggccuucgaguacuaccacaccaccgaccccagcuuccuggggcgguacauguccgcccucaaccacacgaagaaguggaaguacccccaggugaacggccugaccagcaucaagugggccgacaacaacugcuaccuggcgaccgcccuccugacccugcagcagaucgagcucaaguucaaccccccggcccugcaggacgccuacuaccgcgcgcgggccggggaggccgccaacuucugcgcccugauccucgcguacugcaacaagacggugggcgagcugggcgacguccgcgagaccauguccuaccuguuccagcacgccaaccucgacagcugcaagcgggugcugaacgucgugugcaagaccugcgggcagcagcagaccacccugaagggcguggaggccgucauguacauggggacgcucuccuacgagcaguucaagaagggcgugcagauccccugcaccugcgggaagcaggccaccaaguaccuggugcagcaggagagccccuucgucaugauguccgcccccccggcgcaguacgagcugaagcacggcaccuucacgugcgccagcgaguacaccggcaacuaccagugcgggcacuacaagcacaucaccuccaaggagacccucuacugcaucgacggcgcccugcugacgaagagcagcgaguacaaggggcccaucaccgacguguucuacaaggagaacuccuacaccaccacgaucaagcccgugaccuacaagcucgacggcgucgugugcaccgagaucgaccccaagcuggacaacuacuacaagaaggacaacagcuacuucaccgagcagccgaucgaccuggugcccaaccagcccuaccccaacgccuccuucgacaacuucaaguucgucugcgacaacaucaaguucgccgacgaccucaaccagcugacgggguacaagaagccggcgagccgcgagcugaaggugaccuucuuccccgaccucaacggcgacguggucgccaucgacuacaagcacuacacccccuccuucaagaagggcgccaagcugcugcacaagcccaucguguggcacgugaacaacgccaccaacaaggcgacguacaagccgaacaccuggugcauccggugccucuggagcaccaagcccgucgagaccuccaacagcuucgacgugcugaaguccgaggacacgcaggggauggacaaccuggccugcgaggaccucaagcccgugagcgaggaggucguggagaaccccaccauccagaaggacgugcuggagugcaacgucaagaccaccgagguggugggcgacaucauccugaagccggccaacaacucccucaagaucacggaggaggucgggcacaccgaccugauggccgccuacguggacaacagcucccugaccaucaagaagcccaacgagcucagccgcgugcugggccugaagacccucgcgacgcacgggcuggccgccgucaacuccgugcccugggacaccaucgccaacuacgccaagccguuccugaacaagguggucagcaccaccacgaacaucgugacccgcugccucaaccgggugugcaccaacuacaugcccuacuucuucacccugcugcuccagcugugcaccuucacgcgcuccaccaacagccggaucaaggcguccaugcccaccaccaucgccaagaacacggucaagagcgugggcaaguucugccuggaggccagcuucaacuaccucaagucccccaacuucagcaagcugaucaacaucaucaucugguuccugcuccuguccgugugccugggcagccucaucuacuccaccgccgcccuggggguccugaugagcaaccucggcaugccguccuacugcaccggguaccgcgagggcuaccugaacagcaccaacgugacgaucgcgaccuacugcaccggcuccauccccugcagcgugugccuguccgggcucgacagccuggacaccuaccccucccuggagacgauccagaucaccaucagcuccuucaagugggaccucaccgccuucggccuggucgccgagugguuccuggccuacauccucuucacccgguucuucuacgugcuggggcuggccgcgaucaugcagcucuucuucagcuacuucgccgugcacuucaucuccaacagcuggcugauguggcugaucaucaaccugguccagauggcccccaucuccgccauggugcgcauguacaucuucuucgcgagcuucuacuacguguggaagagcuacguccacgugguggacggcugcaacuccagcacgugcaugaugugcuacaagcggaaccgcgccacccgggucgagugcaccaccaucgugaacgggguccgccgguccuucuacguguacgccaacggcggcaagggguucugcaagcuccacaacuggaacugcgugaacugcgacacguucugcgccggcagcaccuucaucuccgacgaggucgcccgcgaccugagccugcaguucaagcggccgaucaaccccaccgaccaguccagcuacaucguggacuccgugaccgucaagaacgggagcauccaccucuacuucgacaaggcgggccagaagacguacgagcgccacuuccugucccacuucgugaaccuggacaaccuccgggccaacaacaccaaggggagccugcccaucaacgugaucgucuucgacggcaaguccaagugcgaggagagcuccgccaagagcgccuccguguacuacagccagcugaugugccagcccauccuccugcuggaccaggcccucguguccgacgucggcgacagcgcggagguggccgugaagauguucgacgccuacgucaacaccuucagcuccaccuucaacgugccgauggagaagcugaagacgcugguggccaccgccgaggcggagcucgccaagaacgucagccuggacaacgugcuguccaccuucaucagcgccgcccgccagggguucguggacuccgacgucgagaccaaggacgugguggagugccucaagcugagccaccaguccgacaucgaggucacgggcgacagcugcaacaacuacaugcugaccuacaacaagguggagaacaugaccccccgggaccucggggcgugcaucgacugcuccgcccgccacaucaacgcccagguggccaagagccacaacaucgcccugaucuggaacgucaaggacuucaugucccugagcgagcagcuccggaagcagauccgcuccgcggccaagaagaacaaccugcccuucaagcugaccugcgccacgacccgccagguggugaacgucgugaccaccaagaucgcccucaagggcggguga

SEQ ID NO: 17891 - RNA, 5841 nt, Artificial Sequence
  SARS-CoV-2__MT811708.1__non-structural protein 3 (NSP3) CDS gc
auggcccccaccaaggugaccuucggcgacgacacggucaucgaggugcagggguacaagagcgugaacaucaccuucgagcuggacgagcgcaucgacaagguccucaacgagaagugcuccgccuacaccguggagcugggcaccgaggugaacgaguucgcgugcgucguggccgacgccgugaucaagacgcugcagccggucagcgagcuccugaccccccuggggaucgaccucgacgagugguccauggccaccuacuaccuguucgacgagagcggcgaguucaagcuggccucccacauguacugcagcuucuacccccccgacgaggacgaggaggagggggacugcgaggaggaggaguucgagccguccacccaguacgaguacggcacggaggacgacuaccagggcaagccccucgaguucggggcgaccagcgccgcccugcagcccgaggaggagcaggaggaggacuggcuggacgacgacucccagcagaccgugggccagcaggacgggagcgaggacaaccagaccacgaccauccagaccaucguggagguccagccccagcucgagauggagcugaccccgguggugcagacgaucgaggucaacuccuucagcggcuaccugaagcucaccgacaacguguacaucaagaacgccgacaucguggaggaggcgaagaaggucaagcccaccgugguggucaacgccgccaacguguaccugaagcacgggggcggcguggccggggcccugaacaaggcgaccaacaacgccaugcaggucgaguccgacgacuacaucgccacgaacggcccccucaagguggggggcagcugcguccuguccggccacaaccuggccaagcacugccuccacgugguggggcccaacgucaacaagggcgaggacauccagcugcugaagagcgccuacgagaacuucaaccagcacgaggugcuccuggcgccgcugcucuccgccgggaucuucggcgccgaccccauccacagccugcgggugugcgucgacaccgugcgcaccaacguguaccuggccgucuucgacaagaaccucuacgacaagcugguguccagcuuccuggagaugaagagcgagaagcagguggagcagaagaucgccgagauccccaaggaggaggucaagcccuucaucaccgaguccaagccgagcguggagcagcggaagcaggacgacaagaagaucaaggcgugcguggaggaggucacgaccacccucgaggagaccaaguuccugacggagaaccugcuccuguacaucgacaucaacgggaaccugcaccccgacuccgccacccucgugagcgacaucgacaucaccuuccugaagaaggacgcccccuacaucgugggcgacgucgugcaggagggcgugcugaccgccgucgugauccccacgaagaaggccgggggcaccaccgagaugcucgcgaaggcccugcgcaaggugccgaccgacaacuacaucacgaccuaccccgggcagggccugaacggguacaccgucgaggaggccaagaccgugcucaagaagugcaaguccgccuucuacauccugcccagcaucaucuccaacgagaagcaggagauccugggcaccgugagcuggaaccuccgggagaugcuggcgcacgccgaggagacgcgcaagcugaugcccgucugcguggagaccaaggccaucguguccaccauccagcggaaguacaagggcaucaagauccaggagggggucguggacuacggcgcccgcuucuacuucuacaccagcaagacgaccguggccucccugaucaacacccucaacgaccugaacgagacccuggucacgaugccgcucggguacgugacccacggccugaaccuggaggaggcggcccgguacaugcgcagccucaaggugcccgccaccgucuccgugagcucccccgacgccgugaccgccuacaacggguaccugacgagcuccagcaagacccccgaggagcacuucaucgagaccaucucccuggcgggcagcuacaaggacuggagcuacuccggccagagcacccagcucgggaucgaguuccugaagcggggcgacaaguccgucuacuacacgagcaacccgaccaccuuccaccuggacggggaggugaucaccuucgacaaccucaagacgcugcugucccuccgcgaggugcggaccaucaaggucuucaccaccguggacaacaucaaccugcacacgcagguggucgacaugagcaugaccuacggccagcaguucggccccaccuaccuggacggggccgacgugaccaagaucaagccccacaacucccacgagggcaagacguucuacgugcucccgaacgacgacacccugcgcgucgaggccuucgaguacuaccacaccaccgaccccagcuuccuggggcgguacauguccgcccucaaccacacgaagaaguggaaguacccccaggugaacggccugaccagcaucaagugggccgacaacaacugcuaccuggcgaccgcccuccugacccugcagcagaucgagcucaaguucaaccccccggcccugcaggacgccuacuaccgcgcgcgggccggggaggccgccaacuucugcgcccugauccucgcguacugcaacaagacggugggcgagcugggcgacguccgcgagaccauguccuaccuguuccagcacgccaaccucgacagcugcaagcgggugcugaacgucgugugcaagaccugcgggcagcagcagaccacccugaagggcguggaggccgucauguacauggggacgcucuccuacgagcaguucaagaagggcgugcagauccccugcaccugcgggaagcaggccaccaaguaccuggugcagcaggagagccccuucgucaugauguccgcccccccggcgcaguacgagcugaagcacggcaccuucacgugcgccagcgaguacaccggcaacuaccagugcgggcacuacaagcacaucaccuccaaggagacccucuacugcaucgacggcgcccugcugacgaagagcagcgaguacaaggggcccaucaccgacguguucuacaaggagaacuccuacaccaccacgaucaagcccgugaccuacaagcucgacggcgucgugugcaccgagaucgaccccaagcuggacaacuacuacaagaaggacaacagcuacuucaccgagcagccgaucgaccuggugcccaaccagcccuaccccaacgccuccuucgacaacuucaaguucgucugcgacaacaucaaguucgccgacgaccucaaccagcugacgggguacaagaagccggcgagccgcgagcugaaggugaccuucuuccccgaccucaacggcgacguggucgccaucgacuacaagcacuacacccccuccuucaagaagggcgccaagcugcugcacaagcccaucguguggcacgugaacaacgccaccaacaaggcgacguacaagccgaacaccuggugcauccggugccucuggagcaccaagcccgucgagaccuccaacagcuucgacgugcugaaguccgaggacacgcaggggauggacaaccuggccugcgaggaccucaagcccgugagcgaggaggucguggagaaccccaccauccagaaggacgugcuggagugcaacgucaagaccaccgagguggugggcgacaucauccugaagccggccaacaacucccucaagaucacggaggaggucgggcacaccgaccugauggccgccuacguggacaacagcucccugaccaucaagaagcccaacgagcucagccgcgugcugggccugaagacccucgcgacgcacgggcuggccgccgucaacuccgugcccugggacaccaucgccaacuacgccaagccguuccugaacaagguggucagcaccaccacgaacaucgugacccgcugccucaaccgggugugcaccaacuacaugcccuacuucuucacccugcugcuccagcugugcaccuucacgcgcuccaccaacagccggaucaaggcguccaugcccaccaccaucgccaagaacacggucaagagcgugggcaaguucugccuggaggccagcuucaacuaccucaagucccccaacuucagcaagcugaucaacaucaucaucugguuccugcuccuguccgugugccugggcagccucaucuacuccaccgccgcccuggggguccugaugagcaaccucggcaugccguccuacugcaccggguaccgcgagggcuaccugaacagcaccaacgugacgaucgcgaccuacugcaccggcuccauccccugcagcgugugccuguccgggcucgacagccuggacaccuaccccucccuggagacgauccagaucaccaucagcuccuucaagugggaccucaccgccuucggccuggucgccgagugguuccuggccuacauccucuucacccgguucuucuacgugcuggggcuggccgcgaucaugcagcucuucuucagcuacuucgccgugcacuucaucuccaacagcuggcugauguggcugaucaucaaccugguccagauggcccccaucuccgccauggugcgcauguacaucuucuucgcgagcuucuacuacguguggaagagcuacguccacgugguggacggcugcaacuccagcacgugcaugaugugcuacaagcggaaccgcgccacccgggucgagugcaccaccaucgugaacgggguccgccgguccuucuacguguacgccaacggcggcaagggguucugcaagcuccacaacuggaacugcgugaacugcgacacguucugcgccggcagcaccuucaucuccgacgaggucgcccgcgaccugagccugcaguucaagcggccgaucaaccccaccgaccaguccagcuacaucguggacuccgugaccgucaagaacgggagcauccaccucuacuucgacaaggcgggccagaagacguacgagcgccacucccugagccacuucgugaaccuggacaaccuccgggccaacaacaccaaggggucccugcccaucaacgugaucgucuucgacggcaagagcaagugcgaggaguccagcgccaaguccgccagcguguacuacucccagcugaugugccagcccauccuccugcuggaccaggcccucgugagcgacgucggcgacagcgcggagguggccgugaagauguucgacgccuacgucaacaccuucuccagcaccuucaacgugccgauggagaagcugaagacgcugguggccaccgccgaggcggagcucgccaagaacgucucccuggacaacgugcugagcaccuucaucuccgccgcccgccagggguucguggacagcgacgucgagaccaaggacgugguggagugccucaagcugucccaccagagcgacaucgaggucacgggcgacuccugcaacaacuacaugcugaccuacaacaagguggagaacaugaccccccgggaccucggggcgugcaucgacugcagcgcccgccacaucaacgcccagguggccaagucccacaacaucgcccugaucuggaacgucaaggacuucaugagccuguccgagcagcuccggaagcagauccgcagcgcggccaagaagaacaaccugcccuucaagcugaccugcgccacgacccgccagguggugaacgucgugaccaccaagaucgcccucaagggcggguga

SEQ ID NO: 17892 - RNA, 5841 nt, Artificial Sequence
  SARS-CoV-2__MT811713.1__non-structural protein 3 (NSP3) CDS gc
auggcccccaccaaggugaccuucggcgacgacacggucaucgaggugcagggguacaagagcgugaacaucaccuucgagcuggacgagcgcaucgacaagguccucaacgagaagugcuccgccuacaccguggagcugggcaccgaggugaacgaguucgcgugcgucguggccgacgccgugaucaagacgcugcagccggucagcgagcuccugaccccccuggggaucgaccucgacgagugguccauggccaccuacuaccuguucgacgagagcggcgaguucaagcuggccucccacauguacugcagcuucuacccccccgacgaggacgaggaggagggggacugcgaggaggaggaguucgagccguccacccaguacgaguacggcacggaggacgacuaccagggcaagccccucgaguucggggcgaccagcgccgcccugcagcccgaggaggagcaggaggaggacuggcuggacgacgacucccagcagaccgugggccagcaggacgggagcgaggacaaccagaccacgaccauccagaccaucguggagguccagccccagcucgagauggagcugaccccgguggugcagacgaucgaggucaacuccuucagcggcuaccugaagcucaccgacaacguguacaucaagaacgccgacaucguggaggaggcgaagaaggucaagcccaccgugguggucaacgccgccaacguguaccugaagcacgggggcggcguggccggggcccugaacaaggcgaccaacaacgccaugcaggucgaguccgacgacuacaucgccacgaacggcccccucaagguggggggcagcugcguccuguccggccacaaccuggccaagcacugccuccacgugguggggcccaacgucaacaagggcgaggacauccagcugcugaagagcgccuacgagaacuucaaccagcacgaggugcuccuggcgccgcugcucuccgccgggaucuucggcgccgaccccauccacagccugcgggugugcgucgacaccgugcgcaccaacguguaccuggccgucuucgacaagaaccucuacgacaagcugguguccagcuuccuggagaugaagagcgagaagcagguggagcagaagaucgccgagauccccaaggaggaggucaagcccuucaucaccgaguccaagccgagcguggagcagcggaagcaggacgacaagaagaucaaggcgugcguggaggaggucacgaccacccucgaggagaccaaguuccugacggagaaccugcuccuguacaucgacaucaacgggaaccugcaccccgacuccgccacccucgugagcgacaucgacaucaccuuccugaagaaggacgcccccuacaucgugggcgacgucgugcaggagggcgugcugaccgccgucgugauccccacgaagaaggccgggggcaccaccgagaugcucgcgaaggcccugcgcaaggugccgaccgacaacuacaucacgaccuaccccgggcagggccugaacggguacaccgucgaggaggccaagaccgugcucaagaagugcaaguccgccuucuacauccugcccagcaucaucuccaacgagaagcaggagauccugggcaccgugagcuggaaccuccgggagaugcuggcgcacgccgaggagacgcgcaagcugaugcccgucugcguggagaccaaggccaucguguccaccauccagcggaaguacaagggcaucaagauccaggagggggucguggacuacggcgcccgcuucuacuucuacaccagcaagacgaccguggccucccugaucaacacccucaacgaccugaacgagacccuggucacgaugccgcucggguacgugacccacggccugaaccuggaggaggcggcccgguacaugcgcagccucaaggugcccgccaccgucuccgugagcucccccgacgccgugaccgccuacaacggguaccugacgagcuccagcaagacccccgaggagcacuucaucgagaccaucucccuggcgggcagcuacaaggacuggagcuacuccggccagagcacccagcucgggaucgaguuccugaagcggggcgacaaguccgucuacuacacgagcaacccgaccaccuuccaccuggacggggaggugaucaccuucgacaaccucaagacgcugcugucccuccgcgaggugcggaccaucaaggucuucaccaccguggacaacaucaaccugcacacgcagguggucgacaugagcaugaccuacggccagcaguucggccccaccuaccuggacggggccgacgugaccaagaucaagccccacaacucccacgagggcaagacguucuacgugcucccgaacgacgacacccugcgcgucgaggccuucgaguacuaccacaccaccgaccccagcuuccuggggcgguacauguccgcccucaaccacacgaagaaguggaaguacccccaggugaacggccugaccagcaucaagugggccgacaacaacugcuaccuggcgaccgcccuccugacccugcagcagaucgagcucaaguucaaccccccggcccugcaggacgccuacuaccgcgcgcgggccggggaggccgccaacuucugcgcccugauccucgcguacugcaacaagacggugggcgagcugggcgacguccgcgagaccauguccuaccuguuccagcacgccaaccucgacagcugcaagcgggugcugaacgucgugugcaagaccugcgggcagcagcagaccacccugaagggcguggaggccgucauguacauggggacgcucuccuacgagcaguucaagaagggcgugcagauccccugcaccugcgggaagcaggccaccaaguaccuggugcagcaggagagccccuucgucaugauguccgcccccccggcgcaguacgagcugaagcacggcaccuucacgugcgccagcgaguacaccggcaacuaccagugcgggcacuacaagcacaucaccuccaaggagacccucuacugcaucgacggcgcccugcugacgaagagcagcgaguacaaggggcccaucaccgacguguucuacaaggagaacuccuacaccaccacgaucaagcccgugaccuacaagcucgacggcgucgugugcaccgagaucgaccccaagcuggacaacuacuacaagaaggacaacagcuacuucaccgagcagccgaucgaccuggugcccaaccagcccuaccccaacgccuccuucgacaacuucaaguucgucugcgacaacaucaaguucgccgacgaccucaaccagcugacgggguacaagaagccggcgagccgcgagcugaaggugaccuucuuccccgaccucaacggcgacguggucgccaucgacuacaagcacuacacccccuccuucaagaagggcgccaagcugcugcacaagcccaucguguggcacgugaacaacgccaccaacaaggcgacguacaagccgaacaccuggugcauccggugccucuggagcaccaagcccgucgagaccuccaacagcuucgacgugcugaaguccgaggacgcccaggggauggacaaccuggccugcgaggaccucaagcccgugagcgaggaggucguggagaaccccacgauccagaaggacgugcuggagugcaacgucaagaccaccgagguggugggcgacaucauccugaagccggccaacaacucccucaagaucaccgaggaggucgggcacacggaccugauggccgcguacguggacaacagcucccugaccaucaagaagcccaacgagcucagccgcgugcugggccugaagacccucgccacccacgggcuggccgccgucaacuccgugcccugggacacgaucgccaacuacgcgaagccguuccugaacaagguggucagcaccaccaccaacaucgugacgcgcugccucaaccgggugugcaccaacuacaugcccuacuucuucacccugcugcuccagcugugcaccuucacccgcuccacgaacagccggaucaaggccuccaugcccaccaccaucgccaagaacaccgucaagagcgugggcaaguucugccuggaggccagcuucaacuaccucaagucccccaacuucagcaagcugaucaacaucaucaucugguuccugcuccuguccgugugccugggcagccucaucuacuccacggccgcgcuggggguccugaugagcaaccucggcaugccguccuacugcaccggguaccgcgagggcuaccugaacagcaccaacgugaccaucgccacguacugcaccggcuccauccccugcagcgugugccuguccgggcucgacagccuggacaccuaccccucccuggagaccauccagaucacgaucagcuccuucaagugggaccucaccgccuucggccuggucgccgagugguuccuggccuacauccucuucacccgguucuucuacgugcuggggcuggcggccaucaugcagcucuucuucagcuacuucgccgugcacuucaucuccaacagcuggcugauguggcugaucaucaaccugguccagauggcccccaucuccgcgauggugcgcauguacaucuucuucgccagcuucuacuacguguggaagagcuacguccacgugguggacggcugcaacuccagcaccugcaugaugugcuacaagcggaaccgcgccacgcgggucgagugcaccaccaucgugaacgggguccgccgguccuucuacguguacgccaacggcggcaagggguucugcaagcuccacaacuggaacugcgugaacugcgacaccuucugcgccggcagcacguucaucuccgacgaggucgcgcgcgaccugagccugcaguucaagcggccgaucaaccccaccgaccaguccagcuacaucguggacuccgugaccgucaagaacgggagcauccaccucuacuucgacaaggccggccagaagaccuacgagcgccacucccugagccacuucgugaaccuggacaaccuccgggccaacaacacgaaggggucccugcccaucaacgugaucgucuucgacggcaagagcaagugcgaggaguccagcgccaaguccgccagcguguacuacucccagcugaugugccagcccauccuccugcuggaccaggcgcucgugagcgacgucggcgacagcgccgagguggccgugaagauguucgacgccuacgucaacaccuucuccagcaccuucaacgugccgauggagaagcugaagacccugguggccacggcggaggccgagcucgccaacaacgucucccuggacaacgugcugagcaccuucaucuccgccgcgcgccagggguucguggacagcgacgucgagaccaaggacgugguggagugccucaagcugucccaccagagcgacaucgaggucaccggcgacuccugcaacaacuacaugcugacguacaacaagguggagaacaugaccccccgggaccucggggccugcaucgacugcagcgcccgccacaucaacgcccagguggccaagucccacaacaucgcgcugaucuggaacgucaaggacuucaugagccuguccgagcagcuccggaagcagauccgcagcgccgccaagaagaacaaccugcccuucaagcugaccugcgccaccacgcgccagguggugaacgucgugaccaccaagaucgcccucaagggcggguga

SEQ ID NO: 17893 - RNA, 5841 nt, Artificial Sequence
  SARS-CoV-2__MT811720.1__non-structural protein 3 (NSP3) CDS gc
auggcccccaccaaggugaccuucggcgacgacacggucaucgaggugcagggguacaagagcgugaacaucaccuucgagcuggacgagcgcaucgacaagguccucaacgagaagugcuccgccuacaccguggagcugggcaccgaggugaacgaguucgcgugcgucguggccgacgccaucaucaagacgcugcagccggugagcgagcuccugaccccccuggggaucgaccucgacgagugguccauggccaccuacuaccuguucgacgagagcggcgaguucaagcuggccucccacauguacugcagcuucuacccccccgacgaggacgaggaggagggggacugcgaggaggaggaguucgagccguccacccaguacgaguacggcacggaggacgacuaccagggcaagccccucgaguucggggcgaccagcgccgcccugcagcccgaggaggagcaggaggaggacuggcuggacgacgacucccagcagaccgucggccagcaggacgggagcgaggacaaccagaccacgaccauccagaccaucguggaggugcagccccagcucgagauggagcugaccccggucgugcagacgaucgaggugaacuccuucagcggcuaccugaagcucaccgacaacgucuacaucaagaacgccgacaucguggaggaggcgaagaaggugaagcccaccgucguggugaacgccgccaacgucuaccugaagcacgggggcggcguggccggggcccugaacaaggcgaccaacaacgccaugcagguggaguccgacgacuacaucgccacgaacggcccccucaaggucgggggcagcugcgugcuguccggccacaaccuggccaagcacugccuccacgucguggggcccaacgugaacaagggcgaggacauccagcugcugaagagcgccuacgagaacuucaaccagcacgagguccuccuggcgccgcugcucuccgccgggaucuucggcgccgaccccauccacagccugcgggugugcguggacaccguccgcaccaacguguaccuggccguguucgacaagaaccucuacgacaagcuggucuccagcuuccuggagaugaagagcgagaagcagguggagcagaagaucgccgagauccccaaggaggaggugaagcccuucaucaccgaguccaagccgagcgucgagcagcggaagcaggacgacaagaagaucaaggcgugcguggaggaggugacgaccacccucgaggagaccaaguuccugacggagaaccugcuccuguacaucgacaucaacgggaaccugcaccccgacuccgccacccucgucagcgacaucgacaucaccuuccugaagaaggacgcccccuacaucgugggcgacgugguccaggagggcgugcugaccgccguggucauccccacgaagaaggccgggggcaccaccgagaugcucgcgaaggcccugcgcaaggugccgaccgacaacuacaucacgaccuaccccgggcagggccugaacggguacaccguggaggaggccaagaccguccucaagaagugcaaguccgccuucuacauccugcccagcaucaucuccaacgagaagcaggagauccugggcaccgugagcuggaaccuccgggagaugcuggcgcacgccgaggagacgcgcaagcugaugcccgugugcgucgagaccaaggccaucguguccaccauccagcggaaguacaagggcaucaagauccaggaggggguggucgacuacggcgcccgcuucuacuucuacaccagcaagacgaccguggccucccugaucaacacccucaacgaccugaacgagacccuggugacgaugccgcucggguacgucacccacggccugaaccuggaggaggcggcccgguacaugcgcagccucaaggugcccgccaccguguccgucagcucccccgacgccgugaccgccuacaacggguaccugacgagcuccagcaagacccccgaggagcacuucaucgagaccaucucccuggcgggcagcuacaaggacuggagcuacuccggccagagcacccagcucgggaucgaguuccugaagcggggcgacaaguccguguacuacacgagcaacccgaccaccuuccaccuggacggggaggucaucaccuucgacaaccucaagacgcugcugucccuccgcgaggugcggaccaucaagguguucaccaccgucgacaacaucaaccugcacacgcaggugguggacaugagcaugaccuacggccagcaguucggccccaccuaccuggacggggccgacgucaccaagaucaagccccacaacucccacgagggcaagacguucuacgugcucccgaacgacgacacccugcgcguggaggccuucgaguacuaccacaccaccgaccccagcuuccuggggcgguacauguccgcccucaaccacacgaagaaguggaaguacccccaggucaacggccugaccagcaucaagugggccgacaacaacugcuaccuggcgaccgcccuccugacccugcagcagaucgagcucaaguucaaccccccggcccugcaggacgccuacuaccgcgcgcgggccggggaggccgccaacuucugcgcccugauccucgcguacugcaacaagacggugggcgagcugggcgacgugcgcgagaccauguccuaccuguuccagcacgccaaccucgacagcugcaagcggguccugaacguggucugcaagaccugcgggcagcagcagaccacccugaagggcguggaggccgugauguacauggggacgcucuccuacgagcaguucaagaagggcguccagauccccugcaccugcgggaagcaggccaccaaguaccuggugcagcaggagagccccuucgugaugauguccgcccccccggcgcaguacgagcugaagcacggcaccuucacgugcgccagcgaguacaccggcaacuaccagugcgggcacuacaagcacaucaccuccaaggagacccucuacugcaucgacggcgcccugcugacgaagagcagcgaguacaaggggcccaucaccgacgucuucuacaaggagaacuccuacaccaccacgaucaagcccgugaccuacaagcucgacggcguggucugcaccgagaucgaccccaagcuggacaacuacuacaagaaggacaacagcuacuucaccgagcagccgaucgaccuggugcccaaccagcccuaccccaacgccuccuucgacaacuucaaguucgugugcgacaacaucaaguucgccgacgaccucaaccagcugacgggguacaagaagccggcgagccgcgagcugaaggucaccuucuuccccgaccucaacggcgacgugguggccaucgacuacaagcacuacacccccuccuucaagaagggcgccaagcugcugcacaagcccaucgucuggcacgugaacaacgccaccaacaaggcgacguacaagccgaacaccuggugcauccggugccucuggagcaccaagcccguggagaccuccaacagcuucgacguccugaaguccgaggacgcccaggggauggacaaccuggccugcgaggaccucaagcccgugagcgaggagguggucgagaaccccacgauccagaaggacgugcuggagugcaacgugaagaccaccgaggucgugggcgacaucauccugaagccggccaacaacucccucaagaucaccgaggagguggggcacacggaccugauggccgcguacgucgacaacagcucccugaccaucaagaagcccaacgagcucagccgcgugcugggccugaagacccucgccacccacgggcuggccgccgugaacuccguccccugggacacgaucgccaacuacgcgaagccguuccugaacaagguggugagcaccaccaccaacaucgucacgcgcugccucaaccgggugugcaccaacuacaugcccuacuucuucacccugcugcuccagcugugcaccuucacccgcuccacgaacagccggaucaaggccuccaugcccaccaccaucgccaagaacaccgugaagagcgucggcaaguucugccuggaggccagcuucaacuaccucaagucccccaacuucagcaagcugaucaacaucaucaucugguuccugcuccuguccgugugccugggcagccucaucuacuccacggccgcgcugggggugcugaugagcaaccucggcaugccguccuacugcaccggguaccgcgagggcuaccugaacagcaccaacgucaccaucgccacguacugcaccggcuccauccccugcagcgugugccuguccgggcucgacagccuggacaccuaccccucccuggagaccauccagaucacgaucagcuccuucaagugggaccucaccgccuucggccugguggccgagugguuccuggccuacauccucuucacccgguucuucuacguccuggggcuggcggccaucaugcagcucuucuucagcuacuucgccgugcacuucaucuccaacagcuggcugauguggcugaucaucaaccuggugcagauggcccccaucuccgcgaugguccgcauguacaucuucuucgccagcuucuacuacguguggaagagcuacgugcacgucguggacggcugcaacuccagcaccugcaugaugugcuacaagcggaaccgcgccacgcggguggagugcaccaccaucgucaacggggugcgccgguccuucuacgucuacgccaacggcggcaagggguucugcaagcuccacaacuggaacugcgugaacugcgacaccuucugcgccggcagcacguucaucuccgacgagguggcgcgcgaccugagccugcaguucaagcggccgaucaaccccaccgaccaguccagcuacaucgucgacuccgugaccgugaagaacgggagcauccaccucuacuucgacaaggccggccagaagaccuacgagcgccacucccugagccacuucgucaaccuggacaaccuccgggccaacaacacgaaggggucccugcccaucaacgugaucguguucgacggcaagagcaagugcgaggaguccagcgccaaguccgccagcgucuacuacucccagcugaugugccagcccauccuccugcuggaccaggcgcucgugagcgacgugggcgacagcgccgaggucgccgugaagauguucgacgccuacgugaacaccuucuccagcaccuucaacgucccgauggagaagcugaagacccugguggccacggcggaggccgagcucgccaagaacgugucccuggacaacguccugagcaccuucaucuccgccgcgcgccagggguucguggacagcgacguggagaccaaggacgucguggagugccucaagcugucccaccagagcgacaucgaggugaccggcgacuccugcaacaacuacaugcugacguacaacaaggucgagaacaugaccccccgggaccucggggccugcaucgacugcagcgcccgccacaucaacgcccagguggccaagucccacaacaucgcgcugaucuggaacgugaaggacuucaugagccuguccgagcagcuccggaagcagauccgcagcgccgccaagaagaacaaccugcccuucaagcugaccugcgccaccacgcgccaggucgugaacguggucaccaccaagaucgcccucaagggcggguga

SEQ ID NO: 17894 - RNA, 5841 nt, Artificial Sequence
  SARS-CoV-2__MT811723.1__non-structural protein 3 (NSP3) CDS gc
auggcccccaccaaggugaccuucggcgacgacacggucaucgaggugcagggguacaagagcgugaacaucaccuucgagcuggacgagcgcaucgacaagguccucaacgagaagugcuccgccuacaccguggagcugggcaccgaggugaacgaguucgcgugcgucguggccgacgccgugaucaagacgcugcagccggucagcgagcuccugaccccccuggggaucgaccucgacgagugguccauggccaccuacuaccuguucgacgagagcggcgaguucaagcuggccucccacauguacugcagcuucuacccccccgacgaggacgaggaggagggggacugcgaggaggaggaguucgagccguccacccaguacgaguacggcacggaggacgacuaccagggcaagccccucgaguucggggcgaccagcgccgcccugcagcccgaggaggagcaggaggaggacuggcuggacgacgacucccagcaggccgugggccagcaggacgggagcgaggacaaccagaccaccacgauccagaccaucguggagguccagccccagcucgagauggagcugaccccgguggugcagaccaucgaggucaacuccuucagcggcuaccugaagcucacggacaacguguacaucaagaacgcggacaucguggaggaggccaagaaggucaagcccaccgugguggucaacgccgccaacguguaccugaagcacgggggcggcguggccggggcgcugaacaaggccaccaacaacgccaugcaggucgaguccgacgacuacaucgccaccaacggcccccucaagguggggggcagcugcguccuguccggccacaaccuggccaagcacugccuccacgugguggggcccaacgucaacaagggcgaggacauccagcugcugaagagcgcguacgagaacuucaaccagcacgaggugcuccuggccccgcugcucuccgccgggaucuucggcgccgaccccauccacagccugcgggugugcgucgacacggugcgcaccaacguguaccuggccgucuucgacaagaaccucuacgacaagcugguguccagcuuccuggagaugaagagcgagaagcagguggagcagaagaucgcggagauccccaaggaggaggucaagcccuucaucaccgaguccaagccgagcguggagcagcggaagcaggacgacaagaagaucaaggccugcguggaggaggucaccacgacccucgaggagaccaaguuccugaccgagaaccugcuccuguacaucgacaucaacgggaaccugcaccccgacuccgccacgcucgugagcgacaucgacaucaccuuccugaagaaggacgcccccuacaucgugggcgacgucgugcaggagggcgugcugaccgccgucgugauccccaccaagaaggcggggggcacgaccgagaugcucgccaaggcccugcgcaaggugccgaccgacaacuacaucaccacguaccccgggcagggccugaacggguacaccgucgaggaggccaagaccgugcucaagaagugcaaguccgcguucuacauccugcccagcaucaucuccaacgagaagcaggagauccugggcaccgugagcuggaaccuccgggagaugcuggcccacgccgaggagacccgcaagcugaugcccgucugcguggagacgaaggccaucguguccaccauccagcggaaguacaagggcaucaagauccaggagggggucguggacuacggcgcccgcuucuacuucuacaccagcaagaccacgguggcgucccugaucaacacccucaacgaccugaacgagacccuggucaccaugccgcucggguacgugacgcacggccugaaccuggaggaggccgcccgguacaugcgcagccucaaggugcccgccaccgucuccgugagcucccccgacgccgugaccgcguacaacggguaccugaccagcuccagcaagacgcccgaggagcacuucaucgagaccaucucccuggccggcagcuacaaggacuggagcuacuccggccagagcacccagcucgggaucgaguuccugaagcggggcgacaaguccgucuacuacaccagcaacccgacgaccuuccaccuggacggggaggugaucaccuucgacaaccucaagacccugcugucccuccgcgaggugcggacgaucaaggucuucaccaccguggacaacaucaaccugcacacccagguggucgacaugagcaugacguacggccagcaguucggccccaccuaccuggacggggccgacgugaccaagaucaagccccacaacucccacgagggcaagaccuucuacgugcucccgaacgacgacacgcugcgcgucgaggccuucgaguacuaccacaccaccgaccccagcuuccuggggcgguacauguccgcccucaaccacaccaagaaguggaaguacccccaggugaacggccugacgagcaucaagugggcggacaacaacugcuaccuggccaccgcccuccugacccugcagcagaucgagcucaaguucaaccccccggcccugcaggacgcguacuaccgcgcccgggccggggaggccgccaacuucugcgcgcugauccucgccuacugcaacaagaccgugggcgagcugggcgacguccgcgagacgauguccuaccuguuccagcacgccaaccucgacagcugcaagcgggugcugaacgucgugugcaagaccugcgggcagcagcagaccacccugaagggcguggaggccgucauguacauggggacccucuccuacgagcaguucaagaagggcgugcagauccccugcacgugcgggaagcaggccaccaaguaccuggugcagcaggagagccccuucgucaugauguccgcgcccccggcccaguacgagcugaagcacggcaccuucaccugcgccagcgaguacacgggcaacuaccagugcgggcacuacaagcacaucaccuccaaggagacccucuacugcaucgacggcgcccugcugaccaagagcagcgaguacaaggggcccaucacggacguguucuacaaggagaacuccuacaccaccaccaucaagcccgugacguacaagcucgacggcgucgugugcaccgagaucgaccccaagcuggacaacuacuacaagaaggacaacagcuacuucaccgagcagccgaucgaccuggugcccaaccagcccuaccccaacgccuccuucgacaacuucaaguucgucugcgacaacaucaaguucgcggacgaccucaaccagcugaccggguacaagaagccggccagccgcgagcugaaggugacguucuuccccgaccucaacggcgacguggucgccaucgacuacaagcacuacacccccuccuucaagaagggcgccaagcugcugcacaagcccaucguguggcacgugaacaacgcgaccaacaaggccaccuacaagccgaacacguggugcauccggugccucuggagcaccaagcccgucgagaccuccaacagcuucgacgugcugaaguccgaggacgcccaggggauggacaaccuggccugcgaggaccucaagcccgugagcgaggaggucguggagaaccccaccauccagaaggacgugcuggagugcaacgucaagacgaccgagguggugggcgacaucauccugaagccggccaacaacucccucaagaucaccgaggaggucgggcacaccgaccugauggcggccuacguggacaacagcucccugacgaucaagaagcccaacgagcucagccgcgugcugggccugaagacccucgccacccacgggcuggccgccgucaacuccgugcccugggacaccaucgcgaacuacgccaagccguuccugaacaagguggucagcacgaccaccaacaucgugacccgcugccucaaccgggugugcacgaacuacaugcccuacuucuucacccugcugcuccagcugugcaccuucacccgcuccaccaacagccggaucaaggccuccaugcccacgaccaucgccaagaacaccgucaagagcgugggcaaguucugccuggaggccagcuucaacuaccucaagucccccaacuucagcaagcugaucaacaucaucaucugguuccugcuccuguccgugugccugggcagccucaucuacuccaccgcggcccuggggguccugaugagcaaccucggcaugccguccuacugcacgggguaccgcgagggcuaccugaacagcaccaacgugaccaucgccaccuacugcacgggcuccauccccugcagcgugugccuguccgggcucgacagccuggacaccuaccccucccuggagaccauccagaucaccaucagcuccuucaagugggaccucacggccuucggccuggucgccgagugguuccuggcguacauccucuucacccgguucuucuacgugcuggggcuggccgccaucaugcagcucuucuucagcuacuucgccgugcacuucaucuccaacagcuggcugauguggcugaucaucaaccugguccagauggcgcccaucuccgccauggugcgcauguacaucuucuucgccagcuucuacuacguguggaagagcuacguccacgugguggacggcugcaacuccagcaccugcaugaugugcuacaagcggaaccgcgccacccgggucgagugcacgaccaucgugaacgggguccgccgguccuucuacguguacgccaacggcggcaagggguucugcaagcuccacaacuggaacugcgugaacugcgacaccuucugcgcgggcagcaccuucaucuccgacgaggucgcccgcgaccugagccugcaguucaagcggccgaucaaccccacggaccaguccagcuacaucguggacuccgugaccgucaagaacgggagcauccaccucuacuucgacaaggccggccagaagaccuacgagcgccacucccugagccacuucgugaaccuggacaaccuccgggccaacaacaccaaggggucccugcccaucaacgugaucgucuucgacggcaagagcaagugcgaggaguccagcgccaaguccgcgagcguguacuacucccagcugaugugccagcccauccuccugcuggaccaggcccucgugagcgacgucggcgacagcgccgagguggccgugaagauguucgacgccuacgucaacacguucuccagcaccuucaacgugccgauggagaagcugaagacccugguggcgaccgccgaggccgagcucgccaagaacgucucccuggacaacgugcugagcacguucaucuccgcggcccgccagggguucguggacagcgacgucgagaccaaggacgugguggagugccucaagcugucccaccagagcgacaucgaggucaccggcgacuccugcaacaacuacaugcugaccuacaacaagguggagaacaugacgccccgggaccucggggccugcaucgacugcagcgcccgccacaucaacgcccagguggcgaagucccacaacaucgcccugaucuggaacgucaaggacuucaugagccuguccgagcagcuccggaagcagauccgcagcgccgccaagaagaacaaccugcccuucaagcugaccugcgccaccacccgccagguggugaacgucgugacgaccaagaucgcgcucaagggcggguga

SEQ ID NO: 17895 - RNA, 5841 nt, Artificial Sequence
  SARS-CoV-2__MT811727.1__non-structural protein 3 (NSP3) CDS gc
auggcccccaccaaggugaccuucggcgacgacacggucaucgaggugcagggguacaagagcgugaacaucaccuucgagcuggacgagcgcaucgacaagguccucaacgagaagugcuccgccuacaccguggagcugggcaccgaggugaacgaguucgcgugcgucguggccgacgccgugaucaagacgcugcagccggucagcgagcuccugaccccccuggggaucgaccucgacgagugguccauggccaccuacuaccuguucgacgagagcggcgaguucaagcuggccucccacauguacugcagcuucuacccccccgacgaggacgaggaggagggggacugcgaggaggaggaguucgagccguccacccaguacgaguacggcacggaggacgacuaccagggcaagccccucgaguucggggcgaccagcgccgcccugcagcccgaggaggagcaggaggaggacuggcuggacgacgacucccagcagaccgugggccagcaggacgggagcgaggacaaccagaccacgaccauccagaccaucguggagguccagccccagcucgagauggagcugaccccgguggugcagacgaucgaggucaacuccuucagcggcuaccugaagcucaccgacaacguguacaucaagaacgccgacaucguggaggaggcgaagaaggucaagcccaccgugguggucaacgccgccaacguguaccugaagcacgggggcggcguggccggggcccugaacaaggcgaccaacaacgccaugcaggucgaguccgacgacuacaucgccacgaacggcccccucaagguggggggcagcugcguccuguccggccacaaccuggccaagcacugccuccacgugguggggcccaacgucaacaagggcgaggacauccagcugcugaagagcgccuacgagaacuucaaccagcacgaggugcuccuggcgccgcugcucuccgccgggaucuucggcgccgaccccauccacagccugcgggugugcgucgacaccgugcgcaccaacguguaccuggccgucuucgacaagaaccucuacgacaagcugguguccagcuuccuggagaugaagagcgagaagcagguggagcagaacaucgccgagauccccaaggaggaggucaagcccuucaucaccgaguccaagccgagcguggagcagcggaagcaggacgacaagaagaucaaggcgugcguggaggaggucacgaccacccucgaggagaccaaguuccugacggagaaccugcuccuguacaucgacaucaacgggaaccugcaccccgacuccgccacccucgugagcgacaucgacaucaccuuccugaagaaggacgcccccuacaucgugggcgacgucgugcaggagggcgugcugaccgccgucgugauccccacgaagaaggccgggggcaccaccgagaugcucgcgaaggcccugcgcaaggugccgaccgacaacuacaucacgaccuaccccgggcagggccugaacggguacaccgucgaggaggccaagaccgugcucaagaagugcaaguccgccuucuacauccugcccagcaucaucuccaacgagaagcaggagauccugggcaccgugagcuggaaccuccgggagaugcuggcgcacgccgaggagacgcgcaagcugaugcccgucugcguggagaccaaggccaucguguccaccauccagcggaaguacaagggcaucaagauccaggagggggucguggacuacggcgcccgcuucuacuucuacaccagcaagacgaccguggccucccugaucaacacccucaacgaccugaacgagacccuggucacgaugccgcucggguacgugacccacggccugaaccuggaggaggcggcccgguacaugcgcagccucaaggugcccgccaccgucuccgugagcucccccgacgccgugaccgccuacaacggguaccugacgagcuccagcaagacccccgaggagcacuucaucgagaccaucucccuggcgggcagcuacaaggacuggagcuacuccggccagagcacccagcucgggaucgaguuccugaagcggggcgacaaguccgucuacuacacgagcaacccgaccaccuuccaccuggacggggaggugaucaccuucgacaaccucaagacgcugcugucccuccgcgaggugcggaccaucaaggucuucaccaccguggacaacaucaaccugcacacgcagguggucgacaugagcaugaccuacggccagcaguucggccccaccuaccuggacggggccgacgugaccaagaucaagccccacaacucccacgagggcaagacguucuacgugcucccgaacgacgacacccugcgcgucgaggccuucgaguacuaccacaccaccgaccccagcuuccuggggcgguacauguccgcccucaaccacacgaagaaguggaaguacccccaggugaacggccugaccagcaucaagugggccgacaacaacugcuaccuggcgaccgcccuccugacccugcagcagaucgagcucaaguucaaccccccggcccugcaggacgccuacuaccgcgcgcgggccggggaggccgccaacuucugcgcccugauccucgcguacugcaacaagacggugggcgagcugggcgacguccgcgagaccauguccuaccuguuccagcacgccaaccucgacagcugcaagcgggugcugaacgucgugugcaagaccugcgggcagcagcagaccacccugaagggcguggaggccgucauguacauggggacgcucuccuacgagcaguucaagaagggcgugcagauccccugcaccugcgggaagcaggccaccaaguaccuggugcagcaggagagccccuucgucaugauguccgcccccccggcgcaguacgagcugaagcacggcaccuucacgugcgccagcgaguacaccggcaacuaccagugcgggcacuacaagcacaucaccuccaaggagacccucuacugcaucgacggcgcccugcugacgaagagcagcgaguacaaggggcccaucaccgacguguucuacaaggagaacuccuacaccaccacgaucaagcccgugaccuacaagcucgacggcgucgugugcaccgagaucgaccccaagcuggacaacuacuacaagaaggacaacagcuacuucaccgagcagccgaucgaccuggugcccaaccagcccuaccccaacgccuccuucgacaacuucaaguucgucugcgacaacaucaaguucgccgacgaccucaaccagcugacgggguacaagaagccggcgagccgcgagcugaaggugaccuucuuccccgaccucaacggcgacguggucgccaucgacuacaagcacuacacccccuccuucaagaagggcgccaagcugcugcacaagcccaucguguggcacgugaacaacgccaccaacaaggcgacguacaagccgaacaccuggugcauccggugccucuggagcaccaagcccgucgagaccuccaacagcuucgacgugcugaaguccgaggacgcccaggggauggacaaccuggugugcgaggaccucaagcccgucagcgaggaggugguggagaaccccacgauccagaaggacguccuggagugcaacgugaagaccaccgagguggucggcgacaucauccugaagccggccaacaacucccucaagaucaccgaggagguggggcacacggaccugauggccgccuacguggacaacagcucccugaccaucaagaagcccaacgagcucagccgcguccugggccugaagacccucgcgacccacgggcuggccgccgugaacuccgugcccugggacacgaucgccaacuacgccaagccguuccugaacaaggucgugagcaccaccaccaacaucgugacgcgcugccucaaccgggucugcaccaacuacaugcccuacuucuucacccugcugcuccagcugugcaccuucacccgcuccacgaacagccggaucaaggcguccaugcccaccaccaucgccaagaacaccgugaagagcgugggcaaguucugccuggaggccagcuucaacuaccucaagucccccaacuucagcaagcugaucaacaucaucaucugguuccugcuccuguccgucugccugggcagccucaucuacuccacggccgcccugggggugcugaugagcaaccucggcaugccguccuacugcaccggguaccgcgagggcuaccugaacagcaccaacgugaccaucgcgacguacugcaccggcuccauccccugcagcgucugccuguccgggcucgacagccuggacaccuaccccucccuggagaccauccagaucacgaucagcuccuucaagugggaccucaccgccuucggccugguggccgagugguuccuggccuacauccucuucacccgguucuucuacgugcuggggcuggccgcgaucaugcagcucuucuucagcuacuucgccguccacuucaucuccaacagcuggcugauguggcugaucaucaaccuggugcagauggcccccaucuccgccauggugcgcauguacaucuucuucgcgagcuucuacuacgucuggaagagcuacgugcacguggucgacggcugcaacuccagcaccugcaugaugugcuacaagcggaaccgcgccacgcggguggagugcaccaccaucgucaacggggugcgccgguccuucuacguguacgccaacggcggcaagggguucugcaagcuccacaacuggaacugcgucaacugcgacaccuucugcgccggcagcacguucaucuccgacgagguggcccgcgaccugagccugcaguucaagcggccgaucaaccccaccgaccaguccagcuacaucguggacuccgucaccgugaagaacgggagcauccaccucuacuucgacaaggcgggccagaagaccuacgagcgccacucccugagccacuucgugaaccuggacaaccuccgggccaacaacacgaaggggucccugcccaucaacgucaucguguucgacggcaagagcaagugcgaggaguccagcgccaaguccgccagcguguacuacucccagcugaugugccagcccauccuccugcuggaccaggcccucgucagcgacgugggcgacagcgcggagguggccgucaagauguucgacgccuacgugaacaccuucuccagcaccuucaacgugccgauggagaagcugaagacccuggucgccacggccgaggcggagcucgccaagaacgugucccuggacaacgugcugagcaccuucaucuccgccgcccgccagggguucgucgacagcgacguggagaccaaggacguggucgagugccucaagcugucccaccagagcgacaucgaggugaccggcgacuccugcaacaacuacaugcugacguacaacaagguggagaacaugaccccccgggaccucggggcgugcaucgacugcagcgcccgccacaucaacgcccaggucgccaagucccacaacaucgcccugaucuggaacgugaaggacuucaugagccuguccgagcagcuccggaagcagauccgcagcgcggccaagaagaacaaccugcccuucaagcugaccugcgccaccacgcgccagguggucaacguggugaccaccaagaucgcccucaagggcggguga

SEQ ID NO: 17896 - RNA, 5841 nt, Artificial Sequence
  SARS-CoV-2__MT811731.1__non-structural protein 3 (NSP3) CDS gc
auggcccccaccaaggugaccuucggcgacgacacggucaucgaggugcagggguacaagagcgugaacaucaccuucgagcuggacgagcgcaucgacaagguccucaacgagaagugcuccgccuacaccguggagcugggcaccgaggugaacgaguucgcgugcgucguggccgacgccgugaucaagacgcugcagccggucagcgagcuccugaccccccuggggaucgaccucgacgagugguccauggccaccuacuaccuguucgacgagagcggcgaguucaagcuggccucccacauguacugcagcuucuacccccccgacgaggacgaggaggagggggacugcgaggaggaggaguucgagccguccacccaguacgaguacggcacggaggacgacuaccagggcaagccccucgaguucggggcgaccagcgccgcccugcagcccgaggaggagcaggaggaggacuggcuggacgacgacucccagcagaccgugggccagcaggacgggagcgaggacaaccagaccacgaccauccagaccaucguggagguccagccccagcucgagauggagcugaccccgguggugcagacgaucgaggucaacuccuucagcggcuaccugaagcucaccgacaacguguacaucaagaacgccgacaucguggaggaggcgaagaaggucaagcccaccgugguggucaacgccgccaacguguaccugaagcacgggggcggcguggccggggcccugaacaaggcgaccaacaacgccaugcaggucgaguccgacgacuacaucgccacgaacggcccccucaagguggggggcagcugcguccuguccggccacaaccuggccaagcacugccuccacgugguggggcccaacgucaacaagggcgaggacauccagcugcugaagagcgccuacgagaacuucaaccagcacgaggugcuccuggcgccgcugcucuccgccgggaucuucggcgccgaccccauccacagccugcgggugugcgucgacaccgugcgcaccaacguguaccuggccgucuucgacaagaaccucuacgacaagcugguguccagcuuccuggagaugaagagcgagaagcagguggagcagaagaucgccgagauccccaaggaggaggucaagcccuucaucaccgaguccaagccgagcguggagcagcggaagcaggacgacaagaagaucaaggcgugcguggaggaggucacgaccacccucgaggagaccaaguuccugacggagaaccugcuccuguacaucgacaucaacgggaaccugcaccccgacuccgccacccucgugagcgacaucgacaucaccuuccugaagaaggacgcccccuacaucgugggcgacgucgugcaggagggcgugcugaccgccgucgugauccccacgaagaaggccgggggcaccaccgagaugcucgcgaaggcccugcgcaaggugccgaccgacaacuacaucacgaccuaccccgggcagggccugaacggguacaccgucgaggaggccaagaccgugcucaagaagugcaaguccgccuucuacauccugcccagcaucaucuccaacgagaagcaggagauccugggcaccgugagcuggaaccuccgggagaugcuggcgcacgccgaggagacgcgcaagcugaugcccgucugcguggagaccaaggccaucguguccaccauccagcggaaguacaagggcaucaagauccaggagggggucguggacuacggcgcccgcuucuacuucuacaccagcaagacgaccguggccucccugaucaacacccucaacgaccugaacgagacccuggucacgaugccgcucggguacgugacccacggccugaaccuggaggaggcggcccgguacaugcgcagccucaaggugcccgccaccgucuccgugagcucccccgacgccgugaccgccuacaacggguaccugacgagcuccagcaagacccccgaggagcacuucaucgagaccaucucccuggcgggcagcuacaaggacuggagcuacuccggccagagcacccagcucgggaucgaguuccugaagcggggcgacaaguccgucuacuacacgagcaacccgaccaccuuccaccuggacggggaggugaucaccuucgacaaccucaagacguuccugucccugcgcgaggugcggaccaucaaggucuucaccaccguggacaacaucaaccuccacacgcagguggucgacaugagcaugaccuacggccagcaguucggccccaccuaccuggacggggccgacgugaccaagaucaagccccacaacucccacgagggcaagacguucuacgugcugccgaacgacgacacccuccgcgucgaggccuucgaguacuaccacaccaccgaccccagcuuccuggggcgguacauguccgcccugaaccacacgaagaaguggaaguacccccaggugaacggccucaccagcaucaagugggccgacaacaacugcuaccuggcgaccgcccugcucacccugcagcagaucgagcugaaguucaaccccccggcccuccaggacgccuacuaccgcgcgcgggccggggaggccgccaacuucugcgcccugauccuggcguacugcaacaagacggugggcgagcucggcgacguccgcgagaccauguccuaccuguuccagcacgccaaccuggacagcugcaagcgggugcucaacgucgugugcaagaccugcgggcagcagcagaccacccugaagggcguggaggccgucauguacauggggacgcuguccuacgagcaguucaagaagggcgugcagauccccugcaccugcgggaagcaggccaccaaguaccucgugcagcaggagagccccuucgucaugauguccgcccccccggcgcaguacgagcugaagcacggcaccuucacgugcgccagcgaguacaccggcaacuaccagugcgggcacuacaagcacaucaccuccaaggagacccuguacugcaucgacggcgcccuccugacgaagagcagcgaguacaaggggcccaucaccgacguguucuacaaggagaacuccuacaccaccacgaucaagcccgugaccuacaagcuggacggcgucgugugcaccgagaucgaccccaagcucgacaacuacuacaagaaggacaacagcuacuucaccgagcagccgaucgaccuggugcccaaccagcccuaccccaacgccuccuucgacaacuucaaguucgucugcgacaacaucaaguucgccgacgaccugaaccagcucacgggguacaagaagccggcgagccgcgagcugaaggugaccuucuuccccgaccugaacggcgacguggucgccaucgacuacaagcacuacacccccuccuucaagaagggcgccaagcuccugcacaagcccaucguguggcacgugaacaacgccaccaacaaggcgacguacaagccgaacaccuggugcauccggugccuguggagcaccaagcccgucgagaccuccaacagcuucgacgugcucaaguccgaggacgcccaggggauggacaaccuggccugcgaggaccugaagcccgugagcgaggaggucguggagaaccccacgauccagaaggacgugcucgagugcaacgucaagaccaccgagguggugggcgacaucauccugaagccggccaacaacucccugaagaucaccgaggaggucgggcacacggaccucauggccgcguacguggacaacagcucccugaccaucaagaagcccaacgagcugagccgcgugcucggccugaagacccuggccacccacgggcucgccgccgucaacuccgugcccugggacacgaucgccaacuacgcgaagccguuccugaacaagguggucagcaccaccaccaacaucgugacgcgcugccugaaccgggugugcaccaacuacaugcccuacuucuucacccuccugcugcagcucugcaccuucacccgcuccacgaacagccggaucaaggccuccaugcccaccaccaucgccaagaacaccgucaagagcgugggcaaguucugccuggaggccagcuucaacuaccugaagucccccaacuucagcaagcucaucaacaucaucaucugguuccugcugcucuccgugugccugggcagccugaucuacuccacggccgcgcucgggguccugaugagcaaccugggcaugccguccuacugcaccggguaccgcgagggcuaccucaacagcaccaacgugaccaucgccacguacugcaccggcuccauccccugcagcgugugccuguccgggcuggacagccucgacaccuaccccucccuggagaccauccagaucacgaucagcuccuucaagugggaccugaccgccuucggccucgucgccgagugguuccuggccuacauccuguucacccgguucuucuacgugcucgggcuggcggccaucaugcagcuguucuucagcuacuucgccgugcacuucaucuccaacagcuggcucauguggcugaucaucaaccugguccagauggcccccaucuccgcgauggugcgcauguacaucuucuucgccagcuucuacuacguguggaagagcuacguccacgugguggacggcugcaacuccagcaccugcaugaugugcuacaagcggaaccgcgccacgcgggucgagugcaccaccaucgugaacgggguccgccgguccuucuacguguacgccaacggcggcaagggguucugcaagcugcacaacuggaacugcgugaacugcgacaccuucugcgccggcagcacguucaucuccgacgaggucgcgcgcgaccucagccugcaguucaagcggccgaucaaccccaccgaccaguccagcuacaucguggacuccgugaccgucaagaacgggagcauccaccuguacuucgacaaggccggccagaagaccuacgagcgccacucccucagccacuucgugaaccuggacaaccugcgggccaacaacacgaaggggucccuccccaucaacgugaucgucuucgacggcaagagcaagugcgaggaguccagcgccaaguccgccagcguguacuacucccagcugaugugccagcccauccugcuccuggaccaggcgcuggugagcgacgucggcgacagcgccgagguggccgugaagauguucgacgccuacgucaacaccuucuccagcaccuucaacgugccgauggagaagcucaagacccugguggccacggcggaggccgagcuggccaagaacgucucccucgacaacgugcugagcaccuucaucuccgccgcgcgccagggguucguggacagcgacgucgagaccaaggacgugguggagugccugaagcucucccaccagagcgacaucgaggucaccggcgacuccugcaacaacuacaugcugacguacaacaagguggagaacaugaccccccgggaccugggggccugcaucgacugcagcgcccgccacaucaacgcccagguggccaagucccacaacaucgcgcucaucuggaacgucaaggacuucaugagccuguccgagcagcugcggaagcagauccgcagcgccgccaagaagaacaaccuccccuucaagcugaccugcgccaccacgcgccagguggugaacgucgugaccaccaagaucgcccugaagggcggguga

SEQ ID NO: 17897 - RNA, 5841 nt, Artificial Sequence
  SARS-CoV-2__MT811755.1__non-structural protein 3 (NSP3) CDS gc
auggcccccaccaaggugaccuucggcgacgacacggucaucgaggugcagggguacaagagcgugaacaucaccuucgagcuggacgagcgcaucgacaagguccucaacgagaagugcuccgccuacaccguggagcugggcaccgaggugaacgaguucgcgugcgucguggccgacgccgugaucaagacgcugcagccggucagcgagcuccugaccccccuggggaucgaccucgacgagugguccauggccaccuacuaccuguucgacgagagcggcgaguucaagcuggccucccacauguacugcagcuucuacccccccgacgaggacgaggaggagggggacugcgaggaggaggaguucgagccguccacccaguacgaguacggcacggaggacgacuaccagggcaagccccucgaguucggggcgaccagcgccgcccugcagcccgaggaggagcaggaggaggacuggcuggacgacgacucccagcagaccgugggccagcaggacgggagcgaggacaaccagaccacgaccauccagaccaucguggagguccagccccagcucgagauggagcugaccccgguggugcagacgaucgaggucaacuccuucagcggcuaccugaagcucaccgacaacguguacaucaagaacgccgacaucguggaggaggcgaagaaggucaagcccaccgugguggucaacgccgccaacguguaccugaagcacgggggcggcguggccggggcccugaacaaggcgaccaacaacgccaugcaggucgaguccgacgacuacaucgccacgaacggcccccucaagguggggggcagcugcguccuguccggccacaaccuggccaagcacugccuccacgugguggggcccaacgucaacaagggcgaggacauccagcugcugaagagcgccuacgagaacuucaaccagcacgaggugcuccuggcgccgcugcucuccgccgggaucuucggcgccgaccccauccacagccugcgggugugcgucgacaccgugcgcaccaacguguaccuggccgucuucgacaagaaccucuacgacaagcugguguccagcuuccuggagaugaagagcgagaagcagguggagcagaagaucgccgagauccccaaggaggaggucaagcccuucaucaccgaguccaagccgagcguggagcagcggaagcaggacgacaagaagaucaaggcgugcguggaggaggucacgaccacccucgaggagaccaaguuccugacggagaaccugcuccuguacaucgacaucaacgggaaccugcaccccgacuccgccacccucgugagcgacaucgacaucaccuuccugaagaaggacgcccccuacaucgugggcgacgucgugcaggagggcgugcugaccgccgucgugauccccacgaagaaggccgggggcaccaccgagaugcucgcgaaggcccugcgcaaggugccgaccgacaacuacaucacgaccuaccccgggcagggccugaacggguacaccgucgaggaggccaagaccgugcucaagaagugcaaguccgccuucuacauccugcccagcaucaucuccaacgagaagcaggagauccugggcaccgugagcuggaaccuccgggagaugcuggcgcacgccgaggagacgcgcaagcugaugcccgucugcguggagaccaaggccaucguguccaccauccagcggaaguacaagggcaucaagauccaggagggggucguggacuacggcgcccgcuucuacuucuacaccagcaagacgaccguggccucccugaucaacacccucaacgaccugaacgagacccuggucacgaugccgcucggguacgugacccacggccugaaccuggaggaggcggcccgguacaugcgcagccucaaggugcccgccaccgucuccgugagcucccccgacgccgugaccgccuacaacggguaccugacgagcuccagcaagacccccgaggagcacuucaucgagaccaucucccuggcgggcagcuacaaggacuggagcuacuccggccagagcacccagcucgggaucgaguuccugaagcggggcgacaaguccgucuacuacacgagcaacccgaccaccuuccaccuggacggggaggugaucaccuucgacaaccucaagacgcugcugucccuccgcgaggugcggaccaucaaggucuucaccaccguggacaacaucaaccugcacacgcagguggucgacaugagcaugaccuacggccagcaguucggccccaccuaccuggacggggccgacgugaccaagaucaagccccacaacucccacgagggcaagacguucuacgugcucccgaacgacgacacccugcgcgucgaggccuucgaguacuaccacaccaccgaccccagcuuccuggggcgguacauguccgcccucaaccacacgaagaaguggaaguacccccaggugaacggccugaccagcaucaagugggccgacaacaacugcuaccuggcgaccgcccuccugacccugcagcagaucgagcucaaguucaaccccccggcccugcaggacgccuacuaccgcgcgcgggccggggaggccgccaacuucugcgcccugauccucgcguacugcaacaagacggugggcgagcugggcgacguccgcgagaccauguccuaccuguuccagcacgccaaccucgacagcugcaagcgggugcugaacgucgugugcaagaccugcgggcagcagcagaccacccugaagggcguggaggccgucauguacauggggacgcucuccuacgagcaguucaagaagggcgugcagauccccugcaccugcgggaagcaggccaccaaguaccuggugcagcaggagagccccuucgucaugauguccgcccccccggcgcaguacgagcugaagcacggcaccuucacgugcgccagcgaguacaccggcaacuaccagugcgggcacuacaagcacaucaccuccaaggagacccucuacugcaucgacggcgcccugcugacgaagagcagcgaguacaaggggcccaucaccgacguguucuacaaggagaacuccuacaccaccacgaucaagcccgugaccuacaagcucgacggcgucgugugcaccgagaucgaccccaagcuggacaacuacuacaagaaggacaacagcuacuucaccgagcagccgaucgaccuggugcccaaccagcccuaccccaacgccuccuucgacaacuucaaguucgucugcgacaacaucaaguucgccgacgaccucaaccagcugacgggguacaagaagccggcgagccgcgagcugaaggugaccuucuuccccgaccucaacggcgacguggucgccaucgacuacaagcacuacacccccuccuucaagaagggcgccaagcugcugcacaagcccaucguguggcacgugaacaacgccaccaacaaggcgacguacaagccgaacaccuggugcauccggugccucuggagcaccaagcccgucgagaccuccaacagcuucgacgugcugaaguccgaggacgcccaggggauggacaaccuggccugcgaggaccucaagcccgugagcgaggaggucguggagaaccccacgauccagaaggacgugcuggagugcaacgucaagaccaccgagguggugggcgacaucauccugaagccggccaacaacucccucaagaucaccgaggaggucgggcacacggaccugauggccgcguacguggacaacagcucccugaccaucaagaagcccaacgagcucagccgcgugcugggccugaagacccucgccacccacgggcuggccgccgucaacuccgugcccugggacacgaucgccaacuacgcgaagccguuccugaacaagguggucagcaccaccaccaacaucgugacgcgcugccucaaccgggugugcaccaacuacaugcccuacuucuucacccugcugcuccagcugugcaccuucacccgcuccacgaacagccggaucaaggccuccaugcccaccaccaucgccaagaacaccgucaagagcgugggcaaguucugccuggaggccagcuucaacuaccucaagucccccaacuucagcaagcugaucaacaucaucaucugguuccugcuccuguccgugugccugggcagccucaucuacuccacggccgcgcuggggguccugaugagcaaccucggcaugccguccuacugcaccggguaccgcgagggcuaccugaacagcaccaacgugaccaucgccacguacugcaccggcuccauccccugcagcgugugccuguccgggcucgacagccuggacaccuaccccucccuggagaccauccagaucacgaucagcuccuucaagugggaccucaccgccuucggccuggucgccgagugguuccuggccuacauccucuucacccgguucuucuacgugcuggggcuggcggccaucaugcagcucuucuucagcuacuucgccgugcacuucaucuccaacagcuggcugauguggcugaucaucaaccugguccagauggcccccaucuccgcgauggugcgcauguacaucuucuucgccagcuucuacuacguguggaagagcuacguccacgugguggacggcugcaacaccuccacgugcaugaugugcuacaagcggaaccgcgccacccgggucgagugcaccaccaucgugaacgggguccgccggagcuucuacguguacgccaacggcggcaagggguucugcaagcuccacaacuggaacugcgugaacugcgacacguucugcgccggcuccaccuucaucagcgacgaggucgcgcgcgaccugucccugcaguucaagcggccgaucaaccccaccgaccagagcuccuacaucguggacagcgugaccgucaagaacggguccauccaccucuacuucgacaaggccggccagaagacguacgagcgccacagccugucccacuucgugaaccuggacaaccuccgggccaacaacaccaaggggagccugcccaucaacgugaucgucuucgacggcaaguccaagugcgaggagagcuccgccaagagcgccuccguguacuacagccagcugaugugccagcccauccuccugcuggaccaggcgcucguguccgacgucggcgacagcgccgagguggccgugaagauguucgacgccuacgucaacaccuucagcuccaccuucaacgugccgauggagaagcugaagacgcugguggccaccgcggaggccgagcucgccaagaacgucagccuggacaacgugcuguccaccuucaucagcgccgcgcgccagggguucguggacuccgacgucgagaccaaggacgugguggagugccucaagcugagccaccaguccgacaucgaggucacgggcgacagcugcaacaacuacaugcugaccuacaacaagguggagaacaugaccccccgggaccucggggccugcaucgacugcuccgcccgccacaucaacgcccagguggccaagagccacaacaucgcgcugaucuggaacgucaaggacuucaugucccugagcgagcagcuccggaagcagauccgcuccgccgccaagaagaacaaccugcccuucaagcugaccugcgccacgacccgccagguggugaacgucgugaccaccaagaucgcccucaagggcggguga

SEQ ID NO: 17898 - RNA, 5841 nt, Artificial Sequence
  SARS-CoV-2__MT806104.1__non-structural protein 3 (NSP3) CDS gc
auggcccccaccaaggugaccuucggcgacgacacggucaucgaggugcagggguacaagagcgugaacaucaccuucgagcuggacgagcgcaucgacaagguccucaacgagaagugcuccgccuacaccguggagcugggcaccgaggugaacgaguucgcgugcgucguggccgacgccgugaucaagacgcugcagccggucagcgagcuccugaccccccuggggaucgaccucgacgagugguccauggccaccuacuaccuguucgacgagagcggcgaguucaagcuggccucccacauguacugcagcuucuacccccccgacgaggacgaggaggagggggacugcgaggaggaggaguucgagccguccacccaguacgaguacggcacggaggacgacuaccagggcaagccccucgaguucggggcgaccagcgccgcccugcagcccgaggaggagcaggaggaggacuggcuggacgacgacucccagcagaccgugggccagcaggacgggagcgaggacaaccagaccacgaccauccagaccaucguggagguccagccccagcucgagauggagcugaccccgguggugcagacgaucgaggucaacuccuucagcggcuaccugaagcucaccgacaacguguacaucaagaacgccgacaucguggaggaggcgaagaaggucaagcccaccgugguggucaacgccgccaacguguaccugaagcacgggggcggcguggccggggcccugaacaaggcgaccaacaacgccaugcaggucgaguccgacgacuacaucgccacgaacggcccccucaagguggggggcagcugcguccuguccggccacaaccuggccaagcacugccuccacgugguggggcccaacgucaacaagggcgaggacauccagcugcugaagagcgccuacgagaacuucaaccagcacgaggugcuccuggcgccgcugcucuccgccgggaucuucggcgccgaccccauccacagccugcgggugugcgucgacaccgugcgcaccaacguguaccuggccgucuucgacaagaaccucuacgacaagcugguguccagcuuccuggagaugaagagcgagaagcagguggagcagaagaucgccgagauccccaaggaggaggucaagcccuucaucaccgaguccaagccgagcguggagcagcggaagcaggacgacaagaagaucaaggcgugcguggaggaggucacgaccacccucgaggagaccaaguuccugacggagaaccugcuccuguacaucgacaucaacgggaaccugcaccccgacuccgccacccucgugagcgacaucgacaucaccuuccugaagaaggacgcccccuacaucgugggcgacgucgugcaggagggcgugcugaccgccgucgugauccccacgaagaaggccgggggcaccaccgagaugcucgcgaaggcccugcgcaaggugccgaccgacaacuacaucacgaccuaccccgggcagggccugaacggguacaccgucgaggaggccaagaccgugcucaagaagugcaaguccgccuucuacauccugcccagcaucaucuccaacgagaagcaggagauccugggcaccgugagcuggaaccuccgggagaugcuggcgcacgccgaggagacgcgcaagcugaugcccgucugcguggagaccaaggccaucguguccaccauccagcggaaguacaagggcaucaagauccaggagggggucguggacuacggcgcccgcuucuacuucuacaccagcaagacgaccguggccucccugaucaacacccucaacgaccugaacgagacccuggucacgaugccgcucggguacgugacccacggccugaaccuggaggaggcggcccgguacaugcgcagccucaaggugcccgccaccgucuccgugagcucccccgacgccgugaccgccuacaacggguaccugacgagcuccagcaagacccccgaggagcacuucaucgagaccaucucccuggcgggcagcuacaaggacuggagcuacuccggccagagcacccagcucgggaucgaguuccugaagcggggcgacaaguccgucuacuacacgagcaacccgaccaccuuccaccuggacggggaggugaucaccuucgacaaccucaagacgcugcugucccuccgcgaggugcggaccaucaaggucuucaccaccguggacaacaucaaccugcacacgcagguggucgacaugagcaugaccuacggccagcaguucggccccaccuaccuggacggggccgacgugaccaagaucaagccccacaacucccacgagggcaagacguucuacgugcucccgaacgacgacacccugcgcgucgaggccuucgaguacuaccacaccaccgaccccagcuuccuggggcgguacauguccgcccucaaccacacgaagaaguggaaguacccccaggugaacggccugaccagcaucaagugggccgacaacaacugcuaccuggcgaccgcccuccugacccugcagcagaucgagcucaaguucaaccccccggcccugcaggacgccuacuaccgcgcgcgggccggggaggccgccaacuucugcgcccugauccucgcguacugcaacaagacggugggcgagcugggcgacguccgcgagaccauguccuaccuguuccagcacgccaaccucgacagcugcaagcgggugcugaacgucgugugcaagaccugcgggcagcagcagaccacccugaagggcguggaggccgucauguacauggggacgcucuccuacgagcaguucaagaagggcgugcagauccccugcaccugcgggaagcaggccaccaaguaccuggugcagcaggagagccccuucgucaugauguccgcccccccggcgcaguacgagcugaagcacggcaccuucacgugcgccagcgaguacaccggcaacuaccagugcgggcacuacaagcacaucaccuccaaggagacccucuacugcaucgacggcgcccugcugacgaagagcagcgaguacaaggggcccaucaccgacguguucuacaaggagaacuccuacaccaccacgaucaagcccgugaccuacaagcucgacggcgucgugugcaccgagaucgaccccaagcuggacaacuacuacaagaaggacaacagcuacuucaccgagcagccgaucgaccuggugcccaaccagcccuaccccaacgccuccuucgacaacuucaaguucgucugcgacaacaucaaguucgccgacgaccucaaccagcugacgggguacaagaagccggcgagccgcgagcugaaggugaccuucuuccccgaccucaacggcgacguggucgccaucgacuacaagcacuacacccccuccuucaagaagggcgccaagcugcugcacaagcccaucguguggcacgugaacaacgccaccaacaaggcgacguacaagccgaacaccuggugcauccggugccucuggagcaccaagcccgucgagaccuccaacagcuucgacgugcugaacuccgaggacgcccaggggauggacaaccuggccugcgaggaccucaagcccgugagcgaggaggucguggagaaccccacgauccagaaggacgugcuggagugcaacgucaagaccaccgagguggugggcgacaucauccugaagccggccaacaacucccucaagaucaccgaggaggucgggcacacggaccugauggccgcguacguggacaacagcucccugaccaucaagaagcccaacgagcucagccgcgugcugggccugaagacccucgccacccacgggcuggccgccgucaacuccgugcccugggacacgaucgccaacuacgcgaagccguuccugaacaagguggucagcaccaccaccaacaucgugacgcgcugccucaaccgggugugcaccaacuacaugcccuacuucuucacccugcugcuccagcugugcaccuucacccgcuccacgaacagccggaucaaggccuccaugcccaccaccaucgccaagaacaccgucaagagcgugggcaaguucugccuggaggccagcuucaacuaccucaagucccccaacuucagcaagcugaucaacaucaucaucugguuccugcuccuguccgugugccugggcagccucaucuacuccacggccgcgcuggggguccugaugagcaaccucggcaugccguccuacugcaccggguaccgcgagggcuaccugaacagcaccaacgugaccaucgccacguacugcaccggcuccauccccugcagcgugugccuguccgggcucgacagccuggacaccuaccccucccuggagaccauccagaucacgaucagcuccuucaagugggaccucaccgccuucggccuggucgccgagugguuccuggccuacauccucuucacccgguucuucuacgugcuggggcuggcggccaucaugcagcucuucuucagcuacuucgccgugcacuucaucuccaacagcuggcugauguggcugaucaucaaccugguccagauggcccccaucuccgcgauggugcgcauguacaucuucuucgccagcuucuacuacguguggaagagcuacguccacgugguggacggcugcaacuccagcaccugcaugaugugcuacaagcggaaccgcgccacgcgggucgagugcaccaccaucgugaacgggguccgccgguccuucuacguguacgccaacggcggcaagggguucugcaagcuccacaacuggaacugcgugaacugcgacaccuucugcgccggcagcacguucaucuccgacgaggucgcgcgcgaccugagccugcaguucaagcggccgaucaaccccaccgaccaguccagcuacaucguggacuccgugaccgucaagaacgggagcauccaccucuacuucgacaaggccggccagaagaccuacgagcgccacucccugagccacuucgugaaccuggacaaccuccgggccaacaacacgaaggggucccugcccaucaacgugaucgucuucgacggcaagagcaagugcgaggaguccagcgccaaguccgccagcguguacuacucccagcugaugugccagcccauccuccugcuggaccaggcgcucgugagcgacgucggcgacagcgccgagguggccgugaagauguucgacgccuacgucaacaccuucuccagcaccuucaacgugccgauggagaagcugaagacccugguggccacggcggaggccgagcucgccaagaacgucucccuggacaacgugcugagcaccuucaucuccgccgcgcgccagggguucguggacagcgacgucgagaccaaggacgugguggagugccucaagcugucccaccagagcgacaucgaggucaccggcgacuccugcaacaacuacaugcugacguacaacaagguggagaacaugaccccccgggaccucggggccugcaucgacugcagcgcccgccacaucaacgcccagguggccaagucccacaacaucgcgcugaucuggaacgucaaggacuucaugagccuguccgagcagcuccggaagcagauccgcagcgccgccaagaagaacaaccugcccuucaagcugaccugcgccaccacgcgccagguggugaacgucgugaccaccaagaucgcccucaagggcggguga

SEQ ID NO: 17899 - RNA, 5841 nt, Artificial Sequence
  SARS-CoV-2__MT806765.1__non-structural protein 3 (NSP3) CDS gc
auggcccccaccaaggugaccuucggcgacgacacggucaucgaggugcagggguacaagagcgugaacaucaccuucgagcuggacgagcgcaucgacaagguccucaacgagaagugcuccgccuacaccguggagcugggcaccgaggugaacgaguucgcgugcgucguggccgacgccgugaucaagacgcugcagccggucagcgagcuccugaccccccuggggaucgaccucgacgagugguccauggccaccuacuaccuguucgacgagagcggcgaguucaagcuggccucccacauguacugcagcuucuacccccccgacgaggacgaggaggagggggacugcgaggaggaggaguucgagccguccacccaguacgaguacggcacggaggacgacuaccagggcaagccccucgaguucggggcgaccagcgccgcccugcagcccgaggaggagcaggaggaggacuggcuggacgacgacucccagcagaccgugggccagcaggacgggagcgaggacaaccagaccacgaccauccagaccaucguggagguccagccccagcucgagauggagcugaccccgguggugcagacgaucgaggucaacuccuucagcggcuaccugaagcucaccgacaacguguacaucaagaacgccgacaucguggaggaggcgaagaaggucaagcccaccgugguggucaacgccgccaacguguaccugaagcacgggggcggcguggccggggcccugaacaaggcgaccaacaacgccaugcaggucgaguccgacgacuacaucgccacgaacggcccccucaagguggggggcagcugcguccuguccggccacaaccuggccaagcacugccuccacgugguggggcccaacgucaacaagggcgaggacauccagcugcugaagagcgccuacgagaacuucaaccagcacgaggugcuccuggcgccgcugcucuccgccgggaucuucggcgccgaccccauccacagccugcgggugugcgucgacaccgugcgcaccaacguguaccuggccgucuucgacaagaaccucuacgacaagcugguguccagcuuccuggagaugaagagcgagaagcagguggagcagaagaucgccgagauccccaaggaggaggucaagcccuucaucaccgaguccaagccgagcguggagcagcggaagcaggacgacaagaagaucaaggcgugcguggaggaggucacgaccacccucgaggagaccaaguuccugacggagaaccugcuccuguacaucgacaucaacgggaaccugcaccccgacuccgccacccucgugagcgacaucgacaucaccuuccugaagaaggacgcccccuacaucgugggcgacgucgugcaggagggcgugcugaccgccgucgugauccccacgaagaaggccgggggcaccaccgagaugcucgcgaaggcccugcgcaaggugccgaccgacaacuacaucacgaccuaccccgggcagggccugaacggguacaccgucgaggaggccaagaccgugcucaagaagugcaaguccgccuucuacauccugcccagcaucaucuccaacgagaagcaggagauccugggcaccgugagcuggaaccuccgggagaugcuggcgcacgccgaggagacgcgcaagcugaugcccgucugcguggagaccaaggccaucguguccaccauccagcggaaguacaagggcaucaagauccaggagggggucguggacuacggcgcccgcuucuacuucuacaccagcaagacgaccguggccucccugaucaacacccucaacgaccugaacgagacccuggucacgaugccgcucggguacgugacccacggccugaaccuggaggaggcggcccgguacaugcgcagccucaaggugcccgccaccgucuccgugagcucccccgacgccgugaccgccuacaacggguaccugacgagcuccagcaagacccccgaggagcacuucaucgagaccaucucccuggcgggcagcuacaaggacuggagcuacuccggccagagcacccagcucgggaucgaguuccugaagcggggcgacaaguccgucuacuacacgagcaacccgaccaccuuccaccuggacggggaggugaucaccuucgacaaccucaagacgcugcugucccuccgcgaggugcggaccaucaaggucuucaccaccguggacaacaucaaccugcacacgcagguggucgacaugagcaugaccuacggccagcaguucggccccaccuaccuggacggggccgacgugaccaagaucaagccccacaacucccacgagggcaagacguucuacgugcucccgaacgacgacacccugcgcgucgaggccuucgaguacuaccacaccaccgaccccagcuuccuggggcgguacauguccgcccucaaccacacgaagaaguggaaguacccccaggugaacggccugaccagcaucaagugggccgacaacaacugcuaccuggcgaccgcccuccugacccugcagcagaucgagcucaaguucaaccccccggcccugcaggacgccuacuaccgcgcgcgggccggggaggccgccaacuucugcgcccugauccucgcguacugcaacaagacggugggcgagcugggcgacguccgcgagaccauguccuaccuguuccagcacgccaaccucgacagcugcaagcgggugcugaacgucgugugcaagaccugcgggcagcagcagaccacccugaagggcguggaggccgucauguacauggggacgcucuccuacgagcaguucaagaagggcgugcagauccccugcaccugcgggaagcaggccaccaaguaccuggugcagcaggagagccccuucgucaugauguccgcccccccggcgcaguacgagcugaagcacggcaccuucacgugcgccagcgaguacaccggcaacuaccagugcgggcacuacaagcacaucaccuccaaggagacccucuacugcaucgacggcgcccugcugacgaagagcagcgaguacaaggggcccaucaccgacguguucuacaaggagaacuccuacaccaccacgaucaagcccgugaccuacaagcucgacggcgucgugugcaccgagaucgaccccaagcuggacaacuacuacaagaaggacaacagcuacuucaccgagcagccgaucgaccuggugcccaaccagcccuaccccaacgccuccuucgacaacuucaaguucgucugcgacaacaucaaguucgccgacgaccucaaccagcugacgggguacaagaagccggcgagccgcgagcugaaggugaccuucuuccccgaccucaacggcgacguggucgccaucgacuacaagcacuacacccccuccuucaagaagggcgccaagcugcugcacaagcccaucguguggcacgugaacaacgccaccaacaaggcgacguacaagccgaacaccuggugcauccggugccucuggagcaccaagcccgucgagaccuccaacagccuggacgugcugaaguccgaggacgcccaggggauggacaaccucgccugcgaggaccugaagcccgugagcgaggaggucguggagaaccccacgauccagaaggacgugcuggagugcaacgucaagaccaccgagguggugggcgacaucauccucaagccggccaacaacucccugaagaucaccgaggaggucgggcacacggaccugauggccgcguacguggacaacagcucccucaccaucaagaagcccaacgagcugagccgcgugcugggccucaagacccuggccacccacgggcuggccgccgucaacuccgugcccugggacacgaucgccaacuacgcgaagccguuccucaacaagguggucagcaccaccaccaacaucgugacgcgcugccugaaccgggugugcaccaacuacaugcccuacuucuucacccugcuccugcagcugugcaccuucacccgcuccacgaacagccggaucaaggccuccaugcccaccaccaucgccaagaacaccgucaagagcgugggcaaguucugccucgaggccagcuucaacuaccugaagucccccaacuucagcaagcugaucaacaucaucaucugguuccuccugcuguccgugugccucggcagccugaucuacuccacggccgcgcuggggguccucaugagcaaccugggcaugccguccuacugcaccggguaccgcgagggcuaccugaacagcaccaacgugaccaucgccacguacugcaccggcuccauccccugcagcgugugccucuccgggcuggacagccuggacaccuaccccucccucgagaccauccagaucacgaucagcuccuucaagugggaccugaccgccuucggccuggucgccgagugguuccucgccuacauccuguucacccgguucuucuacgugcuggggcucgcggccaucaugcagcuguucuucagcuacuucgccgugcacuucaucuccaacagcuggcugauguggcugaucaucaaccucguccagauggcccccaucuccgcgauggugcgcauguacaucuucuucgccagcuucuacuacguguggaagagcuacguccacgugguggacggcugcaacuccagcaccugcaugaugugcuacaagcggaaccgcgccacgcgggucgagugcaccaccaucgugaacgggguccgccgguccuucuacguguacgccaacggcggcaagggguucugcaagcugcacaacuggaacugcgugaacugcgacaccuucugcgccggcagcacguucaucuccgacgaggucgcgcgcgaccugagccuccaguucaagcggccgaucaaccccaccgaccaguccagcuacaucguggacuccgugaccgucaagaacgggagcauccaccuguacuucgacaaggccggccagaagaccuacgagcgccacucccugagccacuucgugaaccucgacaaccugcgggccaacaacacgaaggggucccugcccaucaacgugaucgucuucgacggcaagagcaagugcgaggaguccagcgccaaguccgccagcguguacuacucccagcucaugugccagcccauccugcugcucgaccaggcgcuggugagcgacgucggcgacagcgccgagguggccgugaagauguucgacgccuacgucaacaccuucuccagcaccuucaacgugccgauggagaagcugaagacccucguggccacggcggaggccgagcuggccaagaacgucucccuggacaacgugcucagcaccuucaucuccgccgcgcgccagggguucguggacagcgacgucgagaccaaggacgugguggagugccugaagcugucccaccagagcgacaucgaggucaccggcgacuccugcaacaacuacaugcucacguacaacaagguggagaacaugaccccccgggaccugggggccugcaucgacugcagcgcccgccacaucaacgcccagguggccaagucccacaacaucgcgcugaucuggaacgucaaggacuucaugagccucuccgagcagcugcggaagcagauccgcagcgccgccaagaagaacaaccugcccuucaagcucaccugcgccaccacgcgccagguggugaacgucgugaccaccaagaucgcccugaagggcggguga

SEQ ID NO: 17900 - RNA, 5841 nt, Artificial Sequence
  SARS-CoV-2__MT806772.1__non-structural protein 3 (NSP3) CDS gc
auggcccccaccaaggugaccuucggcgacgacacggucaucgaggugcagggguacaagagcgugaacaucaccuucgagcuggacgagcgcaucgacaagguccucaacgagaagugcuccgccuacaccguggagcugggcaccgaggugaacgaguucgcgugcgucguggccgacgccgugaucaagacgcugcagccggucagcgagcuccugaccccccuggggaucgaccucgacgagugguccauggccaccuacuaccuguucgacgagagcggcgaguucaagcuggccucccacauguacugcagcuucuacccccccgacgaggacgaggaggagggggacugcgaggaggaggaguucgagccguccacccaguacgaguacggcacggaggacgacuaccagggcaagccccucgaguucggggcgaccagcgccgcccugcagcccgaggaggagcaggaggaggacuggcuggacgacgacucccagcagaccgugggccagcaggacgggagcgaggacaaccagaccacgaccauccagaccaucguggagguccagccccagcucgagauggagcugaccccgguggugcagacgaucgaggucaacuccuucagcggcuaccugaagcucaccgacaacguguacaucaagaacgccgacaucguggaggaggcgaagaaggucaagcccaccgugguggucaacgccgccaacguguaccugaagcacgggggcggcguggccggggcccugaacaaggcgaccaacaacgccaugcaggucgaguccgacgacuacaucgccacgaacggcccccucaagguggggggcagcugcguccuguccggccacaaccuggccaagcacugccuccacgugguggggcccaacgucaacaagggcgaggacauccagcugcugaagagcgccuacgagaacuucaaccagcacgaggugcuccuggcgccgcugcucuccgccgggaucuucggcgccgaccccauccacagccugcgggugugcgucgacaccgugcgcaccaacguguaccuggccgucuucgacaagaaccucuacgacaagcugguguccagcuuccuggagaugaagagcgagaagcagguggagcagaagaucgccgagauccccaaggaggaggucaagcccuucaucaccgaguccaagccgagcguggagcagcggaagcaggacgacaagaagaucaaggcgugcguggaggaggucacgaccacccucgaggagaccaaguuccugacggagaaccugcuccuguacaucgacaucaacgggaaccugcaccccgacuccgccacccucgugagcgacaucgacaucaccuuccugaagaaggacgcccccuacaucgugggcgacgucgugcaggagggcgugcugaccgccgucgugauccccacgaagaaggccgggggcaccaccgagaugcucgcgaaggcccugcgcaaggugccgaccgacaacuacaucacgaccuaccccgggcagggccugaacggguacaccgucgaggaggccaagaccgugcucaagaagugcaaguccgccuucuacauccugcccagcaucaucuccaacgagaagcaggagauccugggcaccgugagcuggaaccuccgggagaugcuggcgcacgccgaggagacgcgcaagcugaugcccgucugcguggagaccaaggccaucguguccaccauccagcggaaguacaagggcaucaagauccaggagggggucguggacuacggcgcccgcuucuacuucuacaccagcaagacgaccguggccucccugaucaacacccucaacgaccugaacgagacccuggucacgaugccgcucggguacgugacccacggccugaaccuggaggaggcggcccgguacaugcgcagccucaaggugcccgccaccgucuccgugagcucccccgacgccgugaccgccuacaacggguaccugacgagcuccagcaagacccccgaggagcacuucaucgagaccaucucccuggcgggcagcuacaaggacuggagcuacuccggccagagcacccagcucgggaucgaguuccugaagcggggcgacaaguccgucuacuacacgagcaacccgaccaccuuccaccuggacggggaggugaucaccuucgacaaccucaagacgcugcugucccuccgcgaggugcggaccaucaaggucuucaccaccguggacaacaucaaccugcacacgcagguggucgacaugagcaugaccuacggccagcaguucggccccaccuaccuggacggggccgacgugaccaagaucaagccccacaacucccacgagggcaagacguucuacgugcucccgaacgacgacacccugcgcgucgaggccuucgaguacuaccacaccaccgaccccagcuuccuggggcgguacauguccgcccucaaccacacgaagaaguggaaguacccccaggugaacggccugaccagcaucaagugggccgacaacaacugcuaccuggcgaccgcccuccugacccugcagcagaucgagcucaaguucaaccccccggcccugcaggacgccuacuaccgcgcgcgggccggggaggccgccaacuucugcgcccugauccucgcguacugcaacaagacggugggcgagcugggcgacguccgcgagaccauguccuaccuguuccagcacgccaaccucgacagcugcaagcgggugcugaacgucgugugcaagaccugcgggcagcagcagaccacccugaagggcguggaggccgucauguacauggggacgcucuccuacgagcaguucaagaagggcgugcagauccccugcaccugcgggaagcaggccaccaaguaccuggugcagcaggagagccccuucgucaugauguccgcccccccggcgcaguacgagcugaagcacggcaccuucacgugcgccagcgaguacaccggcaacuaccagugcgggcacuacaagcacaucaccuccaaggagacccucuacugcaucgacggcgcccugcugacgaagagcagcgaguacaaggggcccaucaccgacguguucuacaaggagaacuccuacaccaccacgaucaagcccgugaccuacaagcucgacggcgucgugugcaccgagaucgaccccaagcuggacaacuacuacaagaaggacaacagcuacuucaccgagcagccgaucgaccuggugcccaaccagcccuaccccaacgccuccuucgacaacuucaaguucgucugcgacaacaucaaguucgccgacgaccucaaccagcugacgggguacaagaagccggcgagccgcgagcugaaggugaccuucuuccccgaccucaacggcgacguggucgccaucgacuacaagcacuacacccccuccuucaagaagggcgccaagcugcugcacaagcccaucguguggcacgugaacaacgccaccaacaaggcgacguacaagccgaacaccuggugcauccggugccucuggagcaccaagcccgucgagaccuccaacagcuucgacgugcugaaguccgaggacgcccaggggauggacaaccuggccugcgaggaccucaagcccgugagcgaggaggucguggagaaccccacgauccagaaggacgugcuggagugcaacgucaagaccaccgagguggugggcgacaucauccugaagccggccaacaacucccucaagaucaccgaggaggucgggcacacggaccugauggccgcguacguggacaacagcucccugaccaucaagaagcccaacgagcucagccgcgugcugggccugaagauccucgccacccacgggcuggccgccgucaacuccgugcccugggacaccaucgccaacuacgcgaagccguuccugaacaagguggucagcacgaccaccaacaucgugacccgcugccucaaccgggugugcacgaacuacaugcccuacuucuucacccugcugcuccagcugugcaccuucacccgcuccaccaacagccggaucaaggccuccaugcccacgaccaucgccaagaacaccgucaagagcgugggcaaguucugccuggaggccagcuucaacuaccucaagucccccaacuucagcaagcugaucaacaucaucaucugguuccugcuccuguccgugugccugggcagccucaucuacuccaccgccgcgcuggggguccugaugagcaaccucggcaugccguccuacugcacgggguaccgcgagggcuaccugaacagcaccaacgugaccaucgccaccuacugcacgggcuccauccccugcagcgugugccuguccgggcucgacagccuggacaccuaccccucccuggagaccauccagaucaccaucagcuccuucaagugggaccucacggccuucggccuggucgccgagugguuccuggccuacauccucuucacccgguucuucuacgugcuggggcuggcggccaucaugcagcucuucuucagcuacuucgccgugcacuucaucuccaacagcuggcugauguggcugaucaucaaccugguccagauggcccccaucuccgcgauggugcgcauguacaucuucuucgccagcuucuacuacguguggaagagcuacguccacgugguggacggcugcaacuccagcaccugcaugaugugcuacaagcggaaccgcgccacccgggucgagugcacgaccaucgugaacgggguccgccgguccuucuacguguacgccaacggcggcaagggguucugcaagcuccacaacuggaacugcgugaacugcgacaccuucugcgccggcagcaccuucaucuccgacgaggucgcgcgcgaccugagccugcaguucaagcggccgaucaaccccacggaccaguccagcuacaucguggacuccgugaccgucaagaacgggagcauccaccucuacuucgacaaggccggccagaagaccuacgagcgccacucccugagccacuucgugaaccuggacaaccuccgggccaacaacaccaaggggucccugcccaucaacgugaucgucuucgacggcaagagcaagugcgaggaguccagcgccaaguccgccagcguguacuacucccagcugaugugccagcccauccuccugcuggaccaggcgcucgugagcgacgucggcgacagcgccgagguggccgugaagauguucgacgccuacgucaacacguucuccagcaccuucaacgugccgauggagaagcugaagacccugguggccaccgcggaggccgagcucgccaagaacgucucccuggacaacgugcugagcacguucaucuccgccgcgcgccagggguucguggacagcgacgucgagaccaaggacgugguggagugccucaagcugucccaccagagcgacaucgaggucaccggcgacuccugcaacaacuacaugcugaccuacaacaagguggagaacaugacgccccgggaccucggggccugcaucgacugcagcgcccgccacaucaacgcccagguggccaagucccacaacaucgcgcugaucuggaacgucaaggacuucaugagccuguccgagcagcuccggaagcagauccgcagcgccgccaagaagaacaaccugcccuucaagcugaccugcgccaccacccgccagguggugaacgucgugacgaccaagaucgcccucaagggcggguga

SEQ ID NO: 17901 - RNA, 5841 nt, Artificial Sequence
  SARS-CoV-2__MT806773.1__non-structural protein 3 (NSP3) CDS gc
auggcccccaccaaggugaccuucggcgacgacacggucaucgaggugcagggguacaagagcgugaacaucaccuucgagcuggacgagcgcaucgacaagguccucaacgagaagugcuccgccuacaccguggagcugggcaccgaggugaacgaguucgcgugcgucguggccgacgccgugaucaagacgcugcagccggucagcgagcuccugaccccccuggggaucgaccucgacgagugguccauggccaccuacuaccuguucgacgagagcggcgaguucaagcuggccucccacauguacugcagcuucuacccccccgacgaggacgaggaggagggggacugcgaggaggaggaguucgagccguccacccaguacgaguacggcacggaggacgacuaccagggcaagccccucgaguucggggcgaccagcgccgcccugcagcccgaggaggagcaggaggaggacuggcuggacgacgacucccagcagaccgugggccagcaggacgggagcgaggacaaccagaccacgaccauccagaccaucguggagguccagccccagcucgagauggagcugaccccgguggugcagacgaucgaggucaacuccuucagcggcuaccugaagcucaccgacaacguguacaucaagaacgccgacaucguggaggaggcgaagaaggucaagcccaccgugguggucaacgccgccaacguguaccugaagcacgggggcggcguggccggggcccugaacaaggcgaccaacaacgccaugcaggucgaguccgacgacuacaucgccacgaacggcccccucaagguggggggcagcugcguccuguccggccacaaccuggccaagcacugccuccacgugguggggcccaacgucaacaagggcgaggacauccagcugcugaagagcgccuacgagaacuucaaccagcacgaggugcuccuggcgccgcugcucuccgccgggaucuucggcgccgaccccauccacagccugcgggugugcgucgacaccgugcgcaccaacguguaccuggccgucuucgacaagaaccucuacgacaagcugguguccagcuuccuggagaugaagagcgagaagcagguggagcagaagaucgccgagauccccaaggaggaggucaagcccuucaucaccgaguccaagccgagcguggagcagcggaagcaggacgacaagaagaucaaggcgugcguggaggaggucacgaccacccucgaggagaccaaguuccugacggagaaccugcuccuguacaucgacaucaacgggaaccugcaccccgacuccgccacccucgugagcgacaucgacaucaccuuccugaagaaggacgcccccuacaucgugggcgacgucgugcaggagggcgugcugaccgccgucgugauccccacgaagaaggccgggggcaccaccgagaugcucgcgaaggcccugcgcaaggugccgaccgacaacuacaucacgaccuaccccgggcagggccugaacggguacaccgucgaggaggccaagaccgugcucaagaagugcaaguccgccuucuacauccugcccagcaucaucuccaacgagaagcaggagauccugggcaccgugagcuggaaccuccgggagaugcuggcgcacgccgaggagacgcgcaagcugaugcccgucugcguggagaccaaggccaucguguccaccauccagcggaaguacaagggcaucaagauccaggagggggucguggacuacggcgcccgcuucuacuucuacaccagcaagacgaccguggccucccugaucaacacccucaacgaccugaacgagacccuggucacgaugccgcucggguacgugacccacggccugaaccuggaggaggcggcccgguacaugcgcagccucaaggugcccgccaccgucuccgugagcucccccgacgccgugaccgccuacaacggguaccugacgagcuccagcaagacccccgaggagcacuucaucgagaccaucucccuggcgggcagcuacaaggacuggagcuacuccggccagagcacccagcucgggaucgaguuccugaagcggggcgacaaguccgucuacuacacgagcaacccgaccaccuuccaccuggacggggaggugaucaccuucgacaaccucaagacgcugcugucccuccgcgaggugcggaccaucaaggucuucaccaccguggacaacaucaaccugcacacgcagguggucgacaugagcaugaccuacggccagcaguucggccccaccuaccuggacggggccgacgugaccaagaucaagccccacaacucccacgagggcaagacguucuacgugcucccgaacgacgacacccugcgcgucgaggccuucgaguacuaccacaccaccgaccccagcuuccuggggcgguacauguccgcccucaaccacacgaagaaguggaaguacccccaggugaacggccugaccagcaucaagugggccgacaacaacugcuaccuggcgaccgcccuccugacccugcagcagaucgagcucaaguucaaccccccggcccugcaggacgccuacuaccgcgcgcgggccggggaggccgccaacuucugcgcccugauccucgcguacugcaacaagacggugggcgagcugggcgacguccgcgagaccauguccuaccuguuccagcacgccaaccucgacagcugcaagcgggugcugaacgucgugugcaagaccugcgggcagcagcagaccacccugaagggcguggaggccgucauguacauggggacgcucuccuacgagcaguucaagaagggcgugcagauccccugcaccugcgggaagcaggccaccaaguaccuggugcagcaggagagccccuucgucaugauguccgcccccccggcgcaguacgagcugaagcacggcaccuucacgugcgccagcgaguacaccggcaacuaccagugcgggcacuacaagcacaucaccuccaaggagacccucuacugcaucgacggcgcccugcugacgaagagcagcgaguacaaggggcccaucaccgacguguucuacaaggagaacuccuacaccaccacgaucaagcccgugaccuacaagcucgacggcgucgugugcaccgagaucgaccccaagcuggacaacuacuacaagaaggacaacagcuacuucaccgagcagccgaucgaccuggugcccaaccagcccuaccccaacgccuccuucgacaacuucaaguucgucugcgacaacaucaaguucgccgacgaccucaaccagcugacgggguacaagaagccggcgagccgcgagcugaaggugaccuucuuccccgaccucaacggcgacguggucgccaucgacuacaagcacuacacccccuccuucaagaagggcgccaagcugcugcacaagcccaucguguggcacgugaacaacgccaccaacaaggcgacguacaagccgaacaccuggugcauccggugccucuggagcaucaagcccgucgagaccuccaacagcuucgacgugcugaaguccgaggacgcccaggggauggacaaccuggccugcgaggaccucaagcccgugagcgaggaggucguggagaaccccaccauccagaaggacgugcuggagugcaacgucaagacgaccgagguggugggcgacaucauccugaagccggccaacaacucccucaagaucaccgaggaggucgggcacaccgaccugauggccgcguacguggacaacagcucccugacgaucaagaagcccaacgagcucagccgcgugcugggccugaagacccucgccacccacgggcuggccgccgucaacuccgugcccugggacaccaucgccaacuacgcgaagccguuccugaacaagguggucagcacgaccaccaacaucgugacccgcugccucaaccgggugugcacgaacuacaugcccuacuucuucacccugcugcuccagcugugcaccuucacccgcuccaccaacagccggaucaaggccuccaugcccacgaccaucgccaagaacaccgucaagagcgugggcaaguucugccuggaggccagcuucaacuaccucaagucccccaacuucagcaagcugaucaacaucaucaucugguuccugcuccuguccgugugccugggcagccucaucuacuccaccgccgcgcuggggguccugaugagcaaccucggcaugccguccuacugcacgggguaccgcgagggcuaccugaacagcaccaacgugaccaucgccaccuacugcacgggcuccauccccugcagcgugugccuguccgggcucgacagccuggacaccuaccccucccuggagaccauccagaucaccaucagcuccuucaagugggaccucacggccuucggccuggucgccgagugguuccuggccuacauccucuucacccgguucuucuacgugcuggggcuggcggccaucaugcagcucuucuucagcuacuucgccgugcacuucaucuccaacagcuggcugauguggcugaucaucaaccugguccagauggcccccaucuccgcgauggugcgcauguacaucuucuucgccagcuucuacuacguguggaagagcuacguccacgugguggacggcugcaacuccagcaccugcaugaugugcuacaagcggaaccgcgccacccgggucgagugcacgaccaucgugaacgggguccgccgguccuucuacguguacgccaacggcggcaagggguucugcaagcuccacaacuggaacugcgugaacugcgacaccuucugcgccggcagcaccuucaucuccgacgaggucgcgcgcgaccugagccugcaguucaagcggccgaucaaccccacggaccaguccagcuacaucguggacuccgugaccgucaagaacgggagcauccaccucuacuucgacaaggccggccagaagaccuacgagcgccacucccugagccacuucgugaaccuggacaaccuccgggccaacaacaccaaggggucccugcccaucaacgugaucgucuucgacggcaagagcaagugcgaggaguccagcgccaaguccgccagcguguacuacucccagcugaugugccagcccauccuccugcuggaccaggcgcucgugagcgacgucggcgacagcgccgagguggccgugaagauguucgacgccuacgucaacacguucuccagcaccuucaacgugccgauggagaagcugaagacccugguggccaccgcggaggccgagcucgccaagaacgucucccuggacaacgugcugagcacguucaucuccgccgcgcgccagggguucguggacagcgacgucgagaccaaggacgugguggagugccucaagcugucccaccagagcgacaucgaggucaccggcgacuccugcaacaacuacaugcugaccuacaacaagguggagaacaugacgccccgggaccucggggccugcaucgacugcagcgcccgccacaucaacgcccagguggccaagucccacaacaucgcgcugaucuggaacgucaaggacuucaugagccuguccgagcagcuccggaagcagauccgcagcgccgccaagaagaacaaccugcccuucaagcugaccugcgccaccacccgccagguggugaacgucgugacgaccaagaucgcccucaagggcggguga

SEQ ID NO: 17902 - RNA, 5841 nt, Artificial Sequence
  SARS-CoV-2__MT806774.1__non-structural protein 3 (NSP3) CDS gc
auggcccccaccaaggugaccuucggcgacgacacggucaucgaggugcagggguacaagagcgugaacaucaccuucgagcuggacgagcgcaucgacaagguccucaacgagaagugcuccgccuacaccguggagcugggcaccgaggugaacgaguucgcgugcgucguggccgacgccgugaucaagacgcugcagccggucagcgagcuccugaccccccuggggaucgaccucgacgagugguccauggccaccuacuaccuguucgacgagagcggcgaguucaagcuggccucccacauguacugcagcuucuacccccccgacgaggacgaggaggagggggacugcgaggaggaggaguucgagccguccacccaguacgaguacggcacggaggacgacuaccagggcaagccccucgaguucggggcgaccagcgccgcccugcagcccgaggaggagcaggaggaggacuggcuggacgacgacucccagcagaccgugggccagcaggacgggagcgaggacaaccagaccacgaccauccagaccaucguggagguccagccccagcucgagauggagcugaccccgguggugcagacgaucgaggucaacuccuucagcggcuaccugaagcucaccgacaacguguacaucaagaacgccgacaucguggaggaggcgaagaaggucaagcccaccgugguggucaacgccgccaacguguaccugaagcacgggggcggcguggccggggcccugaacaaggcgaccaacaacgccaugcaggucgaguccgacgacuacaucgccacgaacggcccccucaagguggggggcagcugcguccuguccggccacaaccuggccaagcacugcuuccacgugguggggcccaacgucaacaagggcgaggacauccagcuccugaagagcgccuacgagaacuucaaccagcacgaggugcugcucgcgccgcugcuguccgccgggaucuucggcgccgaccccauccacagccuccgggugugcgucgacaccgugcgcaccaacguguaccuggccgucuucgacaagaaccuguacgacaagcucguguccagcuuccuggagaugaagagcgagaagcagguggagcagaagaucgccgagauccccaaggaggaggucaagcccuucaucaccgaguccaagccgagcguggagcagcggaagcaggacgacaagaagaucaaggcgugcguggaggaggucacgaccacccuggaggagaccaaguuccucacggagaaccugcugcucuacaucgacaucaacgggaaccugcaccccgacuccgccacccuggugagcgacaucgacaucaccuuccucaagaaggacgcccccuacaucgugggcgacgucgugcaggagggcgugcugaccgccgucgugauccccacgaagaaggccgggggcaccaccgagaugcuggcgaaggcccuccgcaaggugccgaccgacaacuacaucacgaccuaccccgggcagggccugaacggguacaccgucgaggaggccaagaccgugcugaagaagugcaaguccgccuucuacauccuccccagcaucaucuccaacgagaagcaggagauccugggcaccgugagcuggaaccugcgggagaugcucgcgcacgccgaggagacgcgcaagcugaugcccgucugcguggagaccaaggccaucguguccaccauccagcggaaguacaagggcaucaagauccaggagggggucguggacuacggcgcccgcuucuacuucuacaccagcaagacgaccguggccucccugaucaacacccugaacgaccucaacgagacccuggucacgaugccgcugggguacgugacccacggccucaaccuggaggaggcggcccgguacaugcgcagccugaaggugcccgccaccgucuccgugagcucccccgacgccgugaccgccuacaacggguaccucacgagcuccagcaagacccccgaggagcacuucaucgagaccaucucccuggcgggcagcuacaaggacuggagcuacuccggccagagcacccagcuggggaucgaguuccucaagcggggcgacaaguccgucuacuacacgagcaacccgaccaccuuccaccuggacggggaggugaucaccuucgacaaccugaagacgcuccugucccugcgcgaggugcggaccaucaaggucuucaccaccguggacaacaucaaccuccacacgcagguggucgacaugagcaugaccuacggccagcaguucggccccaccuaccuggacggggccgacgugaccaagaucaagccccacaacucccacgagggcaagacguucuacgugcugccgaacgacgacacccuccgcgucgaggccuucgaguacuaccacaccaccgaccccagcuuccuggggcgguacauguccgcccugaaccacacgaagaaguggaaguacccccaggugaacggccucaccagcaucaagugggccgacaacaacugcuaccuggcgaccgcccugcucacccugcagcagaucgagcugaaguucaaccccccggcccuccaggacgccuacuaccgcgcgcgggccggggaggccgccaacuucugcgcccugauccuggcguacugcaacaagacggugggcgagcucggcgacguccgcgagaccauguccuaccuguuccagcacgccaaccuggacagcugcaagcgggugcucaacgucgugugcaagaccugcgggcagcagcagaccacccugaagggcguggaggccgucauguacauggggacgcuguccuacgagcaguucaagaagggcgugcagauccccugcaccugcgggaagcaggccaccaaguaccucgugcagcaggagagccccuucgucaugauguccgcccccccggcgcaguacgagcugaagcacggcaccuucacgugcgccagcgaguacaccggcaacuaccagugcgggcacuacaagcacaucaccuccaaggagacccuguacugcaucgacggcgcccuccugacgaagagcagcgaguacaaggggcccaucaccgacguguucuacaaggagaacuccuacaccaccacgaucaagcccgugaccuacaagcuggacggcgucgugugcaccgagaucgaccccaagcucgacaacuacuacaagaaggacaacagcuacuucaccgagcagccgaucgaccuggugcccaaccagcccuaccccaacgccuccuucgacaacuucaaguucgucugcgacaacaucaaguucgccgacgaccugaaccagcucacgggguacaagaagccggcgagccgcgagcugaaggugaccuucuuccccgaccugaacggcgacguggucgccaucgacuacaagcacuacacccccuccuucaagaagggcgccaagcuccugcacaagcccaucguguggcacgugaacaacgccaccaacaaggcgacguacaagccgaacaccuggugcauccggugccuguggagcaccaagcccgucgagaccuccaacagcuucgacgugcucaaguccgaggacgcccaggggauggacaaccuggccugcgaggaccugaagcccgugagcgaggaggucguggagaaccccacgauccagaaggacgugcucgagugcaacgucaagaccaccgagguggugggcgacaucauccugaagccggccaacaacucccugaagaucaccgaggaggucgggcacacggaccucauggccgcguacguggacaacagcucccugaccaucaagaagcccaacgagcugagccgcgugcucggccugaagacccuggccacccacgggcucgccgccgucaacuccgugcccugggacacgaucgccaacuacgcgaagccguuccugaacaagguggucagcaccaccaccaacaucgugacgcgcugccugaaccgggugugcaccaacuacaugcccuacuucuucacccuccugcugcagcucugcaccuucacccgcuccacgaacagccggaucaaggccuccaugcccaccaccaucgccaagaacaccgucaagagcgugggcaaguucugccuggaggccagcuucaacuaccugaagucccccaacuucagcaagcucaucaacaucaucaucugguuccugcugcucuccgugugccugggcagccugaucuacuccacggccgcgcucgggguccugaugagcaaccugggcaugccguccuacugcaccggguaccgcgagggcuaccucaacagcaccaacgugaccaucgccacguacugcaccggcuccauccccugcagcgugugccuguccgggcuggacagccucgacaccuaccccucccuggagaccauccagaucacgaucagcuccuucaagugggaccugaccgccuucggccucgucgccgagugguuccuggccuacauccuguucacccgguucuucuacgugcucgggcuggcggccaucaugcagcuguucuucagcuacuucgccgugcacuucaucuccaacagcuggcucauguggcugaucaucaaccugguccagauggcccccaucuccgcgauggugcgcauguacaucuucuucgccagcuucuacuacguguggaagagcuacguccacgugguggacggcugcaacuccagcaccugcaugaugugcuacaagcggaaccgcgccacgcgggucgagugcaccaccaucgugaacgggguccgccgguccuucuacguguacgccaacggcggcaagggguucugcaagcugcacaacuggaacugcgugaacugcgacaccuucugcgccggcagcacguucaucuccgacgaggucgcgcgcgaccucagccugcaguucaagcggccgaucaaccccaccgaccaguccagcuacaucguggacuccgugaccgucaagaacgggagcauccaccuguacuucgacaaggccggccagaagaccuacgagcgccacucccucagccacuucgugaaccuggacaaccugcgggccaacaacacgaaggggucccuccccaucaacgugaucgucuucgacggcaagagcaagugcgaggaguccagcgccaaguccgccagcguguacuacucccagcugaugugccagcccauccugcuccuggaccaggcgcuggugagcgacgucggcgacagcgccgagguggccgugaagauguucgacgccuacgucaacaccuucuccagcaccuucaacgugccgauggagaagcucaagacccugguggccacggcggaggccgagcuggccaagaacgucucccucgacaacgugcugagcaccuucaucuccgccgcgcgccagggguucguggacagcgacgucgagaccaaggacgugguggagugccugaagcucucccaccagagcgacaucgaggucaccggcgacuccugcaacaacuacaugcugacguacaacaagguggagaacaugaccccccgggaccugggggccugcaucgacugcagcgcccgccacaucaacgcccagguggccaagucccacaacaucgcgcucaucuggaacgucaaggacuucaugagccuguccgagcagcugcggaagcagauccgcagcgccgccaagaagaacaaccuccccuucaagcugaccugcgccaccacgcgccagguggugaacgucgugaccaccaagaucgcccugaagggcggguga

SEQ ID NO: 17903 - RNA, 5841 nt, Artificial Sequence
  SARS-CoV-2__MT806787.1__non-structural protein 3 (NSP3) CDS gc
auggcccccaccaaggugaccuucggcgacgacacggucaucgaggugcagggguacaagagcgugaacaucaccuucgagcuggacgagcgcaucgacaagguccucaacgagaagugcuccgccuacaccguggagcugggcaccgaggugaacgaguucgcgugcgucguggccgacgccgugaucaagacgcugcagccggucagcgagcuccugaccccccuggggaucgaccucgacgagugguccauggccaccuacuaccuguucgacgagagcggcgaguucaagcuggccucccacauguacugcagcuucuacccccccgacgaggacgaggaggagggggacugcgaggaggaggaguucgagccguccacccaguacgaguacggcacggaggacgacuaccagggcaagccccucgaguucggggcgaccagcgccgcccugcagcccgaggaggagcaggaggaggacuggcuggacgacgacucccagcagaccgugggccagcaggacgggagcgaggacaaccagaccacgaccauccagaccaucguggagguccagccccagcucgagauggagcugaccccgguggugcagacgaucgaggucaacuccuucagcggcuaccugaagcucaccgacaacguguacaucaagaacgccgacaucguggaggaggcgaagaaggucaagcccaccgugguggucaacgccgccaacguguaccugaagcacgggggcggcguggccggggcccugaacaaggcgaccaacaacgccaugcaggucgaguccgacgacuacaucgccacgaacggcccccucaagguggggggcagcugcguccuguccggccacaaccuggccaagcacugccuccacgugguggggcccaacgucaacaagggcgaggacauccagcugcugaagagcgccuacgagaacuucaaccagcacgaggugcuccuggcgccgcugcucuccgccgggaucuucggcgccgaccccauccacagccugcgggugugcgucgacaccgugcgcaccaacguguaccuggccgucuucgacaagaaccucuacgacaagcugguguccagcuuccuggagaugaagagcgagaagcagguggagcagaagaucgccgagauccccaaggaggaggucaagcccuucaucaccgaguccaagccgagcguggagcagcggaagcaggacgacaagaagaucaaggcgugcguggaggaggucacgaccacccucgaggagaccaaguuccugacggagaaccugcuccuguacaucgacaucaacgggaaccugcaccccgacuccgccacccucgugagcgacaucgacaucaccuuccugaagaaggacgcccccuacaucgugggcgacgucgugcaggagggcgugcugaccgccgucgugauccccacgaagaaggccgggggcaccaccgagaugcucgcgaaggcccugcgcaaggugccgaccgacaacuacaucacgaccuaccccgggcagggccugaacggguacaccgucgaggaggccaagaccgugcucaagaagugcaaguccgccuucuacauccugcccagcaucaucuccaacgagaagcaggagauccugggcaccgugagcuggaaccuccgggagaugcuggcgcacgccgaggagacgcgcaagcugaugcccgucugcguggagaccaaggccaucguguccaccauccagcggaaguacaagggcaucaagauccaggagggggucguggacuacggcgcccgcuucuacuucuacaccagcaagacgaccguggccucccugaucaacacccucaacgaccugaacgagacccuggucacgaugccgcucggguacgugacccacggccugaaccuggaggaggcggcccgguacaugcgcagccucaaggugcccgccaccgucuccgugagcucccccgacgccgugaccgccuacaacggguaccugacgagcuccagcaagacccccgaggagcacuucaucgagaccaucucccuggcgggcagcuacaaggacuggagcuacuccggccagagcacccagcucgggaucgaguuccugaagcggggcgacaaguccgucuacuacacgagcaacccgaccaccuuccaccuggacggggaggugaucaccuucgacaaccucaagacgcugcugucccuccgcgaggugcggaccaucaaggucuucaccaccguggacaacaucaaccugcacacgcagguggucgacaugagcaugaccuacggccagcaguucggccccaccuaccuggacggggccgacgugaccaagaucaagccccacaacucccacgagggcaagacguucuacgugcucccgaacgacgacacccugcgcgucgaggccuucgaguacuaccacaccaccgaccccagcuuccuggggcgguacauguccgcccucaaccacacgaagaaguggaaguacccccaggugaacggccugaccagcaucaagugggccgacaacaacugcuaccuggcgaccgcccuccugacccugcagcagaucgagcucaaguucaaccccccggcccugcaggacgccuacuaccgcgcgcgggccggggaggccgccaacuucugcgcccugauccucgcguacugcaacaagacggugggcgagcugggcgacguccgcgagaccauguccuaccuguuccagcacgccaaccucgacagcugcaagcgggugcugaacgucgugugcaagaccugcgggcagcagcagaccacccugaagggcguggaggccgucauguacauggggacgcucuccuacgagcaguucaagaagggcgugcagauccccugcaccugcgggaagcaggccaccaaguaccuggugcagcaggagagccccuucgucaugauguccgcccccccggcgcaguacgagcugaagcacggcaccuucacgugcgccagcgaguacaccggcaacuaccagugcgggcacuacaagcacaucaccuccaaggagacccucuacugcaucgacggcgcccugcugacgaagagcagcgaguacaaggggcccaucaccgacguguucuacaaggagaacuccuacaccaccacgaucaagcccgugaccuacaagcucgacggcgucgugugcaccgagaucgaccccaagcuggacaacuacuacaagaaggacaacagcuacuucaccgagcagccgaucgaccuggugcccaaccagcccuaccccaacgccuccuucgacaacuucaaguucgucugcgacaacaucaaguucgccgacgaccucaaccagcugacgggguacaagaagccggcgagccgcgagcugaaggugaccuucuuccccgaccucaacggcgacguggucgccaucgacuacaagcacuacacccccuccuucaagaagggcgccaagcugcugcacaagcccaucguguggcacgugaacaacgccaccaacaaggcgacguacaagccgaacaccuggugcauccggugccucuggagcaccaagcccgucgagaccuccaacagcuucgacgugcugaaguccgaggacgcccaggggauggacaaccuggccugcgaggaccucaagcccgugagcgaggaggucguggagaaccccacgauccagaaggacgugcuggagugcaacgucaagaccaccgagguggugggcgacaucauccugaagccggccaacaacucccucaagaucaccgaggaggucgggcacacggaccugauggccgcguacguggacaacagcucccugaccaucaagaagcccaacgagcucagccgcgugcugggccugaagacccucgccacccacgggcuggccgccgucaacuccgugcccugggacacgaucgccaacuacgcgaagccguuccugaacaagguggucagcaccaccaccaacaucgugacgcgcugccucaaccgggugugcaccaacuacaugcccuacuucuucacccugcugcuccagcugugcaccuucacccgcuccacgaacagccggaucaaggccuccaugcccaccaccaucgccaagaacaccgucaagagcgugggcaaguucugccuggaggccagcuucaacuaccucaagucccccaacuucagcaagcugaucaacaucaucaucugguuccugcuccuguccgugugccugggcagccucaucuacuccacggccgcgcuggggguccugaugagcaaccucggcaugccguccuacugcaccggguaccgcgagggcuaccugaacagcaccaacgugaccaucgccacguacugcaccggcuccauccccugcagcgugugccuguccgggcucgacagccuggacaccuaccccucccuggagaccauccagaucacgaucagcuccuucaagugggaccucaccgccuucggccuggucgccgagugguuccuggccuacauccucuucacccgguucuucuacgugcuggggcuggcggccaucaugcagcucuucuucagcuacuucgccgugcacuucaucuccaacagcuggcugauguggcugaucaucaaccugguccagauggcccccaucuccgcgauggugcgcauguacaucuucuucgccagcuucuacuacguguggaagagcuacguccacgugguggacggcugcaacuccagcaccugcaugaugugcuacaagcggaaccgcgccacgcgggucgagugcaccaccaucgugaacgggguccgccgguccuucuacguguacgccaacggcggcaagggguucugcaagcuccacaacuggaacugcgugaacugcgacaccuucugcgccggcagcacguucaucuccgacgaggucgcgcgcgaccugagccugcaguucaagcggccgaucaaccccaccgaccaguccagcuacaucguggacuccgugaccgucaagaacgggagcauccaccucuacuucgacaaggccggccagaagaccuacgagcgccacucccugagccacuucgugaaccuggacaaccuccgggccaacaacacgaaggggucccugcccaucaacgugaucguccuggacggcaagagcaagugcgaggaguccagcgccaaguccgccagcguguacuacucccagcucaugugccagcccauccugcugcucgaccaggcgcuggugagcgacgucggcgacagcgccgagguggccgugaagauguucgacgccuacgucaacaccuucuccagcaccuucaacgugccgauggagaagcugaagacccucguggccacggcggaggccgagcuggccaagaacgucucccuggacaacgugcucagcaccuucaucuccgccgcgcgccagggguucguggacagcgacgucgagaccaaggacgugguggagugccugaagcugucccaccagagcgacaucgaggucaccggcgacuccugcaacaacuacaugcucacguacaacaagguggagaacaugaccccccgggaccugggggccugcaucgacugcagcgcccgccacaucaacgcccagguggccaagucccacaacaucgcgcugaucuggaacgucaaggacuucaugagccucuccgagcagcugcggaagcagauccgcagcgccgccaagaagaacaaccugcccuucaagcucaccugcgccaccacgcgccagguggugaacgucgugaccaccaagaucgcccugaagggcggguga

SEQ ID NO: 17904 - RNA, 5841 nt, Artificial Sequence
  SARS-CoV-2__MT806789.1__non-structural protein 3 (NSP3) CDS gc
auggcccccaccaaggugaccuucggcgacgacacggucaucgaggugcagggguacaagagcgugaacaucaccuucgagcuggacgagcgcaucgacaagguccucaacgagaagugcuccgccuacaccguggagcugggcaccgaggugaacgaguucgcgugcgucguggccgacgccgugaucaagacgcugcagccggucagcgagcuccugaccccccuggggaucgaccucgacgagugguccauggccaccuacuaccuguucgacgagagcggcgaguucaagcuggccucccacauguacugcagcuucuacccccccgacgaggacgaggaggagggggacugcgaggaggaggaguucgagccguccacccaguacgaguacggcacggaggacgacuaccagggcaagccccucgaguucggggcgaccagcgccgcccugcagcccgaggaggagcaggaggaggacuggcuggacgacgacucccagcagaccgugggccagcaggacgggagcgaggacaaccagaccacgaccauccagaccaucguggagguccagccccagcucgagauggagcugaccccgguggugcagacgaucgaggucaacuccuucagcggcuaccugaagcucaccgacaacguguacaucaagaacgccgacaucguggaggaggcgaagaaggucaagcccaccgugguggucaacgccgccaacguguaccugaagcacgggggcggcguggccggggcccugaacaaggcgaccaacaacgccaugcaggucgaguccgacgacuacaucgccacgaacggcccccucaagguggggggcagcugcguccuguccggccacaaccuggccaagcacugccuccacgugguggggcccaacgucaacaagggcgaggacauccagcugcugaagagcgccuacgagaacuucaaccagcacgaggugcuccuggcgccgcugcucuccgccgggaucuucggcgccgaccccauccacagccugcgggugugcgucgacaccgugcgcaccaacguguaccuggccgucuucgacaagaaccucuacgacaagcugguguccagcuuccuggagaugaagagcgagaagcagguggagcagaagaucgccgagauccccaaggaggaggucaagcccuucaucaccgaguccaagccgagcguggagcagcggaagcaggacgacaagaagaucaaggcgugcguggaggaggucacgaccacccucgaggagaccaaguuccugacggagaaccugcuccuguacaucgacaucaacgggaaccugcaccccgacuccgccacccucgugagcgacaucgacaucaccuuccugaagaaggacgcccccuacaucgugggcgacgucgugcaggagggcgugcugaccgccgucgugauccccacgaagaaggccgggggcaccaccgagaugcucgcgaaggcccugcgcaaggugccgaccgacaacuacaucacgaccuaccccgggcagggccugaacggguacaccgucgaggaggccaagaccgugcucaagaagugcaaguccgccuucuacauccugcccagcaucaucuccaacgagaagcaggagauccugggcaccgugagcuggaaccuccgggagaugcuggcgcacgccgaggagacgcgcaagcugaugcccgucugcguggagaccaaggccaucguguccaccauccagcggaaguacaagggcaucaagauccaggagggggucguggacuacggcgcccgcuucuacuucuacaccagcaagacgaccguggccucccugaucaacacccucaacgaccugaacgagacccuggucacgaugccgcucggguacgugacccacggccugaaccuggaggaggcggcccgguacaugcgcagccucaaggugcccgccaccgucuccgugagcucccccgacgccgugaccgccuacaacggguaccugacgagcuccagcaagacccccgaggagcacuucaucgagaccaucucccuggcgggcagcuacaaggacuggagcuacuccggccagagcacccagcucgggaucgaguuccugaagcggggcgacaaguccgucuacuacacgagcaacccgaccaccuuccaccuggacggggaggugaucaccuucgacaaccucaagacgcugcugucccuccgcgaggugcggaccaucaaggucuucaccaccguggacaacaucaaccugcacacgcacguggucgacaugagcaugaccuacggccagcaguucggccccaccuaccuggacggggccgacgugaccaagaucaagccccacaacucccacgagggcaagacguucuacgugcucccgaacgacgacacccugcgcgucgaggccuucgaguacuaccacaccaccgaccccagcuuccuggggcgguacauguccgcccucaaccacacgaagaaguggaaguacccccaggugaacggccugaccagcaucaagugggccgacaacaacugcuaccuggcgaccgcccuccugacccugcagcagaucgagcucaaguucaaccccccggcccugcaggacgccuacuaccgcgcgcgggccggggaggccgccaacuucugcgcccugauccucgcguacugcaacaagacggugggcgagcugggcgacguccgcgagaccauguccuaccuguuccagcacgccaaccucgacagcugcaagcgggugcugaacgucgugugcaagaccugcgggcagcagcagaccacccugaagggcguggaggccgucauguacauggggacgcucuccuacgagcaguucaagaagggcgugcagauccccugcaccugcgggaagcaggccaccaaguaccuggugcagcaggagagccccuucgucaugauguccgcccccccggcgcaguacgagcugaagcacggcaccuucacgugcgccagcgaguacaccggcaacuaccagugcgggcacuacaagcacaucaccuccaaggagacccucuacugcaucgacggcgcccugcugacgaagagcagcgaguacaaggggcccaucaccgacguguucuacaaggagaacuccuacaccaccacgaucaagcccgugaccuacaagcucgacggcgucgugugcaccgagaucgaccccaagcuggacaacuacuacaagaaggacaacagcuacuucaccgagcagccgaucgaccuggugcccaaccagcccuaccccaacgccuccuucgacaacuucaaguucgucugcgacaacaucaaguucgccgacgaccucaaccagcugacgggguacaagaagccggcgagccgcgagcugaaggugaccuucuuccccgaccucaacggcgacguggucgccaucgacuacaagcacuacacccccuccuucaagaagggcgccaagcugcugcacaagcccaucguguggcacgugaacaacgccaccaacaaggcgacguacaagccgaacaccuggugcauccggugccucuggagcaccaagcccgucgagaccuccaacagcuucgacgugcugaaguccgaggacgcccaggggauggacaaccuggccugcgaggaccucaagcccgugagcgaggaggucguggagaaccccacgauccagaaggacgugcuggagugcaacgucaagaccaccgagguggugggcgacaucauccugaagccggccaacaacucccucaagaucaccgaggaggucgggcacacggaccugauggccgcguacguggacaacagcucccugaccaucaagaagcccaacgagcucagccgcgugcugggccugaagacccucgccacccacgggcuggccgccgucaacuccgugcccugggacacgaucgccaacuacgcgaagccguuccugaacaagguggucagcaccaccaccaacaucgugacgcgcugccucaaccgggugugcaccaacuacaugcccuacuucuucacccugcugcuccagcugugcaccuucacccgcuccacgaacagccggaucaaggccuccaugcccaccaccaucgccaagaacaccgucaagagcgugggcaaguucugccuggaggccagcuucaacuaccucaagucccccaacuucagcaagcugaucaacaucaucaucugguuccugcuccuguccgugugccugggcagccucaucuacuccacggccgcgcuggggguccugaugagcaaccucggcaugccguccuacugcaccggguaccgcgagggcuaccugaacagcaccaacgugaccaucgccacguacugcaccggcuccauccccugcagcgugugccuguccgggcucgacagccuggacaccuaccccucccuggagaccauccagaucacgaucagcuccuucaagugggaccucaccgccuucggccuggucgccgagugguuccuggccuacauccucuucacccgguucuucuacgugcuggggcuggcggccaucaugcagcucuucuucagcuacuucgccgugcacuucaucuccaacagcuggcugauguggcugaucaucaaccugguccagauggcccccaucuccgcgauggugcgcauguacaucuucuucgccagcuucuacuacguguggaagagcuacguccacgugguggacggcugcaacuccagcaccugcaugaugugcuacaagcggaaccgcgccacgcgggucgagugcaccaccaucgugaacgggguccgccgguccuucuacguguacgccaacggcggcaagggguucugcaagcuccacaacuggaacugcgugaacugcgacaccuucugcgccggcagcacguucaucuccgacgaggucgcgcgcgaccugagccugcaguucaagcggccgaucaaccccaccgaccaguccagcuacaucguggacuccgugaccgucaagaacgggagcauccaccucuacuucgacaaggccggccagaagaccuacgagcgccacucccugagccacuucgugaaccuggacaaccuccgggccaacaacacgaaggggucccugcccaucaacgugaucgucuucgacggcaagagcaagugcgaggaguccagcgccaaguccgccagcguguacuacucccagcugaugugccagcccauccuccugcuggaccaggcgcucgugagcgacgucggcgacagcgccgagguggccgugaagauguucgacgccuacgucaacaccuucuccagcaccuucaacgugccgauggagaagcugaagacccugguggccacggcggaggccgagcucgccaagaacgucucccuggacaacgugcugagcaccuucaucuccgccgcgcgccagggguucguggacagcgacgucgagaccaaggacgugguggagugccucaagcugucccaccagagcgacaucgaggucaccggcgacuccugcaacaacuacaugcugacguacaacaagguggagaacaugaccccccgggaccucggggccugcaucgacugcagcgcccgccacaucaacgcccagguggccaagucccacaacaucgcgcugaucuggaacgucaaggacuucaugagccuguccgagcagcuccggaagcagauccgcagcgccgccaagaagaacaaccugcccuucaagcugaccugcgccaccacgcgccagguggugaacgucgugaccaccaagaucgcccucaagggcggguga

SEQ ID NO: 17905 - RNA, 5841 nt, Artificial Sequence
  SARS-CoV-2__MT806792.1__non-structural protein 3 (NSP3) CDS gc
auggcccccaccaaggugaccuucggcgacgacacggucaucgaggugcagggguacaagagcgugaacaucaccuucgagcuggacgagcgcaucgacaagguccucaacgagaagugcuccgccuacaccguggagcugggcaccgaggugaacgaguucgcgugcgucguggccgacgccgugaucaagacgcugcagccggucagcgagcuccugaccccccuggggaucgaccucgacgagugguccauggccaccuacuaccuguucgacgagagcggcgaguucaagcuggccucccacauguacugcagcuucuacccccccgacgaggacgaggaggagggggacugcgaggaggaggaguucgagccguccacccaguacgaguacggcacggaggacgacuaccagggcaagccccucgaguucggggcgaccagcgccgcccugcagcccgaggaggagcaggaggaggacuggcuggacgacgacucccagcagaccgugggccagcaggacgggagcgaggacaaccagaccacgaccauccagaccaucguggagguccagccccagcucgagauggagcugaccccgguggugcagacgaucgaggucaacuccuucagcggcuaccugaagcucaccgacaacguguacaucaagaacgccgacaucguggaggaggcgaagaaggucaagcccaccgugguggucaacgccgccaacguguaccugaagcacgggggcggcguggccggggcccugaacaaggcgaccaacaacgccaugcaggucgaguccgacgacuacaucgccacgaacggcccccucaagguggggggcagcugcguccuguccggccacaaccuggccaagcacugccuccacgugguggggcccaacgucaacaagggcgaggacauccagcugcugaagagcgccuacgagaacuucaaccagcacgaggugcuccuggcgccgcugcucuccgccgggaucuucggcgccgaccccauccacagccugcgggugugcgucgacaccgugcgcaccaacguguaccuggccgucuucgacaagaaccucuacgacaagcugguguccagcuuccuggagaugaagagcgagaagcagguggagcagaagaucgccgagauccccaaggaggaggucaagcccuucaucaccgaguccaagccgagcguggagcagcggaagcaggacgacaagaagaucaaggcgugcguggaggaggucacgaccacccucgaggagaccaaguuccugacggagaaccugcuccuguacaucgacaucaacgggaaccugcaccccgacuccgccacccucgugagcgacaucgacaucaccuuccugaagaaggacgcccccuacaucgugggcgacgucgugcaggagggcgugcugaccgccgucgugauccccacgaagaaggccgggggcaccaccgagaugcucgcgaaggcccugcgcaaggugccgaccgacaacuacaucacgaccuaccccgggcagggccugaacggguacaccgucgaggaggccaagaccgugcucaagaagugcaaguccgccuucuacauccugcccagcaucaucuccaacgagaagcaggagauccugggcaccgugagcuggaaccuccgggagaugcuggcgcacgccgaggagacgcgcaagcugaugcccgucugcguggagaccaaggccaucguguccaccauccagcggaaguacaagggcaucaagauccaggagggggucguggacuacggcgcccgcuucuacuucuacaccagcaagacgaccguggccucccugaucaacacccucaacgaccugaacgagacccuggucacgaugccgcucggguacgugacccacggccugaaccuggaggaggcggcccgguacaugcgcagccucaaggugcccgccaccgucuccgugagcucccccgacgccgugaccgccuacaacggguaccugacgagcuccagcaagacccccgaggagcacuucaucgagaccaucucccuggcgggcagcuacaaggacuggagcuacuccggccagagcacccagcucgggaucgaguuccugaagcggggcgacaaguccgucuacuacacgagcaacccgaccaccuuccaccuggacggggaggugaucaccuucgacaaccucaagacgcugcugucccuccgcgaggugcggaccaucaaggucuucaccaccguggacaacaucaaccugcacacgcagguggucgacaugagcaugaccuacggccagcaguucggccccaccuaccuggacggggccgacgugaccaagaucaagccccacaacucccacgagggcaagacguucuacgugcucccgaacgacgacacccugcgcgucgaggccuucgaguacuaccacaccaccgaccccagcuuccuggggcgguacauguccgcccucaaccacacgaagaaguggaaguacccccaggugaacggccugaccagcaucaagugggccgacaacaacugcuaccuggcgaccgcccuccugacccugcagcagaucgagcucaaguucaaccccccggcccugcaggacgccuacuaccgcgcgcgggccggggaggccgccaacuucugcgcccugauccucgcguacugcaacaagacggugggcgagcugggcgacguccgcgagaccauguccuaccuguuccagcacgccaaccucgacagcugcaagcgggugcugaacgucgugugcaagaccugcgggcagcagcagaccacccugaagggcguggaggccgucauguacauggggacgcucuccuacgagcaguucaagaagggcgugcagauccccugcaccugcgggaagcaggccaccaaguaccuggugcagcaggagagccccuucgucaugauguccgcccccccggcgcaguacgagcugaagcacggcaccuucacgugcgccagcgaguacaccggcaacuaccagugcgggcacuacaagcacaucaccuccaaggagacccucuacugcaucgacggcgcccugcugacgaagagcagcgaguacaaggggcccaucaccgacguguucuacaaggagaacuccuacaccaccacgaucaagcccgugaccuacaagcucgacggcgucgugugcaccgagaucgaccccaagcuggacaacuacuacaagaaggacaacagcuacuucaccgagcagccgaucgaccuggugcccaaccagcccuaccccaacgccuccuucgacaacuucaaguucgucugcgacaacaucaaguucgccgacgaccucaaccagcugacgggguacaagaagccggcgagccgcgagcugaaggugaccuucuuccccgaccucaacggcgacguggucgccaucgacuacaagcacuacacccccuccuucaagaagggcgccaagcugcugcacaagcccaucguguggcacgugaacaacgccaucaacaaggcgaccuacaagccgaacacguggugcauccggugccucuggagcaccaagcccgucgagaccuccaacagcuucgacgugcugaaguccgaggacgcccaggggauggacaaccuggccugcgaggaccucaagcccgugagcgaggaggucguggagaaccccaccauccagaaggacgugcuggagugcaacgucaagacgaccgagguggugggcgacaucauccugaagccggccaacaacucccucaagaucaccgaggaggucgggcacaccgaccugauggccgcguacguggacaacagcucccugacgaucaagaagcccaacgagcucagccgcgugcugggccugaagacccucgccacccacgggcuggccgccgucaacuccgugcccugggacaccaucgccaacuacgcgaagccguuccugaacaagguggucagcacgaccaccaacaucgugacccgcugccucaaccgggugugcacgaacuacaugcccuacuucuucacccugcugcuccagcugugcaccuucacccgcuccaccaacagccggaucaaggccuccaugcccacgaccaucgccaagaacaccgucaagagcgugggcaaguucugccuggaggccagcuucaacuaccucaagucccccaacuucagcaagcugaucaacaucaucaucugguuccugcuccuguccgugugccugggcagccucaucuacuccaccgccgcgcuggggguccugaugagcaaccucggcaugccguccuacugcacgggguaccgcgagggcuaccugaacagcaccaacgugaccaucgccaccuacugcacgggcuccauccccugcagcgugugccuguccgggcucgacagccuggacaccuaccccucccuggagaccauccagaucaccaucagcuccuucaagugggaccucacggccuucggccuggucgccgagugguuccuggccuacauccucuucacccgguucuucuacgugcuggggcuggcggccaucaugcagcucuucuucagcuacuucgccgugcacuucaucuccaacagcuggcugauguggcugaucaucaaccugguccagauggcccccaucuccgcgauggugcgcauguacaucuucuucgccagcuucuacuacguguggaagagcuacguccacgugguggacggcugcaacuccagcaccugcaugaugugcuacaagcggaaccgcgccacccgggucgagugcacgaccaucgugaacgggguccgccgguccuucuacguguacgccaacggcggcaagggguucugcaagcuccacaacuggaacugcgugaacugcgacaccuucugcgccggcagcaccuucaucuccgacgaggucgcgcgcgaccugagccugcaguucaagcggccgaucaaccccacggaccaguccagcuacaucguggacuccgugaccgucaagaacgggagcauccaccucuacuucgacaaggccggccagaagaccuacgagcgccacucccugagccacuucgugaaccuggacaaccuccgggccaacaacaccaaggggucccugcccaucaacgugaucgucuucgacggcaagagcaagugcgaggaguccagcgccaaguccgccagcguguacuacucccagcugaugugccagcccauccuccugcuggaccaggcgcucgugagcgacgucggcgacagcgccgagguggccgugaagauguucgacgccuacgucaacacguucuccagcaccuucaacgugccgauggagaagcugaagacccugguggccaccgcggaggccgagcucgccaagaacgucucccuggacaacgugcugagcacguucaucuccgccgcgcgccagggguucguggacagcgacgucgagaccaaggacgugguggagugccucaagcugucccaccagagcgacaucgaggucaccggcgacuccugcaacaacuacaugcugaccuacaacaagguggagaacaugacgccccgggaccucggggccugcaucgacugcagcgcccgccacaucaacgcccagguggccaagucccacaacaucgcgcugaucuggaacgucaaggacuucaugagccuguccgagcagcuccggaagcagauccgcagcgccgccaagaagaacaaccugcccuucaagcugaccugcgccaccacccgccagguggugaacgucgugacgaccaagaucgcccucaagggcggguga

SEQ ID NO: 17906 - RNA, 5841 nt, Artificial Sequence
  SARS-CoV-2__MT806798.1__non-structural protein 3 (NSP3) CDS gc
auggcccccaccaaggugaccuucggcgacgacacggucaucgaggugcagggguacaagagcgugaacaucaccuucgagcuggacgagcgcaucgacaagguccucaacgagaagugcuccgccuacaccguggagcugggcaccgaggugaacgaguucgcgugcgucguggccgacgccgugaucaagacgcugcagccggucagcgagcuccugaccccccuggggaucgaccucgacgagugguccauggccaccuacuaccuguucgacgagagcggcgaguucaagcuggccucccacauguacugcagcuucuacccccccgacgaggacgaggaggagggggacugcgaggaggaggaguucgagccguccacccaguacgaguacggcacggaggacgacuaccagggcaagccccucgaguucggggcgaccagcgccgcccugcagcccgaggaggagcaggaggaggacuggcuggacgacgacucccagcagaccgugggccagcaggacgggagcgaggacaaccagaccacgaccauccagaccaucguggagguccagccccagcucgagauggagcugaccccgguggugcagacgaucgaggucaacuccuucagcggcuaccugaagcucaccgacaacguguacaucaagaacgccgacaucguggaggaggcgaagaaggucaagcccaccgugguggucaacgccgccaacguguaccugaagcacgggggcggcguggccggggcccugaacaaggcgaccaacaacgccaugcaggucgaguccgacgacuacaucgccacgaacggcccccucaagguggggggcagcugcguccuguccggccacaaccuggccaagcacugccuccacgugguggggcccaacgucaacaagggcgaggacauccagcugcugaagagcgccuacgagaacuucaaccagcacgaggugcuccuggcgccgcugcucuccgccgggaucuucggcgccgaccccauccacagccugcgggugugcgucgacaccgugcgcaccaacguguaccuggccgucuucgacaagaaccucuacgacaagcugguguccagcuuccuggagaugaagagcgagaagcagguggagcagaagaucgccgagauccccaaggaggaggucaagcccuucaucaccgaguccaagccgagcguggagcagcggaagcaggacgacaagaagaucaaggcgugcguggaggaggucacgaccacccucgaggagaccaaguuccugacggagaaccugcuccuguacaucgacaucaacgggaaccugcaccccgacuccgccacccucgugagcgacaucgacaucaccuuccugaagaaggacgcccccuacaucgagggcgacgugguccaggagggcgugcugaccgccguggucauccccacgaagaaggccgggggcaccaccgagaugcucgcgaaggcccugcgcaaggugccgaccgacaacuacaucacgaccuaccccgggcagggccugaacggguacaccguggaggaggccaagaccguccucaagaagugcaaguccgccuucuacauccugcccagcaucaucuccaacgagaagcaggagauccugggcaccgugagcuggaaccuccgggagaugcuggcgcacgccgaggagacgcgcaagcugaugcccgugugcgucgagaccaaggccaucguguccaccauccagcggaaguacaagggcaucaagauccaggaggggguggucgacuacggcgcccgcuucuacuucuacaccagcaagacgaccguggccucccugaucaacacccucaacgaccugaacgagacccuggugacgaugccgcucggguacgucacccacggccugaaccuggaggaggcggcccgguacaugcgcagccucaaggugcccgccaccguguccgucagcucccccgacgccgugaccgccuacaacggguaccugacgagcuccagcaagacccccgaggagcacuucaucgagaccaucucccuggcgggcagcuacaaggacuggagcuacuccggccagagcacccagcucgggaucgaguuccugaagcggggcgacaaguccguguacuacacgagcaacccgaccaccuuccaccuggacggggaggucaucaccuucgacaaccucaagacgcugcugucccuccgcgaggugcggaccaucaagguguucaccaccgucgacaacaucaaccugcacacgcaggugguggacaugagcaugaccuacggccagcaguucggccccaccuaccuggacggggccgacgucaccaagaucaagccccacaacucccacgagggcaagacguucuacgugcucccgaacgacgacacccugcgcguggaggccuucgaguacuaccacaccaccgaccccagcuuccuggggcgguacauguccgcccucaaccacacgaagaaguggaaguacccccaggucaacggccugaccagcaucaagugggccgacaacaacugcuaccuggcgaccgcccuccugacccugcagcagaucgagcucaaguucaaccccccggcccugcaggacgccuacuaccgcgcgcgggccggggaggccgccaacuucugcgcccugauccucgcguacugcaacaagacggugggcgagcugggcgacgugcgcgagaccauguccuaccuguuccagcacgccaaccucgacagcugcaagcggguccugaacguggucugcaagaccugcgggcagcagcagaccacccugaagggcguggaggccgugauguacauggggacgcucuccuacgagcaguucaagaagggcguccagauccccugcaccugcgggaagcaggccaccaaguaccuggugcagcaggagagccccuucgugaugauguccgcccccccggcgcaguacgagcugaagcacggcaccuucacgugcgccagcgaguacaccggcaacuaccagugcgggcacuacaagcacaucaccuccaaggagacccucuacugcaucgacggcgcccugcugacgaagagcagcgaguacaaggggcccaucaccgacgucuucuacaaggagaacuccuacaccaccacgaucaagcccgugaccuacaagcucgacggcguggucugcaccgagaucgaccccaagcuggacaacuacuacaagaaggacaacagcuacuucaccgagcagccgaucgaccuggugcccaaccagcccuaccccaacgccuccuucgacaacuucaaguucgugugcgacaacaucaaguucgccgacgaccucaaccagcugacgggguacaagaagccggcgagccgcgagcugaaggucaccuucuuccccgaccucaacggcgacgugguggccaucgacuacaagcacuacacccccuccuucaagaagggcgccaagcugcugcacaagcccaucgucuggcacgugaacaacgccaccaacaaggcgacguacaagccgaacaccuggugcauccggugccucuggagcaccaagcccguggagaccuccaacagcuucgacguccugaaguccgaggacgcccaggggauggacaaccuggccugcgaggaccucaagcccgugagcgaggagguggucgagaaccccacgauccagaaggacgugcuggagugcaacgugaagaccaccgaggucgugggcgacaucauccugaagccggccaacaacucccucaagaucaccgaggagguggggcacacggaccugauggccgcguacgucgacaacagcucccugaccaucaagaagcccaacgagcucagccgcgugcugggccugaagacccucgccacccacgggcuggccgccgugaacuccguccccugggacacgaucgccaacuacgcgaagccguuccugaacaagguggugagcaccaccaccaacaucgucacgcgcugccucaaccgggugugcaccaacuacaugcccuacuucuucacccugcugcuccagcugugcaccuucacccgcuccacgaacagccggaucaaggccuccaugcccaccaccaucgccaagaacaccgugaagagcgucggcaaguucugccuggaggccagcuucaacuaccucaagucccccaacuucagcaagcugaucaacaucaucaucugguuccugcuccuguccgugugccugggcagccucaucuacuccacggccgcgcugggggugcugaugagcaaccucggcaugccguccuacugcaccggguaccgcgagggcuaccugaacagcaccaacgucaccaucgccacguacugcaccggcuccauccccugcagcgugugccuguccgggcucgacagccuggacaccuaccccucccuggagaccauccagaucacgaucagcuccuucaagugggaccucaccgccuucggccugguggccgagugguuccuggccuacauccucuucacccgguucuucuacguccuggggcuggcggccaucaugcagcucuucuucagcuacuucgccgugcacuucaucuccaacagcuggcugauguggcugaucaucaaccuggugcagauggcccccaucuccgcgaugguccgcauguacaucuucuucgccagcuucuacuacguguggaagagcuacgugcacgucguggacggcugcaacuccagcaccugcaugaugugcuacaagcggaaccgcgccacgcggguggagugcaccaccaucgucaacggggugcgccgguccuucuacgucuacgccaacggcggcaagggguucugcaagcuccacaacuggaacugcgugaacugcgacaccuucugcgccggcagcacguucaucuccgacgagguggcgcgcgaccugagccugcaguucaagcggccgaucaaccccaccgaccaguccagcuacaucgucgacuccgugaccgugaagaacgggagcauccaccucuacuucgacaaggccggccagaagaccuacgagcgccacucccugagccacuucgucaaccuggacaaccuccgggccaacaacacgaaggggucccugcccaucaacgugaucguguucgacggcaagagcaagugcgaggaguccagcgccaaguccgccagcgucuacuacucccagcugaugugccagcccauccuccugcuggaccaggcgcucgugagcgacgugggcgacagcgccgaggucgccgugaagauguucgacgccuacgugaacaccuucuccagcaccuucaacgucccgauggagaagcugaagacccugguggccacggcggaggccgagcucgccaagaacgugucccuggacaacguccugagcaccuucaucuccgccgcgcgccagggguucguggacagcgacguggagaccaaggacgucguggagugccucaagcugucccaccagagcgacaucgaggugaccggcgacuccugcaacaacuacaugcugacguacaacaaggucgagaacaugaccccccgggaccucggggccugcaucgacugcagcgcccgccacaucaacgcccagguggccaagucccacaacaucgcgcugaucuggaacgugaaggacuucaugagccuguccgagcagcuccggaagcagauccgcagcgccgccaagaagaacaaccugcccuucaagcugaccugcgccaccacgcgccaggucgugaacguggucaccaccaagaucgcccucaagggcggguga

SEQ ID NO: 17907 - RNA, 5841 nt, Artificial Sequence
  SARS-CoV-2__MT799969.1__non-structural protein 3 (NSP3) CDS gc
auggcccccaccaaggugaccuucggcgacgacacggucaucgaggugcagggguacaagagcgugaacaucaccuucgagcuggacgagcgcaucgacaagguccucaacgagaagugcuccgccuacaccguggagcugggcaccgaggugaacgaguucgcgugcgucguggccgacgccgugaucaagacgcugcagccggucagcgagcuccugaccccccuggggaucgaccucgacgagugguccauggccaccuacuaccuguucgacgagagcggcgaguucaagcuggccucccacauguacugcagcuucuacccccccgacgaggacgaggaggagggggacugcgaggaggaggaguucgagccguccacccaguacgaguacggcacggaggacgacuaccagggcaagccccucgaguucggggcgaccagcgccgcccugcagcccgaggaggagcaggaggaggacuggcuggacgacgacucccagcagaccgugggccagcaggacgggagcgaggacaaccagaccacgaccauccagaccaucguggagguccagccccagcucgagauggagcugaccccgguggugcagacgaucgaggucaacuccuucagcggcuaccugaagcucaccgacaacguguacaucaagaacgccgacaucguggaggaggcgaagaaggucaagcccaccgugguggucaacgccgccaacguguaccugaagcacgggggcggcguggccggggcccugaacaaggcgaccaacaacgccaugcaggucgaguccgacgacuacaucgccacgaacggcccccucaagguggggggcagcugcguccuguccggccacaaccuggccaagcacugccuccacgugguggggcccaacgucaacaagggcgaggacauccagcugcugaagagcgccuacgagaacuucaaccagcacgaggugcuccuggcgccgcugcucuccgccgggaucuucggcgccgacagcauccacucccugcgggugugcgucgacaccgugcgcaccaacguguaccuggccgucuucgacaagaaccucuacgacaagcuggugagcagcuuccuggagaugaaguccgagaagcagguggagcagaagaucgccgagauccccaaggaggaguucaagcccuucaucaccgagagcaagcccuccgucgagcagcggaagcaggacgacaagaagaucaaggcgugcguggaggaggugacgaccacccucgaggagaccaaguuccugacggagaaccugcuccuguacaucgacaucaacgggaaccugcacccggacagcgccacccucgucuccgacaucgacaucaccuuccugaagaaggacgcccccuacaucgugggcgacgugguccaggagggcgugcugaccgccguggucauccccacgaagaaggccgggggcaccaccgagaugcucgcgaaggcccugcgcaaggugcccaccgacaacuacaucacgaccuacccggggcagggccugaacggguacaccguggaggaggccaagaccguccucaagaagugcaagagcgccuucuacauccugcccuccaucaucagcaacgagaagcaggagauccugggcaccguguccuggaaccuccgggagaugcuggcgcacgccgaggagacgcgcaagcugaugcccgugugcgucgagaccaaggccaucgugagcaccauccagcggaaguacaagggcaucaagauccaggaggggguggucgacuacggcgcccgcuucuacuucuacaccuccaagacgaccguggccagccugaucaacacccucaacgaccugaacgagacccuggugacgaugccccucggguacgucacccacggccugaaccuggaggaggcggcccgguacaugcgcucccucaaggugccggccaccgugagcgucuccagccccgacgccgugaccgccuacaacggguaccugacguccagcuccaagacccccgaggagcacuucaucgagaccaucagccuggcgggcagcuacaaggacugguccuacagcggccaguccacccagcucgggaucgaguuccugaagcggggcgacaagaucguguacuacacgagcaaccccaccaccuuccaccuggacggggaggucaucaccuucgacaaccucaagacgcugcugucccuccgcgaggugcggaccaucaagguguucaccaccgucgacaacaucaaccugcacacgcaggugguggacaugagcaugaccuacggccagcaguucggcccgaccuaccuggacggggccgacgucaccaagaucaagccccacaacucccacgagggcaagacguucuacgugcuccccaacgacuacacccugcgcguggaggccuucgaguacuaccacaccaccgacccgagcuuccuggggcgguacauguccgcccucaaccacacgaagaaguggaaguacccccaggucaacggccugaccagcaucaagugggccgacaacaacugcuaccuggcgaccgcccuccugacccugcagcagaucgagcucaaguucaacccccccgcccugcaggacgccuacuaccgcgcgcgggccggggaggccgccaacuucugcgcccugauccucgcguacugcaacaagacggugggcgagcugggcgacgugcgcgagaccauguccuaccuguuccagcacgccaaccucgacagcugcaagcggguccugaacguggucugcaagaccugcgggcagcagcagaccacccugaagggcguggaggccgugauguacauggggacgcucuccuacgagcaguucaagaagggcguccagaucccgugcaccugcgggaagcaggccaccaaguaccuggugcagcaggagagccccuucgugaugauguccgccccccccgcgcaguacgagcugaagcacggcaccuucacgugcgccagcgaguacaccggcaacuaccagugcgggcacuacaagcacaucaccuccaaggagacccucuacugcaucgacggcgcccugcugacgaagagcagcgaguacaaggggccgaucaccgacgucuucuacaaggagaacuccuacaccaccacgaucaagcccgugaccuacaagcucgacggcguggucugcaccgagaucgaccccaagcuggacaacuacuacaagaaggacaacagcuacuucaccgagcagcccaucgaccuggugccgaaccagcccuaccccaacgccuccuucgacaacuucaaguucgugugcgacaacaucaaguucgccgacgaccucaaccagcugacgggguacaagaagcccgcgagccgcgagcugaaggucaccuucuucccggaccucaacggcgacgugguggccaucgacuacaagcacuacacccccuccuucaagaagggcgccaagcugcugcacaagcccaucgucuggcacgugaacaacgccaccaacaaggcgacguacaagcccaacaccuggugcauccggugccucuggagcaccaagccgguggagaccuccaacagcuucgacguccugaaguccgaggacgcccaggggauggacaaccuggccugcgaggaccucaagcccgugagcgaggagguggucgagaaccccacgauccagaaggacgugcuggagugcaacgugaagaccaccgaggucgugggcgacaucauccugaagcccgccaacaacucccucaagaucaccgaggagguggggcacacggaccugauggccgcguacgucgacaacagcucccugaccaucaagaagccgaacgagcucagccgcgugcugggccugaagacccucgccacccacgggcuggccgccgugaacuccguccccugggacacgaucgccaacuacgcgaagcccuuccugaacaagguggugagcaccaccaccaacaucgucacgcgcugccucaaccgggugugcaccaacuacaugccguacuucuucacccugcugcuccagcugugcaccuucacccgcuccacgaacagccggaucaaggccuccaugcccaccaccaucgccaagaacaccgugaagagcgucggcaaguucugccuggaggccagcuucaacuaccucaagucccccaacuucagcaagcugaucaacaucaucaucugguuccugcuccuguccgugugccugggcagccucaucuacuccacggccgcgcugggggugcugaugagcaaccucggcaugcccuccuacugcaccggguaccgcgagggcuaccugaacagcaccaacgucaccaucgccacguacugcaccggcuccaucccgugcagcgugugccuguccgggcucgacagccuggacaccuaccccucccuggagaccauccagaucacgaucagcuccuucaagugggaccucaccgccuucggccugguggccgagugguuccuggccuacauccucuucacccgguucuucuacguccuggggcuggcggccaucaugcagcucuucuucagcuacuucgccgugcacuucaucuccaacagcuggcugauguggcugaucaucaaccuggugcagauggcccccaucuccgcgaugguccgcauguacaucuucuucgccagcuucuacuacguguggaagagcuacgugcacgucguggacggcugcaacuccagcaccugcaugaugugcuacaagcggaaccgcgccacgcggguggagugcaccaccaucgucaacggggugcgccgguccuucuacgucuacgccaacggcggcaagggguucugcaagcuccacaacuggaacugcgugaacugcgacaccuucugcgccggcagcacguucaucuccgacgagguggcgcgcgaccugagccugcaguucaagcggcccaucaacccgaccgaccaguccagcuacaucgucgacuccgugaccgugaagaacgggagcauccaccucuacuucgacaaggccggccagaagaccuacgagcgccacucccugagccacuucgucaaccuggacaaccuccgggccaacaacacgaaggggucccugcccaucaacgugaucguguucgacggcaagagcaagugcgaggaguccagcgccaaguccgccagcgucuacuacucccagcugaugugccagcccauccuccugcuggaccaggcgcucgugagcgacgugggcgacagcgccgaggucgccgugaagauguucgacgccuacgugaacaccuucuccagcaccuucaacguccccauggagaagcugaagacccugguggccacggcggaggccgagcucgccaagaacgugucccuggacaacguccugagcaccuucaucuccgccgcgcgccagggguucguggacagcgacguggagaccaaggacgucguggagugccucaagcugucccaccagagcgacaucgaggugaccggcgacuccugcaacaacuacaugcugacguacaacaaggucgagaacaugaccccgcgggaccucggggccugcaucgacugcagcgcccgccacaucaacgcccagguggccaagucccacaacaucgcgcugaucuggaacgugaaggacuucaugagccuguccgagcagcuccggaagcagauccgcagcgccgccaagaagaacaaccugcccuucaagcugaccugcgccaccacgcgccaggucgugaacguggucaccaccaagaucgcccucaagggcggguga

SEQ ID NO: 17908 - RNA, 5841 nt, Artificial Sequence
  SARS-CoV-2__MT799998.1__non-structural protein 3 (NSP3) CDS gc
auggcccccaccaaggugaccuucggcgacgacacggucaucgaggugcagggguacaagagcgugaacaucaccuucgagcuggacgagcgcaucgacaagguccucaacgagaagugcuccgccuacaccguggagcugggcaccgaggugaacgaguucgcgugcgucguggccgacgccgugaucaagacgcugcagccggucagcgagcuccugaccccccuggggaucgaccucgacgagugguccauggccaccuacuaccuguucgacgagagcggcgaguucaagcuggccucccacauguacugcagcuucuacccccccgacgaggacgaggaggagggggacugcgaggaggaggaguucgagccguccacccaguacgaguacggcacggaggacgacuaccagggcaagccccucgaguucggggcgaccagcgccgcccugcagcccgaggaggagcaggaggaggacuggcuggacgacgacucccagcagaccgugggccagcaggacgggagcgaggacaaccagaccacgaccauccagaccaucguggagguccagccccagcucgagauggagcugaccccgguggugcagacgaucgaggucaacuccuucagcggcuaccugaagcucaccgacaacguguacaucaagaacgccgacaucguggaggaggcgaagaaggucaagcccaccgugguggucaacgccgccaacguguaccugaagcacgggggcggcguggccggggcccugaacaaggcgaccaacaacgccaugcaggucgaguccgacgacuacaucgccacgaacggcccccucaagguggggggcagcugcguccuguccggccacaaccuggccaagcacugccuccacgugguggggcccaacgucaacaagggcgaggacauccagcugcugaagagcgccuacgagaacuucaaccagcacgaggugcuccuggcgccgcugcucuccgccgggaucuucggcgccgaccccauccacagccugcgggugugcgucgacaccgugcgcaccaacguguaccuggccgucuucgacaagaaccucuacgacaagcugguguccagcuuccuggagaugaagagcgagaagcagguggagcagaagaucgccgagauccccaaggaggaggucaagcccuucaucaccgaguccaagccgagcguggagcagcggaagcaggacgacaagaagaucaaggcgugcguggaggaggucacgaccacccucgaggagaccaaguuccugacggagaaccugcuccuguacaucgacaucaacgggaaccugcaccccgacuccgccacccucgugagcgacaucgacaucaccuuccugaagaaggacgcccccuacaucgugggcgacgucgugcaggagggcgugcugaccgccgucgugauccccacgaagaaggccgggggcaccaccgagaugcucgcgaaggcccugcgcaaggugccgaccgacaacuacaucacgaccuaccccgggcagggccugaacggguacaccgucgaggaggccaagaccgugcucaagaagugcaaguccgccuucuacauccugcccagcaucaucuccaacgagaagcaggagauccugggcaccgugagcuggaaccuccgggagaugcuggcgcacgccgaggagacgcgcaagcugaugcccgucugcguggagaccaaggccaucguguccaccauccagcggaaguacaagggcaucaagauccaggagggggucguggacuacggcgcccgcuucuacuucuacaccagcaagacgaccguggccucccugaucaacacccucaacgaccugaacgagacccuggucacgaugccgcucggguacgugacccacggccugaaccuggaggaggcggcccgguacaugcgcagccucaaggugcccgccaccgucuccgugagcucccccgacgccgugaccgccuacaacggguaccugacgagcuccagcaagacccccgaggagcacuucaucgagaccaucucccuggcgggcagcuacaaggacuggagcuacuccggccagagcacccagcucgggaucgaguuccugaagcggggcgacaaguccgucuacuacacgagcaacccgaccaccuuccaccuggacggggaggugaucaccuucgacaaccucaagacgcugcugucccuccgcgaggugcggaccaucaaggucuucaccaccguggacaacaucaaccugcacacgcagguggucgacaugagcaugaccuacggccagcaguucggccccaccuaccuggacggggccgacgugaccaagaucaagccccacaacucccacgagggcaagacguucuacgugcucccgaacgacgacacccugcgcgucgaggccuucgaguacuaccacaccaccgaccccagcuuccuggggcgguacauguccgcccucaaccacacgaagaaguggaaguacccccaggugaacggccugaccagcaucaagugggccgacaacaacugcuaccuggcgaccgcccuccugacccugcagcagaucgagcucaaguucaaccccccggcccugcaggacgccuacuaccgcgcgcgggccggggaggccgccaacuucugcgcccugauccucgcguacugcaacaagacggugggcgagcugggcgacguccgcgagaccauguccuaccuguuccagcacgccaaccucgacagcugcaagcgggugcugaacgucgugugcaagaccugcgggcagcagcagaccacccugaagggcguggaggccgucauguacauggggacgcucuccuacgagcaguucaagaagggcgugcagauccccugcaccugcgggaagcaggccaccaaguaccuggugcagcaggagagccccuucgucaugauguccgcccccccggaccaguacgagcugaagcacggcaccuucacgugcgcgagcgaguacaccggcaacuaccagugcgggcacuacaagcacaucaccuccaaggagacccucuacugcaucgacggcgcccugcugacgaagagcagcgaguacaaggggcccaucaccgacguguucuacaaggagaacuccuacaccaccacgaucaagcccgugaccuacaagcucgacggcgucgugugcaccgagaucgaccccaagcuggacaacuacuacaagaaggacaacagcuacuucaccgagcagccgaucgaccuggugcccaaccagcccuaccccaacgccuccuucgacaacuucaaguucgucugcgacaacaucaaguucgccgacgaccucaaccagcugacgggguacaagaagccggccagccgcgagcugaaggugaccuucuuccccgaccucaacggcgacguggucgcgaucgacuacaagcacuacacccccuccuucaagaagggcgccaagcugcugcacaagcccaucguguggcacgugaacaacgccaccaacaaggccacguacaagccgaacaccuggugcauccggugccucuggagcaccaagcccgucgagaccuccaacagcuucgacgugcugaaguccgaggacgcgcaggggauggacaaccuggccugcgaggaccucaagcccgugagcgaggaggucguggagaaccccacgauccagaaggacgugcuggagugcaacgucaagaccaccgagguggugggcgacaucauccugaagccggccaacaacucccucaagaucaccgaggaggucgggcacacggaccugauggccgccuacguggacaacagcucccugaccaucaagaagcccaacgagcucagccgcgugcugggccugaagacccucgcgacccacgggcuggccgccgucaacuccgugcccugggacacgaucgccaacuacgccaagccguuccugaacaagguggucagcaccaccaccaacaucgugacgcgcugccucaaccgggugugcaccaacuacaugcccuacuucuucacccugcugcuccagcugugcaccuucacccgcuccacgaacagccggaucaaggcguccaugcccaccaccaucgccaagaacaccgucaagagcgugggcaaguucugccuggaggccagcuucaacuaccucaagucccccaacuucagcaagcugaucaacaucaucaucugguuccugcuccuguccgugugccugggcagccucaucuacuccacggccgcccuggggguccugaugagcaaccucggcaugccguccuacugcaccggguaccgcgagggcuaccugaacagcaccaacgugaccaucgcgacguacugcaccggcuccauccccugcagcgugugccuguccgggcucgacagccuggacaccuaccccucccuggagaccauccagaucacgaucagcuccuucaagugggaccucaccgccuucggccuggucgccgagugguuccuggccuacauccucuucacccgguucuucuacgugcuggggcuggccgcgaucaugcagcucuucuucagcuacuucgccgugcacuucaucuccaacagcuggcugauguggcugaucaucaaccugguccagauggcccccaucuccgccauggugcgcauguacaucuucuucgcgagcuucuacuacguguggaagagcuacguccacgugguggacggcugcaacuccagcaccugcaugaugugcuacaagcggaaccgcgccacgcgggucgagugcaccaccaucgugaacgggguccgccgguccuucuacguguacgccaacggcggcaagggguucugcaagcuccacaacuggaacugcgugaacugcgacaccuucugcgccggcagcacguucaucuccgacgaggucgcccgcgaccugagccugcaguucaagcggccgaucaaccccaccgaccaguccagcuacaucguggacuccgugaccgucaagaacgggagcauccaccucuacuucgacaaggcgggccagaagaccuacgagcgccacucccugagccacuucgugaaccuggacaaccuccgggccaacaacacgaaggggucccugcccaucaacgugaucgucuucgacggcaagagcaagugcgaggaguccagcgccaaguccgccagcguguacuacucccagcugaugugccagcccauccuccugcuggaccaggcccucgugagcgacgucggcgacagcgcggagguggccgugaagauguucgacgccuacgucaacaccuucuccagcaccuucaacgugccgauggagaagcugaagacccugguggccacggccgaggcggagcucgccaagaacgucucccuggacaacgugcugagcaccuucaucuccgccgcccgccagggguucguggacagcgacgucgagaccaaggacgugguggagugccucaagcugucccaccagagcgacaucgaggucaccggcgacuccugcaacaacuacaugcugacguacaacaagguggagaacaugaccccccgggaccucggggcgugcaucgacugcagcgcccgccacaucaacgcccagguggccaagucccacaacaucgcccugaucuggaacgucaaggacuucaugagccuguccgagcagcuccggaagcagauccgcagcgcggccaagaagaacaaccugcccuucaagcugaccugcgccaccacgcgccagguggugaacgucgugaccaccaagaucgcccucaagggcggguga

SEQ ID NO: 17909 - RNA, 5841 nt, Artificial Sequence
  SARS-CoV-2__MT800024.1__non-structural protein 3 (NSP3) CDS gc
auggcccccaccaaggugaccuucggcgacgacacggucaucgaggugcagggguacaagagcgugaacaucaccuucgagcuggacgagcgcaucgacaagguccucaacgagaagugcuccgccuacaccguggagcugggcaccgaggugaacgaguucgcgugcgucguggccgacgccgugaucaagacgcugcagccggucagcgagcuccugaccccccuggggaucgaccucgacgagugguccauggccaccuacuaccuguucgacgagagcggcgaguucaagcuggccucccacauguacugcagcuucuacccccccgacgaggacgaggaggagggggacugcgaggaggaggaguucgagccguccacccaguacgaguacggcacggaggacgacuaccagggcaagccccucgaguucggggcgaccagcgccgcccugcagcccgaggaggagcaggaggaggacuggcuggacgacgacucccagcagaccgugggccagcaggacgggagcgaggacaaccagaccacgaccauccagaccaucguggagguccagccccagcucgagauggagcugaccccgguggugcagacgaucgaggucaacuccuucagcggcuaccugaagcucaccgacaacguguacaucaagaacgccgacaucguggaggaggcgaagaaggucaagcccaccgugguggucaacgccgccaacguguaccugaagcacgggggcggcguggccggggcccugaacaaggcgaccaacaacgccaugcaggucgaguccgacgacuacaucgccacgaacggcccccucaagguggggggcagcugcguccuguccggccacaaccuggccaagcacugccuccacgugguggggcccaacgucaacaagggcgaggacauccagcugcugaagagcgccuacgagaacuucaaccagcacgaggugcuccuggcgccgcugcucuccgccgggaucuucggcgccgaccccauccacagccugcgggugugcgucgacaccgugcgcaccaacguguaccuggccgucuucgacaagaaccucuacgacaagcugguguccagcuuccuggagaugaagagcgagaagcagguggagcagaagaucgccgagauccccaaggaggaggucaagcccuucaucaccgaguccaagccgagcguggagcagcggaagcaggacgacaagaagaucaaggcgugcguggaggaggucacgaccacccucgaggagaccaaguuccugacgaagaaccugcuccuguacaucgacaucaacgggaaccugcaccccgacuccgccacccucgugagcgacaucgacaucaccuuccugaagaaggacgcccccuacaucgugggcgacgucgugcaggagggcgugcugaccgccgucgugauccccacgaagaaggccgggggcaccaccgagaugcucgcgaaggcccugcgcaaggugccgaccgacaacuacaucacgaccuaccccgggcagggccugaacggguacaccgucgaggaggccaagaccgugcucaagaagugcaaguccgccuucuacauccugcccagcaucaucuccaacgagaagcaggagauccugggcaccgugagcuggaaccuccgggagaugcuggcgcacgccgaggagacgcgcaagcugaugcccgucugcguggagaccaaggccaucguguccaccauccagcggaaguacaagggcaucaagauccaggagggggucguggacuacggcgcccgcuucuacuucuacaccagcaagacgaccguggccucccugaucaacacccucaacgaccugaacgagacccuggucacgaugccgcucggguacgugacccacggccugaaccuggaggaggcggcccgguacaugcgcagccucaaggugcccgccaccgucuccgugagcucccccgacgccgugaccgccuacaacggguaccugacgagcuccagcaagacccccgaggagcacuucaucgagaccaucucccuggcgggcagcuacaaggacuggagcuacuccggccagagcacccagcucgggaucgaguuccugaagcggggcgacaaguccgucuacuacacgagcaacccgaccaccuuccaccuggacggggaggugaucaccuucgacaaccucaagacgcugcugucccuccgcgaggugcggaccaucaaggucuucaccaccguggacaacaucaaccugcacacgcagguggucgacaugagcaugaccuacggccagcaguucggccccaccuaccuggacggggccgacgugaccaagaucaagccccacaacucccacgagggcaagacguucuacgugcucccgaacgacgacacccugcgcgucgaggccuucgaguacuaccacaccaccgaccccagcuuccuggggcgguacauguccgcccucaaccacacgaagaaguggaaguacccccaggugaacggccugaccagcaucaagugggccgacaacaacugcuaccuggcgaccgcccuccugacccugcagcagaucgagcucaaguucaaccccccggcccugcaggacgccuacuaccgcgcgcgggccggggaggccgccaacuucugcgcccugauccucgcguacugcaacaagacggugggcgagcugggcgacguccgcgagaccauguccuaccuguuccagcacgccaaccucgacagcugcaagcgggugcugaacgucgugugcaagaccugcgggcagcagcagaccacccugaagggcguggaggccgucauguacauggggacgcucuccuacgagcaguucaagaagggcgugcagauccccugcaccugcgggaagcaggccaccaaguaccuggugcagcaggagagccccuucgucaugauguccgcccccccggcgcaguacgagcugaagcacggcaccuucacgugcgccagcgaguacaccggcaacuaccagugcgggcacuacaagcacaucaccuccaaggagacccucuacugcaucgacggcgcccugcugacgaagagcagcgaguacaaggggcccaucaccgacguguucuacaaggagaacuccuacaccaccacgaucaagcccgugaccuacaagcucgacggcgucgugugcaccgagaucgaccccaagcuggacaacuacuacaagaaggacaacagcuacuucaccgagcagccgaucgaccuggugcccaaccagcccuaccccaacgccuccuucgacaacuucaaguucgucugcgacaacaucaaguucgccgacgaccucaaccagcugacgggguacaagaagccggcgagccgcgagcugaaggugaccuucuuccccgaccucaacggcgacguggucgccaucgacuacaagcacuacacccccuccuucaagaagggcgccaagcugcugcacaagcccaucguguggcacgugaacaacgccaccaacaaggcgacguacaagccgaacaccuggugcauccggugccucuggagcaccaagcccgucgagaccuccaacagcuucgacgugcugaaguccgaggacgcccaggggauggacaaccuggccugcgaggaccucaagcccgugagcgaggaggucguggagaaccccacgauccagaaggacgugcuggagugcaacgucaagaccaccgagguggugggcgacaucauccugaagccggccaacaacucccucaagaucaccgaggaggucgggcacacggaccugauggccgcguacguggacaacagcucccugaccaucaagaagcccaacgagcucagccgcgugcugggccugaagacccucgccacccacgggcuggccgccgucaacuccgugcccugggacacgaucgccaacuacgcgaagccguuccugaacaagguggucagcaccaccaccaacaucgugacgcgcugccucaaccgggugugcaccaacuacaugcccuacuucuucacccugcugcuccagcugugcaccuucacccgcuccacgaacagccggaucaaggccuccaugcccaccaccaucgccaagaacaccgucaagagcgugggcaaguucugccuggaggccagcuucaacuaccucaagucccccaacuucagcaagcugaucaacaucaucaucugguuccugcuccuguccgugugccugggcagccucaucuacuccacggccgcgcuggggguccugaugagcaaccucggcaugccguccuacugcaccggguaccgcgagggcuaccugaacagcaccaacgugaccaucgccacguacugcaccggcuccauccccugcagcgugugccuguccgggcucgacagccuggacaccuaccccucccuggagaccauccagaucacgaucagcuccuucaagugggaccucaccgccuucggccuggucgccgagugguuccuggccuacauccucuucacccgguucuucuacgugcuggggcuggcggccaucaugcagcucuucuucagcuacuucgccgugcacuucaucuccaacagcuggcugauguggcugaucaucaaccugguccagauggcccccaucuccgcgauggugcgcauguacaucuucuucgccagcuucuacuacguguggaagagcuacguccacgugguggacggcugcaacuccagcaccugcaugaugugcuacaagcggaaccgcgccacgcgggucgagugcaccaccaucgugaacgggguccgccgguccuucuacguguacgccaacggcggcaagggguucugcaagcuccacaacuggaacugcgugaacugcgacaccuucugcgccggcagcacguucaucuccgacgaggucgcgcgcgaccugagccugcaguucaagcggccgaucaaccccaccgaccaguccagcuacaucguggacuccgugaccgucaagaacgggagcauccaccucuacuucgacaaggccggccagaagaccuacgagcgccacucccugagccacuucgugaaccuggacaaccuccgggccaacaacacgaaggggucccugcccaucaacgugaucgucuucgacggcaagagcaagugcgaggaguccagcgccaaguccgccagcguguacuacucccagcugaugugccagcccauccuccugcuggaccaggcgcucgugagcgacgucggcgacagcgccgagguggccgugaagauguucgacgccuacgucaacaccuucuccagcaccuucaacgugccgauggagaagcugaagacccugguggccacggcggaggccgagcucgccaagaacgucucccuggacaacgugcugagcaccuucaucuccgccgcgcgccagggguucguggacagcgacgucgagaccaaggacgugguggagugccucaagcugucccaccagagcgacaucgaggucaccggcgacuccugcaacaacuacaugcugacguacaacaagguggagaacaugaccccccgggaccucggggccugcaucgacugcagcgcccgccacaucaacgcccagguggccaagucccacaacaucgcgcugaucuggaacgucaaggacuucaugagccuguccgagcagcuccggaagcagauccgcagcgccgccaagaagaacaaccugcccuucaagcugaccugcgccaccacgcgccagguggugaacgucgugaccaccaagaucgcccucaagggcggguga

SEQ ID NO: 17910 - RNA, 5841 nt, Artificial Sequence
  SARS-CoV-2__MT800030.1__non-structural protein 3 (NSP3) CDS gc
auggcccccaccaaggugaccuucggcgacgacacggucaucgaggugcagggguacaagagcgugaacaucaccuucgagcuggacgagcgcaucgacaagguccucaacgagaagugcuccgccuacaccguggagcugggcaccgaggugaacgaguucgcgugcgucguggccgacgccgugaucaagacgcugcagccggucagcgagcuccugaccccccuggggaucgaccucgacgagugguccauggccaccuacuaccuguucgacgagagcggcgaguucaagcuggccucccacauguacugcagcuucuacccccccgacgaggacgaggaggagggggacugcgaggaggaggaguucgagccguccacccaguacgaguacggcacggaggacgacuaccagggcaagccccucgaguucggggcgaccagcgccgcccugcagcccgaggaggagcaggaggaggacuggcuggacgacgacucccagcagaccgugggccagcaggacgggagcgaggacaaccagaccacgaccauccagaccaucguggagguccagccccagcucgagauggagcugaccccgguggugcagacgaucgaggucaacuccuucagcggcuaccugaagcucaccgacaacguguacaucaagaacgccgacaucguggaggaggcgaagaaggucaagcccaccgugguggucaacgccgccaacguguaccugaagcacgggggcggcguggccggggcccugaacaaggcgaccaacaacgccaugcaggucgaguccgacgacuacaucgccacgaacggcccccucaagguggggggcagcugcguccuguccggccacaaccuggccaagcacugccuccacgugguggggcccaacgucaacaagggcgaggacauccagcugcugaagagcgccuacgagaacuucaaccagcacgaggugcuccuggcgccgcugcucuccgccgggaucuucggcgccgaccccaucuacagccugcgggugugcgucgacaccgugcgcaccaacguguaccuggccgucuucgacaagaaccucuacgacaagcugguguccagcuuccuggagaugaagagcgagaagcagguggagcagaagaucgccgagauccccaaggaggaggucaagcccuucaucaccgaguccaagccgagcguggagcagcggaagcaggacgacaagaagaucaaggcgugcguggaggaggucacgaccacccucgaggagaccaaguuccugacggagaaccugcuccuguacaucgacaucaacgggaaccugcaccccgacuccgccacccucgugagcgacaucgacaucaccuuccugaagaaggacgcccccuacaucgugggcgacgucgugcaggagggcgugcugaccgccgucgugauccccacgaagaaggccgggggcaccaccgagaugcucgcgaaggcccugcgcaaggugccgaccgacaacuacaucacgaccuaccccgggcagggccugaacggguacaccgucgaggaggccaagaccgugcucaagaagugcaaguccgccuucuacauccugcccagcaucaucuccaacgagaagcaggagauccugggcaccgugagcuggaaccuccgggagaugcuggcgcacgccgaggagacgcgcaagcugaugcccgucugcguggagaccaaggccaucguguccaccauccagcggaaguacaagggcaucaagauccaggagggggucguggacuacggcgcccgcuucuacuucuacaccagcaagacgaccguggccucccugaucaacacccucaacgaccugaacgagacccuggucacgaugccgcucggguacgugacccacggccugaaccuggaggaggcggcccgguacaugcgcagccucaaggugcccgccaccgucuccgugagcucccccgacgccgugaccgccuacaacggguaccugacgagcuccagcaagacccccgaggagcacuucaucgagaccaucucccuggcgggcagcuacaaggacuggagcuacuccggccagagcacccagcucgggaucgaguuccugaagcggggcgacaaguccgucuacuacacgagcaacccgaccaccuuccaccuggacggggaggugaucaccuucgacaaccucaagacgcugcugucccuccgcgaggugcggaccaucaaggucuucaccaccguggacaacaucaaccugcacacgcagguggucgacaugagcaugaccuacggccagcaguucggccccaccuaccuggacggggccgacgugaccaagaucaagccccacaacucccacgagggcaagacguucuacgugcucccgaacgacgacacccugcgcgucgaggccuucgaguacuaccacaccaccgaccccagcuuccuggggcgguacauguccgcccucaaccacacgaagaaguggaaguacccccaggugaacggccugaccagcaucaagugggccgacaacaacugcuaccuggcgaccgcccuccugacccugcagcagaucgagcucaaguucaaccccccggcccugcaggacgccuacuaccgcgcgcgggccggggaggccgccaacuucugcgcccugauccucgcguacugcaacaagacggugggcgagcugggcgacguccgcgagaccauguccuaccuguuccagcacgccaaccucgacagcugcaagcgggugcugaacgucgugugcaagaccugcgggcagcagcagaccacccugaagggcguggaggccgucauguacauggggacgcucuccuacgagcaguucaagaagggcgugcagauccccugcaccugcgggaagcaggccaccaaguaccuggugcagcaggagagccccuucgucaugauguccgcccccccggcgcaguacgagcugaagcacggcaccuucacgugcgccagcgaguacaccggcaacuaccagugcgggcacuacaagcacaucaccuccaaggagacccucuacugcaucgacggcgcccuguucacgaagagcagcgaguacaaggggcccaucaccgacguguucuacaaggagaacuccuacaccaccacgaucaagcccgugaccuacaagcuggacggcgucgugugcaccgagaucgaccccaagcucgacaacuacuacaagaaggacaacagcuacuucaccgagcagccgaucgaccuggugcccaaccagcccuaccccaacgccuccuucgacaacuucaaguucgucugcgacaacaucaaguucgccgacgaccugaaccagcucacgggguacaagaagccggcgagccgcgagcugaaggugaccuucuuccccgaccugaacggcgacguggucgccaucgacuacaagcacuacacccccuccuucaagaagggcgccaagcuccugcacaagcccaucguguggcacgugaacaacgccaccaacaaggcgacguacaagccgaacaccuggugcauccggugccuguggagcaccaagcccgucgagaccuccaacagcuucgacgugcucaaguccgaggacgcccaggggauggacaaccuggccugcgaggaccugaagcccgugagcgaggaggucguggagaaccccacgauccagaaggacgugcucgagugcaacgucaagaccaccgagguggugggcgacaucauccugaagccggccaacaacucccugaagaucaccgaggaggucgggcacacggaccucauggccgcguacguggacaacagcucccugaccaucaagaagcccaacgagcugagccgcgugcucggccugaagacccuggccacccacgggcucgccgccgucaacuccgugcccugggacacgaucgccaacuacgcgaagccguuccugaacaagguggucagcaccaccaccaacaucgugacgcgcugccugaaccgggugugcaccaacuacaugcccuacuucuucacccuccugcugcagcucugcaccuucacccgcuccacgaacagccggaucaaggccuccaugcccaccaccaucgccaagaacaccgucaagagcgugggcaaguucugccuggaggccagcuucaacuaccugaagucccccaacuucagcaagcucaucaacaucaucaucugguuccugcugcucuccgugugccugggcagccugaucuacuccacggccgcgcucgggguccugaugagcaaccugggcaugccguccuacugcaccggguaccgcgagggcuaccucaacagcaccaacgugaccaucgccacguacugcaccggcuccauccccugcagcgugugccuguccgggcuggacagccucgacaccuaccccucccuggagaccauccagaucacgaucagcuccuucaagugggaccugaccgccuucggccucgucgccgagugguuccuggccuacauccuguucacccgguucuucuacgugcucgggcuggcggccaucaugcagcuguucuucagcuacuucgccgugcacuucaucuccaacagcuggcucauguggcugaucaucaaccugguccagauggcccccaucuccgcgauggugcgcauguacaucuucuucgccagcuucuacuacguguggaagagcuacguccacgugguggacggcugcaacuccagcaccugcaugaugugcuacaagcggaaccgcgccacgcgggucgagugcaccaccaucgugaacgggguccgccgguccuucuacguguacgccaacggcggcaagggguucugcaagcugcacaacuggaacugcgugaacugcgacaccuucugcgccggcagcacguucaucuccgacgaggucgcgcgcgaccucagccugcaguucaagcggccgaucaaccccaccgaccaguccagcuacaucguggacuccgugaccgucaagaacgggagcauccaccuguacuucgacaaggccggccagaagaccuacgagcgccacucccucagccacuucgugaaccuggacaaccugcgggccaacaacacgaaggggucccuccccaucaacgugaucgucuucgacggcaagagcaagugcgaggaguccagcgccaaguccgccagcguguacuacucccagcugaugugccagcccauccugcuccuggaccaggcgcuggugagcgacgucggcgacagcgccgagguggccgugaagauguucgacgccuacgucaacaccuucuccagcaccuucaacgugccgauggagaagcucaagacccugguggccacggcggaggccgagcuggccaagaacgucucccucgacaacgugcugagcaccuucaucuccgccgcgcgccagggguucguggacagcgacgucgagaccaaggacgugguggagugccugaagcucucccaccagagcgacaucgaggucaccggcgacuccugcaacaacuacaugcugacguacaacaagguggagaacaugaccccccgggaccugggggccugcaucgacugcagcgcccgccacaucaacgcccagguggccaagucccacaacaucgcgcucaucuggaacgucaaggacuucaugagccuguccgagcagcugcggaagcagauccgcagcgccgccaagaagaacaaccuccccuucaagcugaccugcgccaccacgcgccagguggugaacgucgugaccaccaagaucgcccugaagggcggguga

SEQ ID NO: 17911 - RNA, 5841 nt, Artificial Sequence
  SARS-CoV-2__MT800047.1__non-structural protein 3 (NSP3) CDS gc
auggcccccaccaaggugaccuucggcgacgacacggucaucgaggugcagggguacaagagcgugaacaucaccuucgagcuggacgagcgcaucgacaagguccucaacgagaagugcuccgccuacaccguggagcugggcaccgaggugaacgaguucgcgugcgucguggccgacgccgugaucaagacgcugcagccggucagcgagcuccugaccccccuggggaucgaccucgacgagugguccauggccaccuacuaccuguucgacgagagcggcgaguucaagcuggccucccacauguacugcagcuucuacccccccgacgaggacgaggaggagggggacugcgaggaggaggaguucgagccguccacccaguacgaguacggcacggaggacgacuaccagggcaagccccucgaguucggggcgaccagcgccgcccugcagcccgaggaggagcaggaggaggacuggcuggacgacgacucccagcagaccgugggccagcaggacgggagcgaggacaaccagaccacgaccauccagaccaucguggagguccagccccagcucgagauggagcugaccccgguggugcagacgaucgaggucaacuccuucagcggcuaccugaagcucaccgacaacguguacaucaagaacgccgacaucguggaggaggcgaagaaggucaagcccaccgugguggucaacgccgccaacguguaccugaagcacgggggcggcguggccggggcccugaacaaggcgaccaacaacgccaugcaggucgaguccgacgacuacaucgccacgaacggcccccucaagguggggggcagcugcguccuguccggccacaaccuggccaagcacugccuccacgugguggggcccaacgucaacaagggcgaggacauccagcugcugaagagcgccuacgagaacuucaaccagcacgaggugcuccuggcgccgcugcucuccgccgggaucuucggcgccgaccccauccacagccugcgggugugcgucgacaccgugcgcaccaacguguaccuggccgucuucgacaagaaccucuacgacaagcugguguccagcuuccuggagaugaagagcgagaagcagguggagcagaagaucgccgagauccccaaggaggaggucaagcccuucaucaccgaguccaagccgagcguggagcagcggaagcaggacgacaagaagaucaaggcgugcguggaggaggucacgaccacccucgaggagaccaaguuccugacggagaaccugcuccuguacaucgacaucaacgggaaccugcaccccgacuccgccacccucgugagcgacaucgacaucaccuuccugaagaaggacgcccccuacaucgugggcgacgucgugcaggagggcgugcugaccgccgucgugauccccacgaagaaggccgggggcaccaccgagaugcucgcgaaggcccugcgcaaggugccgaccgacaacuacaucacgaccuaccccgggcagggccugaacggguacaccgucgaggaggccaagaccgugcucaagaagugcaaguccgccuucuacauccugcccagcaucaucuccaacgagaagcaggagauccugggcaccgugagcuggaaccuccgggagaugcuggcgcacgccgaggagacgcgcaagcugaugcccgucugcguggagaccaaggccaucguguccaccauccagcggaaguacaagggcaucaagauccaggagggggucguggacuacggcgcccgcuucuacuucuacaccagcaagacgaccguggccucccugaucaacacccucaacgaccugaacgagacccuggucacgaugccgcucggguacgugacccacggccugaaccuggaggaggcggcccgguacaugcgcagccucaaggugcccgccaccgucuccgugagcucccccgacgccgugaccgccuacaacggguaccugacgagcuccagcaagacccccgaggagcacuucaucgagaccaucucccuggcgggcagcuacaaggacuggagcuacuccggccagagcacccagcucgggaucgaguuccugaagcggggcgacaaguccgucuacuacacgagcaacccgaccaccuuccaccuggacggggaggugaucaccuucgacaaccucaagacgcugcugucccuccgcgaggugcggaccaucaaggucuucaccaccguggacaacaucaaccugcacacgcagguggucgacaugagcaugaccuacggccagcaguucggccccaccuaccuggacggggccgacgugaccaagaucaagccccacaacucccacgagggcaagacguucuacgugcucccgaacgacgacacccugcgcgucgaggccuucgaguacuaccacaccaccgaccccagcuuccuggggcgguacauguccgcccucaaccacacgaagaaguggaaguacccccaggugaacggccugaccagcaucaagugggccgacaacaacugcuaccuggcgaccgcccuccugacccugcagcagaucgagcucaaguucaaccccccggcccugcaggacgccuacuaccgcgcgcgggccggggaggccgccaacuucugcgcccugauccucgcguacugcaacaagacggugggcgagcugggcgacguccgcgagaccauguccuaccuguuccagcacgccaaccucgacagcugcaagcgggugcugaacgucgugugcaagaccugcgggcagcagcagaccacccugaagggcguggaggccgucauguacauggggacgcucuccuacgagcaguucaagaagggcgugcagauccccugcaccugcgggaagcaggccaccaaguaccuggugcagcaggagagccccuucgucaugauguccgcccccccggcgcaguacgagcugaagcacggcaccuucacgugcgccagcgaguacaccggcaacuaccagugcgggcacuacaagcacaucaccuccaaggagacccucuacugcaucgacggcgcccugcugacgaagagcagcgaguacaaggggcccaucaccgacguguucuacaaggagaacuccuacaccaccacgaucaagcccgugaccuacaagcucgacggcgucgugugcaccgagaucgaccccaagcuggacaacuacuacaagaaggacaacagcuacuucaccgagcagccgaucgaccuggugcccaaccagcccuaccccaacgccuccuucgacaacuucaaguucgucugcgacaacaucaaguucgccgacgaccucaaccagcugacgggguacaagaagccggcgagccgcgagcugaaggugaccuucuuccccgaccucaacggcgacguggucgccaucgacuacaagcacuacacccccuccuucaagaagggcgccaagcugcugcacaagcccaucguguggcacgugaacaacgccaccaacaaggcgacguacaagccgaacaccuggugcauccggugccucuggagcaccaagcccgucgagaccuccaacagcuucgacgugcugaaguccgaggacgcccaggggauggacaaccuggccugcgaggaccucaagcccgugagcgaggaggucguggagaaccccacgauccagaaggacgugcuggagugcaacgucaagaccaccgagguggugggcgacaucauccugaagccggccaacaacucccucaagaucaccgaggaggucgggcacacggaccugauggccgcguacguggacaacagcucccugaccaucaagaagcccaacgagcucagccgcgugcugggccugaagacccucgccacccacgggcuggccgccgucaacuccgugcccugggacacgaucgccaacuacgcgaagccguuccugaacaagguggucagcaccaccaccaacaucgugacgcgcugccucaaccgggugugcaccaacuacaugcccuacuucuucacccugcugcuccagcugugcaccuucacccgcuccacgaacagccggaucaaggccuccaugcccaccaccaucgccaagaacaccgucaagagcgugggcaaguucugccuggaggccagcuucaacuaccucaagucccccaacuucagcaagcugaucaacaucaucaucugguuccugcuccuguccgugugccugggcagccucaucuacuccacggccgcgcuggggguccugaugagcaaccucggcaugccguccuacugcaccggguaccgcgagggcuaccugaacagcaccaacgugaccaucgccacguacugcaccggcuccauccccugcagcgugugccuguccgggcucgacagccuggacaccuaccccucccuggagaccacgcagaucaccaucagcuccuucaagugggaccucaccgccuucggccuggucgccgagugguuccuggccuacauccucuucacccgguucuucuacgugcuggggcuggcggccaucaugcagcucuucuucagcuacuucgccgugcacuucaucuccaacagcuggcugauguggcugaucaucaaccugguccagauggcccccaucuccgcgauggugcgcauguacaucuucuucgccagcuucuacuacguguggaagagcuacguccacgugguggacggcugcaacuccagcacgugcaugaugugcuacaagcggaaccgcgccacccgggucgagugcaccaccaucgugaacgggguccgccgguccuucuacguguacgccaacggcggcaagggguucugcaagcuccacaacuggaacugcgugaacugcgacacguucugcgccggcagcaccuucaucuccgacgaggucgcgcgcgaccugagccugcaguucaagcggccgaucaaccccaccgaccaguccagcuacaucguggacuccgugaccgucaagaacgggagcauccaccucuacuucgacaaggccggccagaagacguacgagcgccacucccugagccacuucgugaaccuggacaaccuccgggccaacaacaccaaggggucccugcccaucaacgugaucgucuucgacggcaagagcaagugcgaggaguccagcgccaaguccgccagcguguacuacucccagcugaugugccagcccauccuccugcuggaccaggcgcucgugagcgacgucggcgacagcgccgagguggccgugaagauguucgacgccuacgucaacaccuucuccagcaccuucaacgugccgauggagaagcugaagacgcugguggccaccgcggaggccgagcucgccaagaacgucucccuggacaacgugcugagcaccuucaucuccgccgcgcgccagggguucguggacagcgacgucgagaccaaggacgugguggagugccucaagcugucccaccagagcgacaucgaggucacgggcgacuccugcaacaacuacaugcugaccuacaacaagguggagaacaugaccccccgggaccucggggccugcaucgacugcagcgcccgccacaucaacgcccagguggccaagucccacaacaucgcgcugaucuggaacgucaaggacuucaugagccuguccgagcagcuccggaagcagauccgcagcgccgccaagaagaacaaccugcccuucaagcugaccugcgccacgacccgccagguggugaacgucgugaccaccaagaucgcccucaagggcggguga

SEQ ID NO: 17912 - RNA, 5841 nt, Artificial Sequence
  SARS-CoV-2__MT800923.1__non-structural protein 3 (NSP3) CDS gc
auggcccccaccaaggugaccuucggcgacgacacggucaucgaggugcagggguacaagagcgugaacaucaccuucgagcuggacgagcgcaucgacaagguccucaacgagaagugcuccgccuacaccguggagcugggcaccgaggugaacgaguucgcgugcgucguggccgacgccgugaucaagacgcugcagccggucagcgagcuccugaccccccuggggaucgaccucgacgagugguccauggccaccuacuaccuguucgacgagagcggcgaguucaagcuggccucccacauguacugcagcuucuacccccccgacgaggacgaggaggagggggacugcgaggaggaggaguucgagccguccacccaguacgaguacggcacggaggacgacuaccagggcaagccccucgaguucggggcgaccagcgccgcccugcagcccgaggaggagcaggaggaggacuggcuggacgacgacucccagcagaccgugggccagcaggacgggagcgaggacaaccagaccacgaccauccagaccaucguggagguccagccccagcucgagauggagcugaccccgguggugcagacgaucgaggucaacuccuucagcggcuaccugaagcucaccgacaacguguacaucaagaacgccgacaucguggaggaggcgaagaaggucaagcccaccgugguggucaacgccgccaacguguaccugaagcacgggggcggcguggccggggcccugaacaaggcgaccaacaacgccaugcaggucgaguccgacgacuacaucgccacgaacggcccccucaagguggggggcagcugcguccuguccggccacaaccuggccaagcacugccuccacgugguggggcccaacgucaacaagggcgaggacauccagcugcugaagagcgccuacgagaacuucaaccagcacgaggugcuccuggcgccgcugcucuccgccgggaucuucggcgccgaccccauccacagccugcgggugugcgucgacaccgugcgcaccaacguguaccuggccgucuucgacaagaaccucuacgacaagcugguguccagcuuccuggagaugaagagcgagaagcagguggagcagaagaucgccgagauccccaaggaggaggucaagcccuucaucaccgaguccaagccgagcguggagcagcggaagcaggacgacaagaagaucaaggcgugcguggaggaggucacgaccacccucgaggagaccaaguuccugacggagaaccugcuccuguacaucgacaucaacgggaaccugcaccccgacuccgccacccucgugagcgacaucgacaucaccuuccugaagaaggacgcccccuacaucgugggcgacgucgugcaggagggcgugcugaccgccgucgugauccccacgaagaaggccgggggcaccaccgagaugcucgcgaaggcccugcgcaaggugccgaccgacaacuacaucacgaccuaccccgggcagggccugaacggguacaccgucgaggaggccaagaccgugcucaagaagugcaaguccgccuucuacauccugcccagcaucaucuccaacgagaagcaggagauccugggcaccgugagcuggaaccuccgggagaugcuggcgcacgccgaggagacgcgcaagcugaugcccgucugcguggagaccaaggccaucguguccaccauccagcggaaguacaagggcaucaagauccaggagggggucguggacuacggcgcccgcuucuacuucuacaccagcaagacgaccguggccucccugaucaacacccucaacgaccugaacgagacccuggucacgaugccgcucggguacgugacccacggccugaaccuggaggaggcggcccgguacaugcgcagccucaaggugcccgccaccgucuccgugagcucccccgacgccgugaccgccuacaacggguaccugacgagcuccagcaagacccccgaggagcacuucaucgagaccaucucccuggcgggcagcuacaaggacuggagcuacuccggccagagcacccagcucgggaucgaguuccugaagcggggcgacaaguccgucuacuacacgagcaacccgaccaccuuccaccuggacggggaggugaucaccuucgacaaccucaagacgcugcugucccuccgcgaggugcggaccaucaaggucuucaccaccguggacaacaucaaccugcacacgcagguggucgacaugagcaugaccuacggccagcaguucggccccaccuaccuggacggggccgacgugaccaagaucaagccccacaacucccacgagggcaagacguucuacgugcucccgaacgacgacacccugcgcgucgaggccuucgaguacuaccacaccaccgaccccagcuuccuggggcgguacauguccgcccucaaccacacgaagaaguggaaguacccccaggugaacggccugaccagcaucaagugggccgacaacaacugcuaccuggcgaccgcccuccugacccugcagcagaucgagcucaaguucaaccccccggcccugcaggacgccuacuaccgcgcgcgggccggggaggccgccaacuucugcgcccugauccucgcguacugcaacaagacggugggcgagcugggcgacguccgcgagaccauguccuaccuguuccagcacgccaaccucgacagcugcaagcgggugcugaacgucgugugcaagaccugcgggcagcagcagaccacccugaagggcguggaggccgucauguacauggggacgcucuccuacgagcaguucaagaagggcgugcagauccccugcaccugcgggaagcaggccaccaaguaccuggugcagcaggagagccccuucgucaugauguccgcccccccggcgcaguacgagcugaagcacggcaccuucacgugcgccagcgaguacaccggcaacuaccagugcgggcacuacaagcacaucaccuccaaggagacccucuacugcaucgacggcgcccugcugacgaagagcagcgaguacaaggggcccaucaccgacguguucuacaaggagaacuccuacaccaccacgaucaagcccgugaccuacaagcucgacggcgucgugugcaccgagaucgaccccaagcuggacaacuacuacaagaaggacaacagcuacuucaccgagcagccgaucgaccuggugcccaaccagcccuaccccaacgccuccuucgacaacuucaaguucgucugcgacaacaucaaguucgccgacgaccucaaccagcugacgggguacaagaagccggcgagccgcgagcugaaggugaccuucuuccccgaccucaacggcgacguggucgccaucgacuacaagcacuacacccccuccuucaagaagggcgccaagcugcugcacaagcccaucguguggcacgugaacaacgccaccaacaaggcgacguacaagccgaacaccuggugcauccggugccucuggagcaccaagcccgucgagaccuccaacagcuucgacgugcugaaguccgaggacgcccaggggauggacaaccuggccugcgaggaccucaagcccgugagcgaggaggucguggagaaccccacgauccagaaggacgugcuggagugcaacgucaagaccaccgagguggugggcgacaucauccugaagccggccaacaacaucaagaucaccgaggaggucgggcacacggaccucauggccgcguacguggacaacuccagccugaccaucaagaagcccaacgagcugucccgcgugcucggccugaagacccuggccacccacgggcucgccgccgucaacagcgugcccugggacacgaucgccaacuacgcgaagccguuccugaacaagguggucuccaccaccaccaacaucgugacgcgcugccugaaccgggugugcaccaacuacaugcccuacuucuucacccuccugcugcagcucugcaccuucacccgcagcacgaacucccggaucaaggccagcaugcccaccaccaucgccaagaacaccgucaaguccgugggcaaguucugccuggaggccagcuucaacuaccugaagagccccaacuucuccaagcucaucaacaucaucaucugguuccugcugcucagcgugugccugggcucccugaucuacagcacggccgcgcucgggguccugauguccaaccugggcaugccgagcuacugcaccggguaccgcgagggcuaccucaacuccaccaacgugaccaucgccacguacugcaccggcagcauccccugcuccgugugccugagcgggcuggacucccucgacaccuaccccagccuggagaccauccagaucacgaucuccagcuucaagugggaccugaccgccuucggccucgucgccgagugguuccuggccuacauccuguucacccgguucuucuacgugcucgggcuggcggccaucaugcagcuguucuucuccuacuucgccgugcacuucaucagcaacuccuggcucauguggcugaucaucaaccugguccagauggcccccaucagcgcgauggugcgcauguacaucuucuucgccuccuucuacuacguguggaagagcuacguccacgugguggacggcugcaacagcuccaccugcaugaugugcuacaagcggaaccgcgccacgcgggucgagugcaccaccaucgugaacgggguccgccggagcuucuacguguacgccaacggcggcaagggguucugcaagcugcacaacuggaacugcgugaacugcgacaccuucugcgccggcuccacguucaucagcgacgaggucgcgcgcgaccucucccugcaguucaagcggccgaucaaccccaccgaccagagcuccuacaucguggacagcgugaccgucaagaacggguccauccaccuguacuucgacaaggccggccagaagaccuacgagcgccacagccucucccacuucgugaaccuggacaaccugcgggccaacaacacgaaggggagccuccccaucaacgugaucgucuucgacggcaaguccaagugcgaggagagcuccgccaagagcgccuccguguacuacagccagcugaugugccagcccauccugcuccuggaccaggcgcugguguccgacgucggcgacagcgccgagguggccgugaagauguucgacgccuacgucaacaccuucagcuccaccuucaacgugccgauggagaagcucaagacccugguggccacggcggaggccgagcuggccaagaacgucagccucgacaacgugcuguccaccuucaucagcgccgcgcgccagggguucguggacuccgacgucgagaccaaggacgugguggagugccugaagcucagccaccaguccgacaucgaggucaccggcgacagcugcaacaacuacaugcugacguacaacaagguggagaacaugaccccccgggaccugggggccugcaucgacugcuccgcccgccacaucaacgcccagguggccaagagccacaacaucgcgcucaucuggaacgucaaggacuucaugucccugagcgagcagcugcggaagcagauccgcuccgccgccaagaagaacaaccuccccuucaagcugaccugcgccaccacgcgccagguggugaacgucgugaccaccaagaucgcccugaagggcgggaaguga

SEQ ID NO: 17913 - RNA, 5841 nt, Artificial Sequence
  SARS-CoV-2__MT797764.1__non-structural protein 3 (NSP3) CDS gc
auggcccccaccaaggugaccuucggcgacgacacggucaucgaggugcagggguacaagagcgugaacaucaccuucgagcuggacgagcgcaucgacaagguccucaacgagaagugcuccgccuacaccguggagcugggcaccgaggugaacgaguucgcgugcgucguggccgacgccgugaucaagacgcugcagccggucagcgagcuccugaccccccuggggaucgaccucgacgagugguccauggccaccuacuaccuguucgacgagagcggcgaguucaagcuggccucccacauguacugcagcuucuacccccccgacgaggacgaggaggagggggacugcgaggaggaggaguucgagccguccacccaguacgaguacggcacggaggacgacuaccagggcaagccccucgaguucggggcgaccagcgccgcccugcagcccgaggaggagcaggaggaggacuggcuggacgacgacucccagcagaccgugggccagcaggacgggagcgaggacaaccagaccacgaccauccagaccaucguggagguccagccccagcucgagauggagcugaccccgguggugcagacgaucgaggucaacuccuucagcggcuaccugaagcucaccgacaacguguacaucaagaacgccgacaucguggaggaggcgaagaaggucaagcccaccgugguggucaacgccgccaacguguaccugaagcacgggggcggcguggccggggcccugaacaaggcgaccaacaacgccaugcaggucgaguccgacgacuacaucgccacgaacggcccccucaagguggggggcagcugcguccuguccggccacaaccuggccaagcacugccuccacgugguggggcccaacgucaacaagggcgaggacauccagcugcugaagagcgccuacgagaacuucaaccagcacgaggugcuccuggcgccgcugcucuccgccgggaucuucggcgccgaccccauccacagccugcgggugugcgucgacaccgugcgcaccaacguguaccuggccgucuucgacaagaaccucuacgacaagcugguguccagcuuccuggagaugaagagcgagaagcagguggagcagaagaucgccgagauccccaaggaggaggucaagcccuucaucaccgaguccaagccgagcguggagcagcggaagcaggacgacaagaagaucaaggcgugcguggaggaggucacgaccacccucgaggagaccaaguuccugacggagaaccugcuccuguacaucgacaucaacgggaaccugcaccccgacuccgccacccucgugagcgacaucgacaucaccuuccugaagaaggacgcccccuacaucgugggcgacgucgugcaggagggcgugcugaccgccgucgugauccccacgaagaaggccgggggcaccaccgagaugcucgcgaaggcccugcgcaaggugccgaccgacaacuacaucacgaccuaccccgggcagggccugaacggguacaccgucgaggaggccaagaccgugcucaagaagugcaaguccgccuucuacauccugcccagcaucaucuccaacgagaagcaggagauccugggcaccgugagcuggaaccuccgggagaugcuggcgcacgccgaggagacgcgcaagcugaugcccgucugcguggagaccaaggccaucguguccaccauccagcggaaguacaagggcaucaagauccaggagggggucguggacuacggcgcccgcuucuacuucuacaccagcaagacgaccguggccucccugaucaacacccucaacgaccugaacgagacccuggucacgaugccgcucggguacgugacccacggccugaaccuggaggaggcggcccgguacaugcgcagccucaaggugcccgccaccgucuccgugagcucccccgacgccgugaccgccuacaacggguaccugacgagcuccagcaagacccccgaggagcacuucaucgagaccaucucccuggcgggcagcuacaaggacuggagcuacuccggccagagcacccagcucgggaucgaguuccugaagcggggcgacaaguccgucuacuacacgagcaacccgaccaccuuccaccuggacggggaggugaucaccuucgacaaccucaagacgcugcugucccuccgcgaggugcggaccaucaaggucuucaccaccguggacaacaucaaccugcacacgcagguggucgacaugagcaugaccuacggccagcaguucggccccaccuaccuggacggggccgacgugaccaagaucaagccccacaacucccacgagggcaagacguucuacgugcucccgaacgacgacacccugcgcgucgaggccuucgaguacuaccacaccaccgaccccagcuuccuggggcgguacauguccgcccucaaccacacgaagaaguggaaguacccccaggugaacggccugaccagcaucaagugggccgacaacaacugcuaccuggcgaccgcccuccugacccugcagcagaucgagcucaaguucaaccccccggcccugcaggacgccuacuaccgcgcgcgggccggggaggccgccaacuucugcgcccugauccucgcguacugcaacaagacggugggcgagcugggcgacguccgcgagaccauguccuaccuguuccagcacgccaaccucgacagcugcaagcgggugcugaacgucgugugcaagaccugcgggcagcagcagaccacccugaagggcguggaggccgucauguacauggggacgcucuccuacgagcaguucaagaagggcgugcagauccccugcaccugcgggaagcaggccaccaaguaccuggugcagcaggagagccccuucgucaugauguccgcccccccggcgcaguacgagcugaagcacggcaccuucacgugcgccagcgaguacaccggcaacuaccagugcgggcacuacaagcacaucaccuccaaggagacccucuacugcaucgacggcgcccugcugacgaagagcagcgaguacaaggggcccaucaccgacguguucuacaaggagaacuccuacaccaccacgaucaagcccgugaccuacaagcucgacggcgucgugugcaccgagaucgaccccaagcuggacgacuacuacaagaaggacaacagcuacuucaccgagcagccgaucgaccuggugcccaaccagcccuaccccaacgccuccuucgacaacuucaaguucgucugcgacaacaucaaguucgccgacgaccucaaccagcugacgggguacaagaagccggcgagccgcgagcugaaggugaccuucuuccccgaccucaacggcgacguggucgccaucgacuacaagcacuacacccccuccuucaagaagggcgccaagcugcugcacaagcccaucguguggcacgugaacaacgccaccaacaaggcgacguacaagccgaacaccuggugcauccggugccucuggagcaccaagcccgucgagaccuccaacagcuucgacgugcugaaguccgaggacgcccaggggauggacaaccuggccugcgaggaccucaagcccgugagcgaggaggucguggagaaccccacgauccagaaggacgugcuggagugcaacgucaagaccaccgagguggugggcgacaucauccugaagccggccaacaacucccucaagaucaccgaggaggucgggcacacggaccugauggccgcguacguggacaacagcucccugaccaucaagaagcccaacgagcucagccgcgugcugggccugaagacccucgccacccacgggcuggccgccgucaacuccgugcccugggacacgaucgccaacuacgcgaagccguuccugaacaagguggucagcaccaccaccaacaucgugacgcgcugccucaaccgggugugcaccaacuacaugcccuacuucuucacccugcugcuccagcugugcaccuucacccgcuccacgaacagccggaucaaggccuccaugcccaccaccaucgccaagaacaccgucaagagcgugggcaaguucugccuggaggccagcuucaacuaccucaagucccccaacuucagcaagcugaucaacaucaucaucugguuccugcuccuguccgugugccugggcagccucaucuacuccacggccgcgcuggggguccugaugagcaaccucggcaugccguccuacugcaccggguaccgcgagggcuaccugaacagcaccaacgugaccaucgccacguacugcaccggcuccauccccugcagcgugugccuguccgggcucgacagccuggacaccuaccccucccuggagaccauccagaucacgaucagcuccuucaagugggaccucaccgccuucggccuggucgccgagugguuccuggccuacauccucuucacccgguucuucuacgugcuggggcuggcggccaucaugcagcucuucuucagcuacuucgccgugcacuucaucuccaacagcuggcugauguggcugaucaucaaccugguccagauggcccccaucuccgcgauggugcgcauguacaucuucuucgccagcuucuacuacguguggaagagcuacguccacgugguggacggcugcaacuccagcaccugcaugaugugcuacaagcggaaccgcgccacgcgggucgagugcaccaccaucgugaacgggguccgccgguccuucuacguguacgccaacggcggcaagggguucugcaagcuccacaacuggaacugcgugaacugcgacaccuucugcgccggcagcacguucaucuccgacgaggucgcgcgcgaccugagccugcaguucaagcggccgaucaaccccaccgaccaguccagcuacaucguggacuccgugaccgucaagaacgggagcauccaccucuacuucgacaaggccggccagaagaccuacgagcgccacucccugagccacuucgugaaccuggacaaccuccgggccaacaacacgaaggggucccugcccaucaacgugaucgucuucgacggcaagagcaagugcgaggaguccagcgccaaguccgccagcguguacuacucccagcugaugugccagcccauccuccugcuggaccaggcgcucgugagcgacgucggcgacagcgccgagguggccgugaagauguucgacgccuacgucaacaccuucuccagcaccuucaacgugccgauggagaagcugaagacccugguggccacggcggaggccgagcucgccaagaacgucucccuggacaacgugcugagcaccuucaucuccgccgcgcgccagggguucguggacagcgacgucgagaccaaggacgugguggagugccucaagcugucccaccagagcgacaucgaggucaccggcgacuccugcaacaacuacaugcugacguacaacaagguggagaacaugaccccccgggaccucggggccugcaucgacugcagcgcccgccacaucaacgcccagguggccaagucccacaacaucgcgcugaucuggaacgucaaggacuucaugagccuguccgagcagcuccggaagcagauccgcagcgccgccaagaagaacaaccugcccuucaagcugaccugcgccaccacgcgccagguggugaacgucgugaccaccaagaucgcccucaagggcggguga

SEQ ID NO: 17914 - RNA, 5841 nt, Artificial Sequence
  SARS-CoV-2__MT797765.1__non-structural protein 3 (NSP3) CDS gc
auggcccccaccaaggugaccuucggcgacgacacggucaucgaggugcagggguacaagagcgugaacaucaccuucgagcuggacgagcgcaucgacaagguccucaacgagaagugcuccgccuacaccguggagcugggcaccgaggugaacgaguucgcgugcgucguggccgacgccgugaucaagacgcugcagccggucagcgagcuccugaccccccuggggaucgaccucgacgagugguccauggccaccuacuaccuguucgacgagagcggcgaguucaagcuggccucccacauguacugcagcuucuacccccccgacgaggacgaggaggagggggacugcgaggaggaggaguucgagccguccacccaguacgaguacggcacggaggacgacuaccagggcaagccccucgaguucggggcgaccagcgccgcccugcagcuggaggaggagcaggaggaggacuggcucgacgacgacucccagcagaccgugggccagcaggacgggagcgaggacaaccagaccacgaccauccagaccaucguggagguccagccccagcuggagauggagcugacccccguggugcagacgaucgaggucaacuccuucagcggcuaccucaagcugaccgacaacguguacaucaagaacgccgacaucguggaggaggcgaagaaggucaagccgaccgugguggucaacgccgccaacguguaccugaagcacgggggcggcguggccggggcccucaacaaggcgaccaacaacgccaugcaggucgaguccgacgacuacaucgccacgaacggcccccugaagguggggggcagcugcguccuguccggccacaaccucgccaagcacugccugcacgugguggggcccaacgucaacaagggcgaggacauccagcugcucaagagcgccuacgagaacuucaaccagcacgaggugcugcuggcgccccuccuguccgccgggaucuucggcgccgacccgauccacagccugcgggugugcgucgacaccgugcgcaccaacguguaccucgccgucuucgacaagaaccuguacgacaagcugguguccagcuuccucgagaugaagagcgagaagcagguggagcagaagaucgccgagauccccaaggaggaggucaagcccuucaucaccgaguccaagcccagcguggagcagcggaagcaggacgacaagaagaucaaggcgugcguggaggaggucacgaccacccuggaggagaccaaguuccugacggagaaccuccugcuguacaucgacaucaacgggaaccuccacccggacuccgccacccuggugagcgacaucgacaucaccuuccugaagaaggacgcccccuacaucgugggcgacgucgugcaggagggcgugcucaccgccgucgugauccccacgaagaaggccgggggcaccaccgagaugcuggcgaaggcccugcgcaaggugcccaccgacaacuacaucacgaccuacccggggcagggccucaacggguacaccgucgaggaggccaagaccgugcugaagaagugcaaguccgccuucuacauccugcccagcaucaucuccaacgagaagcaggagauccucggcaccgugagcuggaaccugcgggagaugcuggcgcacgccgaggagacgcgcaagcugaugcccgucugcguggagaccaaggccaucguguccaccauccagcggaaguacaagggcaucaagauccaggagggggucguggacuacggcgcccgcuucuacuucuacaccagcaagacgaccguggccucccucaucaacacccugaacgaccugaacgagacccucgucacgaugccccugggguacgugacccacggccugaaccucgaggaggcggcccgguacaugcgcagccugaaggugccggccaccgucuccgugagcucccccgacgccgugaccgccuacaacggguaccugacgagcuccagcaagacccccgaggagcacuucaucgagaccaucucccucgcgggcagcuacaaggacuggagcuacuccggccagagcacccagcuggggaucgaguuccugaagcggggcgacaaguccgucuacuacacgagcaaccccaccaccuuccaccucgacggggaggugaucaccuucgacaaccugaagacgcugcucucccugcgcgaggugcggaccaucaaggucuucaccaccguggacaacaucaaccugcacacgcagguggucgacaugagcaugaccuacggccagcaguucggcccgaccuaccucgacggggccgacgugaccaagaucaagccccacaacucccacgagggcaagacguucuacgugcugcccaacgacgacacccugcgcgucgaggccuucgaguacuaccacaccaccgacccgagcuuccucgggcgguacauguccgcccugaaccacacgaagaaguggaaguacccccaggugaacggccugaccagcaucaagugggccgacaacaacugcuaccucgcgaccgcccugcugacccuccagcagaucgagcugaaguucaacccccccgcccugcaggacgccuacuaccgcgcgcgggccggggaggccgccaacuucugcgcccucauccuggcguacugcaacaagacggugggcgagcugggcgacguccgcgagaccauguccuaccucuuccagcacgccaaccuggacagcugcaagcgggugcugaacgucgugugcaagaccugcgggcagcagcagaccacccucaagggcguggaggccgucauguacauggggacgcuguccuacgagcaguucaagaagggcgugcagaucccgugcaccugcgggaagcaggccaccaaguaccuggugcagcaggagagccccuucgucaugauguccgccccccccgcgcaguacgagcucaagcacggcaccuucacgugcgccagcgaguacaccggcaacuaccagugcgggcacuacaagcacaucaccuccaaggagacccuguacugcaucgacggcgcccugcucacgaagagcagcgaguacaaggggccgaucaccgacguguucuacaaggagaacuccuacaccaccacgaucaagcccgugaccuacaagcuggacggcgucgugugcaccgagaucgaccccaagcuggacaacuacuacaagaaggacaacagcuacuucaccgagcagcccaucgaccucgugccgaaccagcccuaccccaacgccuccuucgacaacuucaaguucgucugcgacaacaucaaguucgccgacgaccugaaccagcugacgggguacaagaagcccgcgagccgcgagcucaaggugaccuucuucccggaccugaacggcgacguggucgccaucgacuacaagcacuacacccccuccuucaagaagggcgccaagcugcuccacaagcccaucguguggcacgugaacaacgccaccaacaaggcgacguacaagcccaacaccuggugcauccggugccuguggagcaccaagccggucgagaccuccaacagcuucgacgugcugaaguccgaggacgcccaggggauggacaaccucgccugcgaggaccugaagcccgugagcgaggaggucguggagaaccccacgauccagaaggacgugcuggagugcaacgucaagaccaccgagguggugggcgacaucauccucaagcccgccaacaacucccugaagaucaucgaggaggucgggcacaccgaccugauggccgcguacguggacaacagcucccucacgaucaagaagccgaacgagcugagccgcgugcugggccucaagacccuggccacccacgggcuggccgccgucaacuccgugcccugggacaccaucgccaacuacgcgaagcccuuccucaacaagguggucagcacgaccaccaacaucgugacccgcugccugaaccgggugugcacgaacuacaugccguacuucuucacccugcuccugcagcugugcaccuucacccgcuccaccaacagccggaucaaggccuccaugcccacgaccaucgccaagaacaccgucaagagcgugggcaaguucugccucgaggccagcuucaacuaccugaagucccccaacuucagcaagcugaucaacaucaucaucugguuccuccugcuguccgugugccucggcagccugaucuacuccaccgccgcgcuggggguccucaugagcaaccugggcaugcccuccuacugcacgggguaccgcgagggcuaccugaacagcaccaacgugaccaucgccaccuacugcacgggcuccaucccgugcagcgugugccucuccgggcuggacagccuggacaccuaccccucccucgagaccauccagaucaccaucagcuccuucaagugggaccugacggccuucggccuggucgccgagugguuccucgccuacauccuguucacccgguucuucuacgugcuggggcucgcggccaucaugcagcuguucuucagcuacuucgccgugcacuucaucuccaacagcuggcugauguggcugaucaucaaccucguccagauggcccccaucuccgcgauggugcgcauguacaucuucuucgccagcuucuacuacguguggaagagcuacguccacgugguggacggcugcaacuccagcaccugcaugaugugcuacaagcggaaccgcgccacccgggucgagugcacgaccaucgugaacgggguccgccgguccuucuacguguacgccaacggcggcaagggguucugcaagcugcacaacuggaacugcgugaacugcgacaccuucugcgccggcagcaccuucaucuccgacgaggucgcgcgcgaccugagccuccaguucaagcggcccaucaacccgacggaccaguccagcuacaucguggacuccgugaccgucaagaacgggagcauccaccuguacuucgacaaggccggccagaagaccuacgagcgccacucccugagccacuucgugaaccucgacaaccugcgggccaacaacaccaaggggucccugcccaucaacgugaucgucuucgacggcaagagcaagugcgaggaguccagcgccaaguccgccagcguguacuacucccagcucaugugccagcccauccugcugcucgaccaggcgcuggugagcgacgucggcgacagcgccgagguggccgugaagauguucgacgccuacgucaacacguucuccagcaccuucaacgugcccauggagaagcugaagacccucguggccaccgcggaggccgagcuggccaagaacgucucccuggacaacgugcucagcacguucaucuccgccgcgcgccagggguucguggacagcgacgucgagaccaaggacgugguggagugccugaagcugucccaccagagcgacaucgaggucaccggcgacuccugcaacaacuacaugcucaccuacaacaagguggagaacaugacgccgcgggaccugggggccugcaucgacugcagcgcccgccacaucaacgcccagguggccaagucccacaacaucgcgcugaucuggaacgucaaggacuucaugagccucuccgagcagcugcggaagcagauccgcagcgccgccaagaagaacaaccugcccuucaagcucaccugcgccaccacccgccagguggugaacgucgugacgaccaagaucgcccugaagggcggguga

SEQ ID NO: 17915 - RNA, 5841 nt, Artificial Sequence
  SARS-CoV-2__MT791880.1__non-structural protein 3 (NSP3) CDS gc
auggcccccaccaaggugaccuucggcgacgacacggucaucgaggugcagggguacaagagcgugaacaucaccuucgagcuggacgagcgcaucgacaagguccucaacgagaagugcuccgccuacaccguggagcugggcaccgaggugaacgaguucgcgugcgucguggccgacgccgugaucaagacgcugcagccggucagcgagcuccugaccccccuggggaucgaccucgacgagugguccauggccaccuacuaccuguucgacgagagcggcgaguucaagcuggccucccacauguacugcagcuucuacccccccgacgaggacgaggaggagggggacugcgaggaggaggaguucgagccguccacccaguacgaguacggcacggaggacgacuaccagggcaagccccucgaguucggggcgaccagcgccgcccugcagcccgaggaggagcaggaggaggacuggcuggacgacgacucccagcagaccgugggccagcaggacgggagcgaggacaaccagaccacgaccauccagaccaucguggagguccagccccagcucgagauggagcugaccccgguggugcagacgaucgaggucaacuccuucagcggcuaccugaagcucaccgacaacguguacaucaagaacgccgacaucguggaggaggcgaagaaggucaagcccaccgugguggucaacgccgccaacguguaccugaagcacgggggcggcguggccggggcccugaacaaggcgaccaacaacgccaugcaggucgaguccgacgacuacaucgccacgaacggcccccucaagguggggggcagcugcguccuguccggccacaaccuggccaagcacugccuccacgugguggggcccaacgucaacaagggcgaggacauccagcugcugaagagcgccuacgagaacuucaaccagcacgaggugcuccuggcgccgcugcucuccgccgggaucuucggcgccgaccccauccacagccugcgggugugcgucgacaccgugcgcaccaacguguaccuggccgucuucgacaagaaccucuacgacaagcugguguccagcuuccuggagaugaagagcgagaagcagguggagcagaagaucgccgagauccccaaggaggaggucaagcccuucaucaccgaguccaagccgagcguggagcagcggaagcaggacgacaagaagaucaaggcgugcguggaggaggucacgaccacccucgaggagaccaaguuccugacggagaaccugcuccuguacaucgacaucaacgggaaccugcaccccgacuccgccacccucgugagcgacaucgacaucaccuuccugaagaaggacgcccccuacaucgugggcgacgucgugcaggagggcgugcugaccgccgucgugauccccacgaagaaggccgggggcaccaccgagaugcucgcgaaggcccugcgcaaggugccgaccgacaacuacaucacgaccuaccccgggcagggccugaacggguacaccgucgaggaggccaagaccgugcucaagaagugcaaguccgccuucuacauccugcccagcaucaucuccaacgagaagcaggagauccugggcaccgugagcuggaaccuccgggagaugcuggcgcacgccgaggagacgcgcaagcugaugcccgucugcguggagaccaaggccaucguguccaccauccagcggaaguacaagggcaucaagauccaggagggggucguggacuacggcgcccgcuucuacuucuacaccagcaagacgaccguggccucccugaucaacacccucaacgaccugaacgagacccuggucacgaugccgcucggguacgugacccacggccugaaccuggaggaggcggcccgguacaugcgcagccucaaggugcccgccaccgucuccgugagcucccccgacgccgugaccgccuacaacggguaccugacgagcuccagcaagacccccgaggagcacuucaucgagaccaucucccuggcgggcagcuacaaggacuggagcuacuccggccagagcacccagcucgggaucgaguuccugaagcggggcgacaaguccgucuacuacacgagcaacccgaccaccuuccaccuggacggggaggugaucaccuucgacaaccucaagacgcugcugucccuccgcgaggugcggaccaucaaggucuucaccaccguggacaacaucaaccugcacacgcagguggucgacaugagcaugaccuacggccagcaguucggccccaccuaccuggacggggccgacgugaccaagaucaagccccacaacucccacgagggcaagacguucuacgugcucccgaacgacgacacccugcgcgucgaggccuucgaguacuaccacaccaccgaccccagcuuccuggggcgguacauguccgcccucaaccacacgaagaaguggaaguacccccaggugaacggccugaccagcaucaagugggccgacaacaacugcuaccuggcgaccgcccuccugacccugcagcagaucgagcucaaguucaaccccccggcccugcaggacgccuacuaccgcgcgcgggccggggaggccgccaacuucugcgcccugauccucgcguacugcaacaagacggugggcgagcugggcgacguccgcgagaccauguccuaccuguuccagcacgccaaccucgacagcugcaagcgggugcugaacgucgugugcaagaccugcgggcagcagcagaccacccugaagggcguggaggccgucauguacauggggacgcucuccuacgagcaguucaagaagggcgugcagauccccugcaccugcgggaagcaggccaccaaguaccuggugcagcaggagagccccuucgucaugauguccgcccccccggcgcaguacgagcugaagcacggcaccuucacgugcgccagcgaguacaccggcaacuaccagugcgggcacuacaagcacaucaccuccaaggagacccucuacugcaucgacggcgcccugcugacgaagagcagcgaguacaaggggcccaucaccgacguguucuacaaggagaacuccuacaccaccacgaucaagcccgugaccuacaagcucgacggcgucgugugcaccgagaucgaccccaagcuggacaacuacuacaagaaggacaacagcuacuucaccgagcagccgaucgaccuggugcccaaccagcccuaccccaacgccuccuucgacaacuucaaguucgucugcgacaacaucaaguucgccgacgaccucaaccagcugacgggguacaagaagccggcgagccgcgagcugaaggugaccuucuuccccgaccucaacggcgacguggucgccaucgacuacaagcacuacacccccuccuucaagaagggcgccaagcugcugcacaagcccaucguguggcacgugaacaacgccaccaacaaggcgacguacaagccgaacaccuggugcauccggugccucuggagcaccaagcccgucgagaccuccaacagcuucgacgugcugaaguccgaggacgcccaggggauggacaaccuggccugcgaggaccucaagcccgugagcgaggaggucguggagaaccccacgauccagaaggacgugcuggagugcaacgucaagaccaccgagguggugggcgacaucauccugaagccggccaacaacucccucaagaucaccgaggaggucgggcacacggaccugauggccgcguacguggacaacagcucccugaccaucaagaagcccaacgagcucagccgcgugcugggccugaagacccucgccacccacgggcuggccgccgucaacuccgugcccugggacacgaucgccaacuacgcgaagccguuccugaacaagguggucagcaccaccaccaacaucgugacgcgcugccucaaccgggugugcaccaacuacaugcccuacuucuucacccugcugcuccagcugugcaccuucacccgcuccacgaacagccggaucaaggccuccaugcccaccaccaucgccaagaacaccgucaagagcgugggcaaguucugccuggaggccagcuucaacuaccucaagucccccaacuucagcaagcugaucaacaucaucaucugguuccugcuccuguccgugugccugggcagccucaucuacuccacggccgcgcuggggguccugaugagcaaccucggcaugccguccuacugcaccggguaccgcgagggcuaccugaacagcaccaacgugaccaucgccacguacugcaccggcuccauccccugcagcgugugccuguccgggcucgacagccuggacaccuaccccucccuggagaccauccagaucacgaucagcuccuucaagugggaccucaccgccuucggccuggucgccgagugguuccuggccuacauccucuucacccgguucuucuacgugcuggggcuggcggccaucaugcagcucuucuucagcuacuucgccgugcacuucaucuccaacagcuggcugauguggcugaucaucaaccugguccagauggcccccaucuccgcgauggugcgcauguacaucuucuucgccagcuucuacuacguguggaagagcuacguccacgugguggacggcugcaacuccagcaccugcaugaugugcuacaagcggaaccgcgccacgcgggucgagugcaccaccaucgugaacgggguccgccgguccuucuacguguacgccaacggcggcaagggguucugcaagcuccacaacuggaacugcgugaacugcgacaccuucuacgccggcagcacguucaucuccgacgaggucgcgcgcgaccugagccugcaguucaagcggccgaucaaccccaccgaccaguccagcuacaucguggacuccgugaccgucaagaacgggagcauccaccucuacuucgacaaggccggccagaagaccuacgagcgccacucccugagccacuucgugaaccuggacaaccuccgggccaacaacacgaaggggucccugcccaucaacgugaucgucuucgacggcaagagcaagugcgaggaguccagcgccaaguccgccagcguguacuacucccagcugaugugccagcccauccuccugcuggaccaggcgcucgugagcgacgucggcgacagcgccgagguggccgugaagauguucgacgccuacgucaacaccuucuccagcaccuucaacgugccgauggagaagcugaagacccugguggccacggcggaggccgagcucgccaagaacgucucccuggacaacgugcugagcaccuucaucuccgccgcgcgccagggguucguggacagcgacgucgagaccaaggacgugguggagugccucaagcugucccaccagagcgacaucgaggucaccggcgacuccugcaacaacuacaugcugacguacaacaagguggagaacaugaccccccgggaccucggggccugcaucgacugcagcgcccgccacaucaacgcccagguggccaagucccacaacaucgcgcugaucuggaacgucaaggacuucaugagccuguccgagcagcuccggaagcagauccgcagcgccgccaagaagaacaaccugcccuucaagcugaccugcgccaccacgcgccagguggugaacgucgugaccaccaagaucgcccucaagggcggguga

SEQ ID NO: 17916 - RNA, 5841 nt, Artificial Sequence
  SARS-CoV-2__MT791915.1__non-structural protein 3 (NSP3) CDS gc
auggcccccaccaaggugaccuucggcgacgacacggucaucgaggugcagggguacaagagcgugaacaucaccuucgagcuggacgagcgcaucgacaagguccucaacgagaagugcuccgccuacaccguggagcugggcaccgaggugaacgaguucgcgugcgucguggccgacgccgugaucaagacgcugcagccggucagcgagcuccugaccccccuggggaucgaccucgacgagugguccauggccaccuacuaccuguucgacgagagcggcgaguucaagcuggccucccacauguacugcagcuucuacccccccgacgaggacgaggaggagggggacugcgaggaggaggaguucgagccguccacccaguacgaguaccggacggaggacgacuaccagggcaagccccucgaguucggcgcgaccagcgccgcccugcagcccgaggaggagcaggaggaggacuggcuggacgacgacucccagcagaccguggggcagcaggacggcagcgaggacaaccagaccacgaccauccagaccaucguggagguccagccccagcucgagauggagcugaccccgguggugcagacgaucgaggucaacuccuucagcggguaccugaagcucaccgacaacguguacaucaagaacgccgacaucguggaggaggcgaagaaggucaagcccaccgugguggucaacgccgccaacguguaccugaagcacggcgggggcguggccggcgcccugaacaaggcgaccaacaacgccaugcaggucgaguccgacgacuacaucgccacgaacgggccccucaaggugggcgggagcugcguccuguccggccacaaccuggccaagcacugccuccacguggugggccccaacgucaacaagggggaggacauccagcugcugaagagcgccuacgagaacuucaaccagcacgaggugcuccuggcgccgcugcucuccgccggcaucuucggggccgaccccauccacagccugcgcgugugcgucgacaccgugcggaccaacguguaccuggccgucuucgacaagaaccucuacgacaagcugguguccagcuuccuggagaugaagagcgagaagcagguggagcagaagaucgccgagauccccaaggaggaggucaagcccuucaucaccgaguccaagccgagcguggagcagcgcaagcaggacgacaagaagaucaaggcgugcguggaggaggucacgaccacccucgaggagaccaaguuccugacggagaaccugcuccuguacaucgacaucaacggcaaccugcaccccgacuccgccacccucgugagcgacaucgacaucaccuuccugaagaaggacgcccccuacaucgugggggacgucgugcaggagggcgugcugaccgccgucgugauccccacgaagaaggccggcgggaccaccgagaugcucgcgaaggcccugcggaaggugccgaccgacaacuacaucacgaccuaccccggccaggggcugaacggcuacaccgucgaggaggccaagaccgugcucaagaagugcaaguccgccuucuacauccugcccagcaucaucuccaacgagaagcaggagauccuggggaccgugagcuggaaccuccgcgagaugcuggcgcacgccgaggagacgcggaagcugaugcccgucugcguggagaccaaggccaucguguccaccauccagcgcaaguacaagggcaucaagauccaggagggcgucguggacuacggggcccgguucuacuucuacaccagcaagacgaccguggccucccugaucaacacccucaacgaccugaacgagacccuggucacgaugccgcucggcuacgugacccacgggcugaaccuggaggaggcggcccgcuacaugcggagccucaaggugcccgccaccgucuccgugagcucccccgacgccgugaccgccuacaacggcuaccugacgagcuccagcaagacccccgaggagcacuucaucgagaccaucucccuggcggggagcuacaaggacuggagcuacuccggccagagcacccagcucggcaucgaguuccugaagcgcggggacaaguccgucuacuacacgagcaacccgaccaccuuccaccuggacggcgaggugaucaccuucgacaaccucaagacgcugcugucccuccgggaggugcgcaccaucaaggucuucaccaccguggacaacaucaaccugcacacgcagguggucgacaugagcaugaccuacgggcagcaguucggccccaccuaccuggacggcgccgacgugaccaagaucaagccccacaacucccacgaggggaagacguucuacgugcucccgaacgacgacacccugcgggucgaggccuucgaguacuaccacaccaccgaccccagcuuccugggccgcuacauguccgcccucaaccacacgaagaaguggaaguacccccaggugaacgggcugaccagcaucaagugggccgacaacaacugcuaccuggcgaccgcccuccugacccugcagcagaucgagcucaaguucaaccccccggcccugcaggacgccuacuaccgggcgcgcgccggcgaggccgccaacuucugcgcccugauccucgcguacugcaacaagacggugggggagcugggcgacguccgggagaccauguccuaccuguuccagcacgccaaccucgacagcugcaagcgcgugcugaacgucgugugcaagaccugcggccagcagcagaccacccugaaggggguggaggccgucauguacaugggcacgcucuccuacgagcaguucaagaagggggugcagauccccugcaccugcggcaagcaggccaccaaguaccuggugcagcaggagagccccuucgucaugauguccgcccccccggcgcaguacgagcugaagcacgggaccuucacgugcgccagcgaguacaccggcaacuaccagugcggccacuacaagcacaucaccuccaaggagacccucuacugcaucgacggggcccugcugacgaagagcagcgaguacaagggccccaucaccgacguguucuacaaggagaacuccuacaccaccacgaucaagcccgugaccuacaagcucgacggggucgugugcaccgagaucgaccccaagcuggacaacuacuacaagaaggacaacagcuacuucaccgagcagccgaucgaccuggugcccaaccagcccuaccccaacgccuccuucgacaacuucaaguucgucugcgacaacaucaaguucgccgacgaccucaaccagcugacgggcuacaagaagccggcgagccgggagcugaaggugaccuucuuccccgaccucaacggggacguggucgccaucgacuacaagcacuacacccccuccuucaagaagggcgccaagcugcugcacaagcccaucguguggcacgugaacaacgccaccaacaaggcgacguacaagccgaacaccuggugcauccgcugccucuggagcaccaagcccgucgagaccuccaacagcuucgacgugcugaaguccgaggacgcccagggcauggacaaccuggccugcgaggaccucaagcccgugagcgaggaggucguggagaaccccacgauccagaaggacgugcuggagugcaacgucaagaccaccgagguggugggggacaucauccugaagccggccaacaacucccucaagaucaccgaggaggucggccacacggaccugauggccgcguacguggacaacagcucccugaccaucaagaagcccaacgagcucagccgcgugcuggggcugaagacccucgccacccacggccuggccgccgucaacuccgugcccugggacacgaucgccaacuacgcgaagccguuccugaacaagguggucagcaccaccaccaacaucgugacgcggugccucaaccgcgugugcaccaacuacaugcccuacuucuucacccugcugcuccagcugugcaccuucacccgguccacgaacagccgcaucaaggccuccaugcccaccaccaucgccaagaacaccgucaagagcguggggaaguucugccuggaggccagcuucaacuaccucaagucccccaacuucagcaagcugaucaacaucaucaucugguuccugcuccuguccgugugccugggcagccucaucuacuccacggccgcgcugggcguccugaugagcaaccucgggaugccguccuacugcaccggcuaccgggagggguaccugaacagcaccaacgugaccaucgccacguacugcaccggcuccauccccugcagcgugugccuguccggccucgacagccuggacaccuaccccucccuggagaccauccagaucacgaucagcuccuucaagugggaccucaccgccuucgggcuggucgccgagugguuccuggccuacauccucuucacccgcuucuucuacgugcugggccuggcggccaucaugcagcucuucuucagcuacuucgccgugcacuucaucuccaacagcuggcugauguggcugaucaucaaccugguccagauggcccccaucuccgcgauggugcggauguacaucuucuucgccagcuucuacuacguguggaagagcuacguccacgugguggacgggugcaacuccagcaccugcaugaugugcuacaagcgcaaccgggccacgcgcgucgagugcaccaccaucgugaacggcguccggcgcuccuucuacguguacgccaacgggggcaagggcuucugcaagcuccacaacuggaacugcgugaacugcgacaccuucugcgccgggagcacguucaucuccgacgaggucgcgcgggaccugagccugcaguucaagcgcccgaucaaccccaccgaccaguccagcuacaucguggacuccgugaccgucaagaacggcagcauccaccucuacuucgacaaggccgggcagaagaccuacgagcggcacucccugagccacuucgugaaccuggacaaccuccgcgccaacaacacgaagggcucccugcccaucaacgugaucgucuucgacgggaagagcaagugcgaggaguccagcgccaaguccgccagcguguacuacucccagcugaugugccagcccauccuccugcuggaccaggcgcucgugagcgacgucggcgacagcgccgagguggccgugaagauguucgacgccuacgucaacaccuucuccagcaccuucaacgugccgauggagaagcugaagacccugguggccacggcggaggccgagcucgccaagaacgucucccuggacaacgugcugagcaccuucaucuccgccgcgcggcagggcuucguggacagcgacgucgagaccaaggacgugguggagugccucaagcugucccaccagagcgacaucgaggucaccggggacuccugcaacaacuacaugcugacguacaacaagguggagaacaugaccccccgcgaccucggcgccugcaucgacugcagcgcccggcacaucaacgcccagguggccaagucccacaacaucgcgcugaucuggaacgucaaggacuucaugagccuguccgagcagcuccgcaagcagauccgcagcgccgccaagaagaacaaccugcccuucaagcugaccugcgccaccacgcggcagguggugaacgucgugaccaccaagaucgcccucaaggggggcuga

SEQ ID NO: 17917 - RNA, 5841 nt, Artificial Sequence
  SARS-CoV-2__MT791940.1__non-structural protein 3 (NSP3) CDS gc
auggcccccaccaaggugaccuucggcgacgacacggucaucgaggugcagggguacaagagcgugaacaucaccuucgagcuggacgagcgcaucgacaagguccucaacgagaagugcuccgccuacaccguggagcugggcaccgaggugaacgaguucgcgugcgucguggccgacgccgugaucaagacgcugcagccggucagcgagcuccugaccccccuggggaucgaccucgacgagugguccauggccaccuacuaccuguucgacgagagcggcgaguucaagcuggccucccacauguacugcagcuucuacccccccgacgaggacgaggaggagggggacugcgaggaggaggaguucgagccguccacccaguacgaguacggcacggaggacgacuaccagggcaagccccucgaguucggggcgaccagcgccgcccugcagcccgaggaggagcaggaggaggacuggcuggacgacgacucccagcagaccgugggccagcaggacgggagcgaggacaaccagaccacgaccauccagaccaucguggagguccagccccagcucgagauggagcugaccccgguggugcagacgaucgaggucaacuccuucagcggcuaccugaagcucaccgacaacguguacaucaagaacgccgacaucguggaggaggcgaagaaggucaagcccaccgugguggucaacgccgccaacguguaccugaagcacgggggcggcguggccggggcccugaacaaggcgaccaacaacgccaugcaggucgaguccgacgacuacaucgccacgaacggcccccucaagguggggggcagcugcguccuguccggccacaaccuggccaagcacugccuccacgugguggggcccaacgucaacaagggcgaggacauccagcugcugaagagcgccuacgagaacuucaaccagcacgaggugcuccuggcgccgcugcucuccgccgggaucuucggcgccgaccccauccacagccugcgggugugcgucgacaccgugcgcaccaacguguaccuggccgucuucgacaagaaccucuacgacaagcugguguccagcuuccuggagaugaagagcgagaagcagguggagcagaagaucgccgagauccccaaggaggaggucaagcccuucaucaccgaguccaagccgagcguggagcagcggaagcaggacgacaagaagaucaaggcgugcguggaggaggucacgaccacccucgaggagaccaaguuccugacggagaaccugcuccuguacaucgacaucaacgggaaccugcaccccgacuccgccacccucgugagcgacaucgacaucaccuuccugaagaaggacgcccccuacaucgugggcgacgucgugcaggagggcgugcugaccgccgucgugauccccacgaagaaggccgggggcaccaccgagaugcucgcgaaggcccugcgcaaggugccgaccgacaacuacaucacgaccuaccccgggcagggccugaacggguacaccgucgaggaggccaagaccgugcucaagaagugcaaguccgccuucuacauccugcccagcaucaucuccaacgagaagcaggagauccugggcaccgugagcuggaacuggcgggagaugcucgcgcacgccgaggagacgcgcaagcugaugcccgucugcguggagaccaaggccaucguguccaccauccagcggaaguacaagggcaucaagauccaggagggggucguggacuacggcgcccgcuucuacuucuacaccagcaagacgaccguggccucccugaucaacacccugaacgaccucaacgagacccuggucacgaugccgcugggguacgugacccacggccucaaccuggaggaggcggcccgguacaugcgcagccugaaggugcccgccaccgucuccgugagcucccccgacgccgugaccgccuacaacggguaccucacgagcuccagcaagacccccgaggagcacuucaucgagaccaucucccuggcgggcagcuacaaggacuggagcuacuccggccagagcacccagcuggggaucgaguuccucaagcggggcgacaaguccgucuacuacacgagcaacccgaccaccuuccaccuggacggggaggugaucaccuucgacaaccugaagacgcuccugucccugcgcgaggugcggaccaucaaggucuucaccaccguggacaacaucaaccuccacacgcagguggucgacaugagcaugaccuacggccagcaguucggccccaccuaccuggacggggccgacgugaccaagaucaagccccacaacucccacgagggcaagacguucuacgugcugccgaacgacgacacccuccgcgucgaggccuucgaguacuaccacaccaccgaccccagcuuccuggggcgguacauguccgcccugaaccacacgaagaaguggaaguacccccaggugaacggccucaccagcaucaagugggccgacaacaacugcuaccuggcgaccgcccugcucacccugcagcagaucgagcugaaguucaaccccccggcccuccaggacgccuacuaccgcgcgcgggccggggaggccgccaacuucugcgcccugauccuggcguacugcaacaagacggugggcgagcucggcgacguccgcgagaccauguccuaccuguuccagcacgccaaccuggacagcugcaagcgggugcucaacgucgugugcaagaccugcgggcagcagcagaccacccugaagggcguggaggccgucauguacauggggacgcuguccuacgagcaguucaagaagggcgugcagauccccugcaccugcgggaagcaggccaccaaguaccucgugcagcaggagagccccuucgucaugauguccgcccccccggcgcaguacgagcugaagcacggcaccuucacgugcgccagcgaguacaccggcaacuaccagugcgggcacuacaagcacaucaccuccaaggagacccuguacugcaucgacggcgcccuccugacgaagagcagcgaguacaaggggcccaucaccgacguguucuacaaggagaacuccuacaccaccacgaucaagcccgugaccuacaagcuggacggcgucgugugcaccgagaucgaccccaagcucgacaacuacuacaagaaggacaacagcuacuucaccgagcagccgaucgaccuggugcccaaccagcccuaccccaacgccuccuucgacaacuucaaguucgucugcgacaacaucaaguucgccgacgaccugaaccagcucacgggguacaagaagccggcgagccgcgagcugaaggugaccuucuuccccgaccugaacggcgacguggucgccaucgacuacaagcacuacacccccuccuucaagaagggcgccaagcuccugcacaagcccaucguguggcacgugaacaacgccaccaacaaggcgacguacaagccgaacaccuggugcauccggugccuguggagcaccaagcccgucgagaccuccaacagcuucgacgugcucaaguccgaggacgcccaggggauggacaaccuggccugcgaggaccugaagcccgugagcgaggaggucguggagaaccccacgauccagaaggacgugcucgagugcaacgucaagaccaccgagguggugggcgacaucauccugaagccggccaacaacucccugaagaucaccgaggaggucgggcacacggaccucauggccgcguacguggacaacagcucccugaccaucaagaagcccaacgagcugagccgcgugcucggccugaagacccuggccacccacgggcucgccgccgucaacuccgugcccugggacacgaucgccaacuacgcgaagccguuccugaacaagguggucagcaccaccaccaacaucgugacgcgcugccugaaccgggugugcaccaacuacaugcccuacuucuucacccuccugcugcagcucugcaccuucacccgcuccacgaacagccggaucaaggccuccaugcccaccaccaucgccaagaacaccgucaagagcgugggcaaguucugccuggaggccagcuucaacuaccugaagucccccaacuucagcaagcucaucaacaucaucaucugguuccugcugcucuccgugugccugggcagccugaucuacuccacggccgcgcucgggguccugaugagcaaccugggcaugccguccuacugcaccggguaccgcgagggcuaccucaacagcaccaacgugaccaucgccacguacugcaccggcuccauccccugcagcgugugccuguccgggcuggacagccucgacaccuaccccucccuggagaccauccagaucacgaucagcuccuucaagugggaccugaccgccuucggccucgucgccgagugguuccuggccuacauccuguucacccgguucuucuacgugcucgggcuggcggccaucaugcagcuguucuucagcuacuucgccgugcacuucaucuccaacagcuggcucauguggcugaucaucaaccugguccagauggcccccaucuccgcgauggugcgcauguacaucuucuucgccagcuucuacuacguguggaagagcuacguccacgugguggacggcugcaacuccagcaccugcaugaugugcuacaagcggaaccgcgccacgcgggucgagugcaccaccaucgugaacgggguccgccgguccuucuacguguacgccaacggcggcaagggguucugcaagcugcacaacuggaacugcgugaacugcgacaccuucugcgccggcagcacguucaucuccgacgaggucgcgcgcgaccucagccugcaguucaagcggccgaucaaccccaccgaccaguccagcuacaucguggacuccgugaccgucaagaacgggagcauccaccuguacuucgacaaggccggccagaagaccuacgagcgccacucccucagccacuucgugaaccuggacaaccugcgggccaacaacacgaaggggucccuccccaucaacgugaucgucuucgacggcaagagcaagugcgaggaguccagcgccaaguccgccagcguguacuacucccagcugaugugccagcccauccugcuccuggaccaggcgcuggugagcgacgucggcgacagcgccgagguggccgugaagauguucgacgccuacgucaacaccuucuccagcaccuucaacgugccgauggagaagcucaagacccugguggccacggcggaggccgagcuggccaagaacgucucccucgacaacgugcugagcaccuucaucuccgccgcgcgccagggguucguggacagcgacgucgagaccaaggacgugguggagugccugaagcucucccaccagagcgacaucgaggucaccggcgacuccugcaacaacuacaugcugacguacaacaagguggagaacaugaccccccgggaccugggggccugcaucgacugcagcgcccgccacaucaacgcccagguggccaagucccacaacaucgcgcucaucuggaacgucaaggacuucaugagccuguccgagcagcugcggaagcagauccgcagcgccgccaagaagaacaaccuccccuucaagcugaccugcgccaccacgcgccagguggugaacgucgugaccaccaagaucgcccugaagggcggguga

SEQ ID NO: 17918 - RNA, 5841 nt, Artificial Sequence
  SARS-CoV-2__MT791943.1__non-structural protein 3 (NSP3) CDS gc
auggcccccaccaaggugaccuucggcgacgacacggucaucgaggugcagggguacaagagcgugaacaucaccuucgagcuggacgagcgcaucgacaagguccucaacgagaagugcuccgccuacaccguggagcugggcaccgaggugaacgaguucgcgugcgucguggccgacgccgugaucaagacgcugcagccggucagcgagcuccugaccccccuggggaucgaccucgacgagugguccauggccaccuacuaccuguucgacgagagcggcgaguucaagcuggccucccacauguacugcagcuucuacccccccgacgaggacgaggaggagggggacugcgaggaggaggaguucgagccguccacccaguacgaguacggcacggaggacgacuaccagggcaagccccucgaguucggggcgaccagcgccgcccugcagcccgaggaggagcaggaggaggacuggcuggacgacgacucccagcagaccgugggccagcaggacgggagcgaggacaaccagaccacgaccauccagaccaucguggagguccagccccagcucgagauggagcugaccccgguggugcagacgaucgaggucaacuccuucagcggcuaccugaagcucaccgacaacguguacaucaagaacgccgacaucguggaggaggcgaagaaggucaagcccaccgugguggucaacgccgccaacguguaccugaagcacgggggcggcguggccggggcccugaacaaggcgaccaacaacgccaugcaggucgaguccgacgacuacaucgccacgaacggcccccucaagguggggggcagcugcguccuguccggccacaaccuggccaagcacugccuccacgugguggggcccaacgucaacaagggcgaggacauccagcugcugaagagcgccuacgagaacuucaaccagcacgaggugcuccuggcgccgcugcucuccgccgggaucuucggcgccgaccccauccacagccugcgggugugcgucgacaccgugcgcaccaacguguaccuggccgucuucgacaagaaccucuacgacaagcugguguccagcuuccuggagaugaagagcgagaagcagguggagcagaagaucgccgagauccccaaggaggaggucaagcccuucaucaccgaguccaagccgagcguggagcagcggaagcaggacgacaagaagaucaaggcgugcguggaggaggucacgaccacccucgaggagaccaaguuccugacggagaaccugcuccuguacaucgacaucaacgggaaccugcaccccgacuccgccacccucgugagcgacaucgacaucaccuuccugaagaaggacgcccccuacaucgugggcgacgucgugcaggagggcgugcugaccgccgucgugauccccacgaagaaggccgggggcaccaccgagaugcucgcgaaggcccugcgcaaggugccgaccgacaacuacaucacgaccuaccccgggcagggccugaacggguacaccgucgaggaggccaagaccgugcucaagaagugcaaguccgccuucuacauccugcccagcaucaucuccaacgagaagcaggagauccugggcaccgugagcuggaaccuccgggagaugcuggcgcacgccgaggagacgcgcaagcugaugcccgucugcguggagaccaaggccaucguguccaccauccagcggaaguacaagggcaucaagauccaggagggggucguggacuacggcgcccgcuucuacuucuacaccagcaagacgaccguggccucccugaucaacacccucaacgaccugaacgagacccuggucacgaugccgcucggguacgugacccacggccugaaccuggaggaggcggcccgguacaugcgcagccucaaggugcccgccaccgucuccgugagcucccccgacgccgugaccgccuacaacggguaccugacgagcuccagcaagacccccgaggagcacuucaucgagaccaucucccuggcgggcagcuacaaggacuggagcuacuccggccagagcacccagcucgggaucgaguuccugaagcggggcgacaaguccgucuacuacacgagcaacccgaccaccuuccaccuggacggggaggugaucaccuucgacaaccucaagacgcugcugucccuccgcgaggugcggaccaucaaggucuucaccaccguggacaacaucaaccugcacacgcagguggucgacaugagcaugaccuacggccagcaguucggccccaccuaccuggacggggccgacgugaccaagaucaagccccacaacucccacgagggcaagacguucuacgugcucccgaacgacgacacccugcgcgucgaggccuucgaguacuaccacaccaccgaccccagcuuccuggggcgguacauguccgcccucaaccacacgaagaaguggaaguacccccaggugaacggccugaccagcaucaagugggccgacaacaacugcuaccuggcgaccgcccuccugacccugcagcagaucgagcucaaguucaaccccccggcccugcaggacgccuacuaccgcgcgcgggccggggaggccgccaacuucugcgcccugauccucgcguacugcaacaagacggugggcgagcugggcgacguccgcgagaccauguccuaccuguuccagcacgccaaccucgacagcugcaagcgggugcugaacgucgugugcaagaccugcgggcagcagcagaccacccugaagggcguggaggccgucauguacauggggacgcucuccuacgagcaguucaagaagggcgugcagauccccugcaccugcgggaagcaggccaccaaguaccuggugcagcaggagagccccuucgucaugauguccgcccccccggcgcaguacgagcugaagcacggcaccuucacgugcgccagcgaguacaccggcaacuaccagugcgggcacuacaagcacaucaccuccaaggagacccucuacugcaucgacggcgcccugcugacgaagagcagcgaguacaaggggcccaucaccgacguguucuacaaggagaacuccuacaccaccacgaucaagcccgugaccuacaagcucgacggcgucgugugcaccgagaucgaccccaagcuggacaacuacuacaagaaggacaacagcuacuucaccgagcagccgaucgaccuggugcccaaccagcccuaccccaacgccuccuucgacaacuucaaguucgucugcgacaacaucaaguucgccgacgaccucaaccagcugacgggguacaagaagccggcgagccgcgagcugaaggugaccuucuuccccgaccucaacggcgacguggucgccaucgacuacaagcacuacacccccuccuucaagaagggcgccaagcugcugcacaagcccaucguguggcacgugaacaacgccaccaacaaggcgacguacaagccgaacaccuggugcauccggugccucuggagcaccaagcccgucgagaccuccaacagcuucgacgugcugaaguccgaggacgcccaggggauggacaaccuggccugcgaggaccucaagcccgugagcgaggaggucguggagaaccccacgauccagaaggacgugcuggagugcaacgucaagaccaccgagguggugggcgacaucauccugaagccggccaacaacucccucaagaucaccgaggaggucgggcacacggaccugauggccgcguacguggacaacagcucccugaccaucaagaagcccaacgagcucagccgcgugcugggccugaagacccucgccacccacgggcuggccgccgucaacuccgugcccugggacacgaucgccaacuacgcgaagccguuccugaacaagguggucagcaccaccaccaacaucgugacgcgcugccucaaccgggugugcaccaacuacaugcccuacuucuucacccugcugcuccagcugugcaccuucacccgcuccacgaacagccggaucaaggccuccaugcccaccaccaucgccaagaacaccgucaagagcgugggcaaguucugccuggaggccagcuucaacuaccucaagucccccaacuucagcaagcugaucaacaucaucaucugguuccugcuccuguccgugugccugggcuuccucaucuacagcacggccgcgcuggggguccugauguccaaccucggcaugccgagcuacugcaccggguaccgcgagggcuaccugaacuccaccaacgugaccaucgccacguacugcaccggcagcauccccugcuccgugugccugagcgggcucgacucccuggacaccuaccccagccuggagaccauccagaucacgaucuccagcuucaagugggaccucaccgccuucggccuggucgccgagugguuccuggccuacauccucuucacccgguucuucuacgugcuggggcuggcggccaucaugcagcucuucuucuccuacuucgccgugcacuucaucagcaacuccuggcugauguggcugaucaucaaccugguccagauggcccccaucagcgcgauggugcgcauguacaucuucuucgccuccuucuacuacguguggaagagcuacguccacgugguggacggcugcaacagcuccaccugcaugaugugcuacaagcggaaccgcgccacgcgggucgagugcaccaccaucgugaacgggguccgccggagcuucuacguguacgccaacggcggcaagggguucugcaagcuccacaacuggaacugcgugaacugcgacaccuucugcgccggcuccacguucaucagcgacgaggucgcgcgcgaccugucccugcaguucaagcggccgaucaaccccaccgaccagagcuccuacaucguggacagcgugaccgucaagaacggguccauccaccucuacuucgacaaggccggccagaagaccuacgagcgccacagccugucccacuucgugaaccuggacaaccuccgggccaacaacacgaaggggagccugcccaucaacgugaucgucuucgacggcaaguccaagugcgaggagagcuccgccaagagcgccuccguguacuacagccagcugaugugccagcccauccuccugcuggaccaggcgcucguguccgacgucggcgacagcgccgagguggccgugaagauguucgacgccuacgucaacaccuucagcuccaccuucaacgugccgauggagaagcugaagacccugguggccacggcggaggccgagcucgccaagaacgucagccuggacaacgugcuguccaccuucaucagcgccgcgcgccagggguucguggacuccgacgucgagaccaaggacgugguggagugccucaagcugagccaccaguccgacaucgaggucaccggcgacagcugcaacaacuacaugcugacguacaacaagguggagaacaugaccccccgggaccucggggccugcaucgacugcuccgcccgccacaucaacgcccagguggccaagagccacaacaucgcgcugaucuggaacgucaaggacuucaugucccugagcgagcagcuccggaagcagauccgcuccgccgccaagaagaacaaccugcccuucaagcugaccugcgccaccacgcgccagguggugaacgucgugaccaccaagaucgcccucaagggcggguga

SEQ ID NO: 17919 - RNA, 5841 nt, Artificial Sequence
  SARS-CoV-2__MT791948.1__non-structural protein 3 (NSP3) CDS gc
auggcccccaccaaggugaccuucggcgacgacacggucaucgaggugcagggguacaagagcgugaacaucaccuucgagcuggacgagcgcaucgacaagguccucaacgagaagugcuccgccuacaccguggagcugggcaccgaggugaacgaguucgcgugcgucguggccgacgccgugaucaagacgcugcagccggucagcgagcuccugaccccccuggggaucgaccucgacgagugguccauggccaccuacuaccuguucgacgagagcggcgaguucaagcuggccucccacauguacugcagcuucuacccccccgacgaggacgaggaggagggggacugcgaggaggaggaguucgagccguccacccaguacgaguacggcacggaggacgacuaccagggcaagccccucgaguucggggcgaccagcgccgcccugcagcccgaggaggagcaggaggaggacuggcuggacgacgacucccagcagaccgugggccagcaggacgggagcgaggacaaccagaccacgaccauccagaccaucguggagguccagccccagcucgagauggagcugaccccgguggugcagacgaucgaggucaacuccuucagcggcuaccugaagcucaccgacaacguguacaucaagaacgccgacaucguggaggaggcgaagaaggucaagcccaccgugguggucaacgccgccaacguguaccugaagcacgggggcggcguggccggggcccugaacaaggcgaccaacaacgccaugcaggucgaguccgacgacuacaucgccacgaacggcccccucaagguggggggcagcugcguccuguccggccacaaccuggccaagcacugccuccacgugguggggcccaacgucaacaagggcgaggacauccagcugcugaagagcgccuacgagaacuucaaccagcacgaggugcuccuggcgccgcugcucuccgccgggaucuucggcgccgaccccauccacagccugcgggugugcgucgacaccgugcgcaccaacguguaccuggccgucuucgacaagaaccucuacgacaagcugguguccagcuuccuggagaugaagagcgagaagcagguggagcagaagaucgccgagauccccaaggaggaggucaagcccuucaucaccgaguccaagccgagcguggagcagcggaagcaggacgacaagaagaucaaggcgugcguggaggaggucacgaccacccucgaggagaccaaguuccugacggagaaccugcuccuguacaucgacaucaacgggaaccugcaccccgacuccgccacccucgugagcgacaucgacaucaccuuccugaagaaggacgcccccuacaucgugggcgacgucgugcaggagggcgugcugaccgccgucgugauccccacgaagaaggccgggggcaccaccgagaugcucgcgaaggcccugcgcaaggugccgaccgacaacuacaucacgaccuaccccgggcagggccugaacggguacaccgucgaggaggccaagaccgugcucaagaagugcaaguccgccuucuacauccugcccagcaucaucuccaacgagaagcaggagauccugggcaccgugagcuggaaccuccgggagaugcuggcgcacgccgaggagacgcgcaagcugaugcccgucugcguggagaccaaggccaucguguccaccauccagcggaaguacaagggcaucaagauccaggagggggucguggacuacggcgcccgcuucuacuucuacaccagcaagacgaccguggccucccugaucaacacccucaacgaccugaacgagacccuggucacgaugccgcucggguacgugacccacggccugaaccuggaggaggcggcccgguacaugcgcagccucaaggugcccgccaccgucuccgugagcucccccgacgccgugaccgccuacaacggguaccugacgagcuccagcaagacccccgaggagcacuucaucgagaccaucucccuggcgggcagcuacaaggacuggagcuacuccggccagagcacccagcucgggaucgaguuccugaagcggggcgacaaguccgucuacuacacgagcaacccgaccaccuuccaccuggacggggaggugaucaccuucgacaaccucaagacgcugcugucccuccgcgaggugcggaccaucaaggucuucaccaccguggacaacaucaaccugcacacgcagguggucgacaugagcaugaccuacggccagcaguucggccccaccuaccuggacggggccgacgugaccaagaucaagccccacaacucccacgagggcaagacguucuacgugcucccgaacgacgacacccugcgcgucgaggccuucgaguacuaccacaccaccgaccccagcuuccuggggcgguacauguccgcccucaaccacacgaagaaguggaaguacccccaggugaacggccugaccagcaucaagugggccgacaacaacugcuaccuggcgaccgcccuccugacccugcagcagaucgagcucaaguucaaccccccggcccugcaggacgccuacuaccgcgcgcgggccggggaggccgccaacuucugcgcccugauccucgcguacugcaacaagacggugggcgagcugggcgacguccgcgagaccauguccuaccuguuccagcacgccaaccucgacagcugcaagcgggugcugaacgucgugugcaagaccugcgggcagcagcagaccacccugaagggcguggaggccgucauguacauggggacgcucuccuacgagcaguucaagaagggcgugcagauccccugcaccugcgggaagcaggccaccaaguaccuggugcagcaggagagccccuucgucaugauguccgcccccccggcgcaguacgagcugaagcacggcaccuucacgugcgccagcgaguacaccggcaacuaccagugcgggcacuacaagcacaucaccuccaaggagacccucuacugcaucgacggcgcccugcugacgaagagcagcgaguacaaggggcccaucaccgacguguucuacaaggagaacuccuacaccaccacgaucaagcccgugaccuacaagcucgacggcgucgugugcaccgagaucgaccccaagcuggacaacuacuacaagaaggacaacagcuacuucaccgagcagccgaucgaccuggugcccaaccagcccuaccccaacgccuccuucgacaacuucaaguucgucugcgacaacaucaaguucgccgacgaccucaaccagcugacgggguacaagaagccggcgagccgcgagcugaaggugaccuucuuccccgaccucaacggcgacguggucgccaucgacuacaagcacuacacccccuccuucaagaagggcgccaagcugcugcacaagcccaucguguggcacgugaacaacgccaccaacaaggcgacguacaagccgaacaccuggugcauccggugccucuggagcaccaagcccgucgagaccuccaacagcuucgacgugcugaaguccgaggacgcccaggggauggacaaccuggccugcgaggaccucaagcccgugagcgaggaggucguggagaaccccacgauccagaaggacgugcuggagugcaacgucaagaccaccgagguggugggcgacaucauccugaagccggccaacaacucccucaagaucaccgaggaggucggguacacggaccugauggccgcguacguggacaacagcucccugaccaucaagaagcccaacgagcucagccgcgugcugggccugaagacccucgccacccacgggcuggccgccgucaacuccgugcccugggacacgaucgccaacuacgcgaagccguuccugaacaagguggucagcaccaccaccaacaucgugacgcgcugccucaaccgggugugcaccaacuacaugcccuacuucuucacccugcugcuccagcugugcaccuucacccgcuccacgaacagccggaucaaggccuccaugcccaccaccaucgccaagaacaccgucaagagcgugggcaaguucugccuggaggccagcuucaacuaccucaagucccccaacuucagcaagcugaucaacaucaucaucugguuccugcuccuguccgugugccugggcagccucaucuacuccacggccgcgcuggggguccugaugagcaaccucggcaugccguccuacugcaccggguaccgcgagggcuaccugaacagcaccaacgugaccaucgccacguacugcaccggcuccauccccugcagcgugugccuguccgggcucgacagccuggacaccuaccccucccuggagaccauccagaucacgaucagcuccuucaagugggaccucaccgccuucggccuggucgccgagugguuccuggccuacauccucuucacccgguucuucuacgugcuggggcuggcggccaucaugcagcucuucuucagcuacuucgccgugcacuucaucuccaacagcuggcugauguggcugaucaucaaccugguccagauggcccccaucuccgcgauggugcgcauguacaucuucuucgccagcuucuacuacguguggaagagcuacguccacgugguggacggcugcaacuccagcaccugcaugaugugcuacaagcggaaccgcgccacgcgggucgagugcaccaccaucgugaacgggguccgccgguccuucuacguguacgccaacggcggcaagggguucugcaagcuccacaacuggaacugcgugaacugcgacaccuucugcgccggcagcacguucaucuccgacgaggucgcgcgcgaccugagccugcaguucaagcggccgaucaaccccaccgaccaguccagcuacaucguggacuccgugaccgucaagaacgggagcauccaccucuacuucgacaaggccggccagaagaccuacgagcgccacucccugagccacuucgugaaccuggacaaccuccgggccaacaacacgaaggggucccugcccaucaacgugaucgucuucgacggcaagagcaagugcgaggaguccagcgccaaguccgccagcguguacuacucccagcugaugugccagcccauccuccugcuggaccaggcgcucgugagcgacgucggcgacagcgccgagguggccgugaagauguucgacgccuacgucaacaccuucuccagcaccuucaacgugccgauggagaagcugaagacccugguggccacggcggaggccgagcucgccaagaacgucucccuggacaacgugcugagcaccuucaucuccgccgcgcgccagggguucguggacagcgacgucgagaccaaggacgugguggagugccucaagcugucccaccagagcgacaucgaggucaccggcgacuccugcaacaacuacaugcugacguacaacaagguggagaacaugaccccccgggaccucggggccugcaucgacugcagcgcccgccacaucaacgcccagguggccaagucccacaacaucgcgcugaucuggaacgucaaggacuucaugagccuguccgagcagcuccggaagcagauccgcagcgccgccaagaagaacaaccugcccuucaagcugaccugcgccaccacgcgccagguggugaacgucgugaccaccaagaucgcccucaagggcggguga

SEQ ID NO: 17920 - RNA, 5841 nt, Artificial Sequence
  SARS-CoV-2__MT791953.1__non-structural protein 3 (NSP3) CDS gc
auggcccccaccaaggugaccuucggcgacgacacggucaucgaggugcagggguacaagagcgugaacaucaccuucgagcuggacgagcgcaucgacaagguccucaacgagaagugcuccgccuacaccguggagcugggcaccgaggugaacgaguucgcgugcgucguggccgacgccgugaucaagacgcugcagccggucagcgagcuccugaccccccuggggaucgaccucgacgagugguccauggccaccuacuaccuguucgacgagagcggcgaguucaagcuggccucccacauguacugcagcuucuacccccccgacgaggacgaggaggagggggacugcgaggaggaggaguucgagccguccacccaguacgaguacggcacggaggacgacuaccagggcaagccccucgaguucggggcgaccagcgccgcccugcagcccgaggaggagcaggaggaggacuggcuggacgacgacucccagcagaccgugggccagcaggacgggagcgaggacaaccagaccacgaccauccagaccaucguggagguccagccccagcucgagauggaguucaccccgguggugcagacgaucgaggucaacuccuucagcggcuaccugaagcugaccgacaacguguacaucaagaacgccgacaucguggaggaggcgaagaaggucaagcccaccgugguggucaacgccgccaacguguaccucaagcacgggggcggcguggccggggcccugaacaaggcgaccaacaacgccaugcaggucgaguccgacgacuacaucgccacgaacggcccccugaagguggggggcagcugcguccucuccggccacaaccuggccaagcacugccugcacgugguggggcccaacgucaacaagggcgaggacauccagcuccugaagagcgccuacgagaacuucaaccagcacgaggugcugcucgcgccgcugcuguccgccgggaucuucggcgccgaccccauccacagccuccgggugugcgucgacaccgugcgcaccaacguguaccuggccgucuucgacaagaaccuguacgacaagcucguguccagcuuccuggagaugaagagcgagaagcagguggagcagaagaucgccgagauccccaaggaggaggucaagcccuucaucaccgaguccaagccgagcguggagcagcggaagcaggacgacaagaagaucaaggcgugcguggaggaggucacgaccacccuggaggagaccaaguuccucacggagaaccugcugcucuacaucgacaucaacgggaaccugcaccccgacuccgccacccuggugagcgacaucgacaucaccuuccucaagaaggacgcccccuacaucguguccgacgucgugcaggagggcgugcugaccgccgucgugauccccacgaagaaggccggcgggaccaccgagaugcuggcgaaggcccuccgcaaggugccgaccgacaacuacaucacgaccuaccccggccaggggcugaacggcuacaccgucgaggaggccaagaccgugcugaagaagugcaagagcgccuucuacauccuccccuccaucaucagcaacgagaagcaggagauccuggggaccguguccuggaaccugcgggagaugcucgcgcacgccgaggagacgcgcaagcugaugcccgucugcguggagaccaaggccaucgugagcaccauccagcggaaguacaagggcaucaagauccaggagggcgucguggacuacggggcccgcuucuacuucuacaccuccaagacgaccguggccagccugaucaacacccugaacgaccucaacgagacccuggucacgaugccgcugggcuacgugacccacgggcucaaccuggaggaggcggcccgguacaugcgcucccugaaggugcccgccaccgucagcguguccagccccgacgccgugaccgccuacaacggcuaccucacguccagcuccaagacccccgaggagcacuucaucgagaccaucagccuggcggggagcuacaaggacugguccuacagcggccaguccacccagcugggcaucgaguuccucaagcggggggacaagagcgucuacuacacguccaacccgaccaccuuccaccuggacggcgaggugaucaccuucgacaaccugaagacgcuccugagccugcgcgaggugcggaccaucaaggucuucaccaccguggacaacaucaaccuccacacgcagguggucgacauguccaugaccuacgggcagcaguucggccccaccuaccuggacggcgccgacgugaccaagaucaagccccacaacagccacgaggggaagacguucuacgugcugccgaacgacgacacccuccgcgucgaggccuucgaguacuaccacaccaccgaccccuccuuccugggccgguacaugagcgcccugaaccacacgaagaaguggaaguacccccaggugaacgggcucaccuccaucaagugggccgacaacaacugcuaccuggcgaccgcccugcucacccugcagcagaucgagcugaaguucaaccccccggcccuccaggacgccuacuaccgcgcgcgggccggcgaggccgccaacuucugcgcccugauccuggcguacugcaacaagacggugggggagcucggcgacguccgcgagaccaugagcuaccuguuccagcacgccaaccuggacuccugcaagcgggugcucaacgucgugugcaagaccugcggccagcagcagaccacccugaaggggguggaggccgucauguacaugggcacgcugagcuacgagcaguucaagaagggggugcagauccccugcaccugcggcaagcaggccaccaaguaccucgugcagcaggagucccccuucgucaugaugagcgcccccccggcgcaguacgagcugaagcacgggaccuucacgugcgccuccgaguacaccggcaacuaccagugcggccacuacaagcacaucaccagcaaggagacccuguacugcaucgacggggcccuccugacgaagagcuccgaguacaagggccccaucaccgacguguucuacaaggagaacagcuacaccaccacgaucaagcccgugaccuacaagcuggacggggucgugugcaccgagaucgaccccaagcucgacaacuacuacaagaaggacaacuccuacuucaccgagcagccgaucgaccuggugcccaaccagcccuaccccaacgccagcuucgacaacuucaaguucgucugcgacaacaucaaguucgccgacgaccugaaccagcucacgggcuacaagaagccggcgucccgcgagcugaaggugaccuucuuccccgaccugaacggggacguggucgccaucgacuacaagcacuacacccccagcuucaagaagggcgccaagcuccugcacaagcccaucguguggcacgugaacaacgccaccaacaaggcgacguacaagccgaacaccuggugcauccggugccugugguccaccaagcccgucgagaccagcaacuccuucgacgugcucaagagcgaggacgcccagggcauggacaaccuggccugcgaggaccugaagcccguguccgaggaggucguggagaaccccacgauccagaaggacgugcucgagugcaacgucaagaccaccgagguggugggggacaucauccugaagccggccaacaacagccugaagaucaccgaggaggucggccacacggaccucauggccgcguacguggacaacuccagccugaccaucaagaagcccaacgagcugucccgcgugcucgggcugaagacccuggccacccacggccucgccgccgucaacagcgugcccugggacacgaucgccaacuacgcgaagccguuccugaacaagguggucuccaccaccaccaacaucgugacgcgcugccugaaccgggugugcaccaacuacaugcccuacuucuucacccuccugcugcagcucugcaccuucacccgcagcacgaacucccggaucaaggccagcaugcccaccaccaucgccaagaacaccgucaagagcguggggaaguucugccuggaggccuccuucaacuaccugaagagccccaacuucuccaagcucaucaacaucaucaucugguuccugcugcucagcgugugccugggcucccugaucuacagcacggccgcgcucggcguccugauguccaaccuggggaugccgagcuacugcaccggcuaccgcgagggguaccucaacuccaccaacgugaccaucgccacguacugcaccggcagcauccccugcuccgugugccugagcggccuggacucccucgacaccuaccccagccuggagaccauccagaucacgaucuccagcuucaagugggaccugaccgccuucgggcucgucgccgagugguuccuggccuacauccuguucacccgguucuucuacgugcucggccuggcggccaucaugcagcuguucuucuccuacuucgccgugcacuucaucagcaacuccuggcucauguggcugaucaucaaccugguccagauggcccccaucagcgcgauggugcgcauguacaucuucuucgccagcuucuacuacguguggaaguccuacguccacgugguggacgggugcaacagcuccaccugcaugaugugcuacaagcggaaccgcgccacgcgggucgagugcaccaccaucgugaacggcguccgccggagcuucuacguguacgccaacgggggcaagggcuucugcaagcugcacaacuggaacugcgugaacugcgacaccuucugcgccggguccacguucaucagcgacgaggucgcgcgcgaccucucccugcaguucaagcggccgaucaaccccaccgaccagagcuccuacaucguggacagcgugaccgucaagaacggcuccauccaccuguacuucgacaaggccgggcagaagaccuacgagcgccacagccucucccacuucgugaaccuggacaaccugcgggccaacaacacgaagggcagccuccccaucaacgugaucgucuucgacgggaaguccaagugcgaggagagcuccgccaagagcgccuccguguacuacagccagcugaugugccagcccauccugcuccuggaccaggcgcuggugagcgacgucggcgacuccgccgagguggccgugaagauguucgacgccuacgucaacaccuucagcuccaccuucaacgugccgauggagaagcucaagacccugguggccacggcggaggccgagcuggccaagaacgucagccucgacaacgugcuguccaccuucaucagcgccgcgcgccagggcuucguggacuccgacgucgagaccaaggacgugguggagugccugaagcucagccaccaguccgacaucgaggucaccggggacagcugcaacaacuacaugcugacguacaacaagguggagaacaugaccccccgggaccugggcgccugcaucgacugcuccgcccgccacaucaacgcccagguggccaagagccacaacaucgcgcucaucuggaacgucaaggacuucaugucccugagcgagcagcugcggaagcagauccgcuccgccgccaagaagaacaaccuccccuucaagcugaccugcgccaccacgcgccagguggugaacgucgugaccaccaagaucgcccugaaggggggcuga

SEQ ID NO: 17921 - RNA, 5841 nt, Artificial Sequence
  SARS-CoV-2__MT791956.1__non-structural protein 3 (NSP3) CDS gc
auggcccccaccaaggugaccuucggcgacgacacggucaucgaggugcagggguacaagagcgugaacaucaccuucgagcuggacgagcgcaucgacaagguccucaacgagaagugcuccgccuacaccguggagcugggcaccgaggugaacgaguucgcgugcgucguggccgacgccgugaucaagacgcugcagccggucagcgagcuccugaccccccuggggaucgaccucgacgagugguccauggccaccuacuaccuguucgacgagagcggcgaguucaagcuggccucccacauguacugcagcuucuacccccccgacgaggacgaggaggagggggacugcgaggaggaggaguucgagccguccacccaguacgaguacggcacggaggacgacuaccagggcaagccccucgaguucggggcgaccagcgccgcccugcagcccgaggaggagcaggaggaggacuggcuggacgacgacucccagcagaccgugggccagcaggacgggagcgaggacaaccagaccacgaccauccagaccaucguggagguccagccccagcucgagauggagcugaccccgguggugcagacgaucgaggucaacuccuucagcggcuaccugaagcucaccgacaacguguacaucaagaacgccgacaucguggaggaggcgaagaaggucaagcccaccgugguggucaacgccgccaacguguaccugaagcacgggggcggcguggccggggcccugaacaaggcgaccaacaacgccaugcaggucgaguccgacgacuacaucgccacgaacggcccccucaagguggggggcagcugcguccuguccggccacaaccuggccaagcacugccuccacgugguggggcccaacgucaacaagggcgaggacauccagcugcugaagagcgccuacgagaacuucaaccagcacgaggugcuccuggcgccgcugcucuccgccgggaucuucggcgccgaccccauccacagccugcgggugugcgucgacaccgugcgcaccaacguguaccuggccgucuucgacaagaaccucuacgacaagcugguguccagcuuccuggagaugaagagcgagaagcagguggagcagaagaucgccgagauccccaaggaggaggucaagcccuucaucaccgaguccaagccgagcguggagcagcggaagcaggacgacaagaagaucaaggcgugcguggaggaggucacgaccacccucgaggagaccaaguuccugacggagaaccugcuccuguacaucgacaucaacgggaaccugcaccccgacuccgccacccucgugagcgacaucgacaucaccuuccugaagaaggacgcccccuacaucgugggcgacgucgugcaggagggcgugcugaccgccgucgugauccccacgaagaaggccgggggcaccaccgagaugcucgcgaaggcccugcgcaaggugccgaccgacaacuacaucacgaccuaccccgggcagggccugaacggguacaccgucgaggaggccaagaccgugcucaagaagugcaaguccgccuucuacauccugcccagcaucaucuccaacgagaagcaggagauccugggcaccgugagcuggaaccuccgggagaugcuggcgcacgccgaggagacgcgcaagcugaugcccgucugcguggagaccaaggccaucguguccaccauccagcggaaguacaagggcaucaagauccaggagggggucguggacuacggcgcccgcuucuacuucuacaccagcaagacgaccguggccucccugaucaacacccucaacgaccugaacgagacccuggucacgaugccgcucggguacgugacccacggccugaaccuggaggaggcggcccgguacaugcgcagccucaaggugcccgccaccgucuccgugagcucccccgacgccgugaccgccuacaacggguaccugacgagcuccagcaagacccccgaggagcacuucaucgagaccaucucccuggcgggcagcuacaaggacuggagcuacuccggccagagcacccagcucgggaucgaguuccugaagcggggcgacaaguccgucuacuacacgagcaacccgaccaccuuccaccuggacggggaggugaucaccuucgacaaccucaagacgcugcugucccuccgcgaggugcggaccaucaaggucuucaccaccguggacaacaucaaccugcacacgcagguggucgacaugagcaugaccuacggccagcaguucggccccaccuaccuggacggggccgacgugaccaagaucaagccccacaacucccacgagggcaagacguucuacgugcucccgaacgacgacacccugcgcgucgaggccuucgaguacuaccacaccaccgaccccagcuuccuggggcgguacauguccgcccucaaccacacgaagaaguggaaguacccccaggugaacggccugaccagcaucaagugggccgacaacaacugcuaccuggcgaccgcccuccugacccugcagcagaucgagcucaaguucaaccccccggcccugcaggacgccuacuaccgcgcgcgggccggggaggccgccaacuucugcgcccugauccucgcguacugcaacaagacggugggcgagcugggcgacguccgcgagaccauguccuaccuguuccagcacgccaaccucgacagcugcaagcgggugcugaacgucgugugcaagaccugcgggcagcagcagaccacccugaagggcguggaggccgucauguacauggggacgcucuccuacgagcaguucaagaagggcgugcagauccccugcaccugcgggaagcaggccaccaaguaccuggugcagcaggagagccccuucgucaugauguccgcccccccggcgcaguacgagcugaagcacggcaccuucacgugcgccagcgaguacaccggcaacuaccagugcgggcacuacaagcacaucaccuccaaggagacccucuacugcaucgacggcgcccugcugaucaagagcagcgaguacaaggggcccaucacggacguguucuacaaggagaacuccuacaccaccaccaucaagcccgugacguacaagcucgacggcgucgugugcaccgagaucgaccccaagcuggacaacuacuacaagaaggacaacagcuacuucaccgagcagccgaucgaccuggugcccaaccagcccuaccccaacgccuccuucgacaacuucaaguucgucugcgacaacaucaaguucgccgacgaccucaaccagcugaccggguacaagaagccggcgagccgcgagcugaaggugacguucuuccccgaccucaacggcgacguggucgccaucgacuacaagcacuacacccccuccuucaagaagggcgccaagcugcugcacaagcccaucguguggcacgugaacaacgccaccaacaaggcgaccuacaagccgaacacguggugcauccggugccucuggagcaccaagcccgucgagaccuccaacagcuucgacgugcugaaguccgaggacgcccaggggauggacaaccuggccugcgaggaccucaagcccgugagcgaggaggucguggagaaccccaccauccagaaggacgugcuggagugcaacgucaagacgaccgagguggugggcgacaucauccugaagccggccaacaacucccucaagaucaccgaggaggucgggcacaccgaccugauggccgcguacguggacaacagcucccugacgaucaagaagcccaacgagcucagccgcgugcugggccugaagacccucgccacccacgggcuggccgccgucaacuccgugcccugggacaccaucgccaacuacgcgaagccguuccugaacaagguggucagcacgaccaccaacaucgugacccgcugccucaaccgggugugcacgaacuacaugcccuacuucuucacccugcugcuccagcugugcaccuucacccgcuccaccaacagccggaucaaggccuccaugcccacgaccaucgccaagaacaccgucaagagcgugggcaaguucugccuggaggccagcuucaacuaccucaagucccccaacuucagcaagcugaucaacaucaucaucugguuccugcuccuguccgugugccugggcagccucaucuacuccaccgccgcgcuggggguccugaugagcaaccucggcaugccguccuacugcacgggguaccgcgagggcuaccugaacagcaccaacgugaccaucgccaccuacugcacgggcuccauccccugcagcgugugccuguccgggcucgacagccuggacaccuaccccucccuggagaccauccagaucaccaucagcuccuucaagugggaccucacggccuucggccuggucgccgagugguuccuggccuacauccucuucacccgguucuucuacgugcuggggcuggcggccaucaugcagcucuucuucagcuacuucgccgugcacuucaucuccaacagcuggcugauguggcugaucaucaaccugguccagauggcccccaucuccgcgauggugcgcauguacaucuucuucgccagcuucuacuacguguggaagagcuacguccacgugguggacggcugcaacuccagcaccugcaugaugugcuacaagcggaaccgcgccacccgggucgagugcacgaccaucgugaacgggguccgccgguccuucuacguguacgccaacggcggcaagggguucugcaagcuccacaacuggaacugcgugaacugcgacaccuucugcgccggcagcaccuucaucuccgacgaggucgcgcgcgaccugagccugcaguucaagcggccgaucaaccccacggaccaguccagcuacaucguggacuccgugaccgucaagaacgggagcauccaccucuacuucgacaaggccggccagaagaccuacgagcgccacucccugagccacuucgugaaccuggacaaccuccgggccaacaacaccaaggggucccugcccaucaacgugaucgucuucgacggcaagagcaagugcgaggaguccagcgccaaguccgccagcguguacuacucccagcugaugugccagcccauccuccugcuggaccaggcgcucgugagcgacgucggcgacagcgccgagguggccgugaagauguucgacgccuacgucaacacguucuccagcaccuucaacgugccgauggagaagcugaagacccugguggccaccgcggaggccgagcucgccaagaacgucucccuggacaacgugcugagcacguucaucuccgccgcgcgccagggguucguggacagcgacgucgagaccaaggacgugguggagugccucaagcugucccaccagagcgacaucgaggucaccggcgacuccugcaacaacuacaugcugaccuacaacaagguggagaacaugacgccccgggaccucggggccugcaucgacugcagcgcccgccacaucaacgcccagguggccaagucccacaacaucgcgcugaucuggaacgucaaggacuucaugagccuguccgagcagcuccggaagcagauccgcagcgccgccaagaagaacaaccugcccuucaagcugaccugcgccaccacccgccagguggugaacgucgugacgaccaagaucgcccucaagggcggguga

SEQ ID NO: 17922 - RNA, 5841 nt, Artificial Sequence
  SARS-CoV-2__MT791958.1__non-structural protein 3 (NSP3) CDS gc
auggcccccaccaaggugaccuucggcgacgacacggucaucgaggugcagggguacaagagcgugaacaucaccuucgagcuggacgagcgcaucgacaagguccucaacgagaagugcuccgccuacaccguggagcugggcaccgaggugaacgaguucgcgugcgucguggccgacgccgugaucaagacgcugcagccggucagcgagcuccugaccccccuggggaucgaccucgacgagugguccauggccaccuacuaccuguucgacgagagcggcgaguucaagcuggccucccacauguacugcagcuucuacccccccgacgaggacgaggaggagggggacugcgaggaggaggaguucgagccguccacccaguacgaguacggcacggaggacgacuaccagggcaagccccucgaguucggggcgaccagcgccgcccugcagcccgaggaggagcaggaggaggacuggcuggacgacgacucccagcagaccgugggccagcaggacgggagcgaggacaaccagaccacgaccauccagaccaucguggagguccagccccagcucgagauggagcugaccccgguggugcagacgaucgaggucaacuccuucagcggcuaccugaagcucaccgacaacguguacaucaagaacgccgacaucguggaggaggcgaagaaggucaagcccaccgugguggucaacgccgccaacguguaccugaagcacgggggcggcguggccggggcccugaacaaggcgaccaacaacgccaugcaggucgaguccgacgacuacaucgccacgaacggcccccucaagguggggggcagcugcguccuguccggccacaaccuggccaagcacugccuccacgugguggggcccaacgucaacaagggcgaggacauccagcugcugaagagcgccuacgagaacuucaaccagcacgaggugcuccuggcgccgcugcucuccgccgggaucuucggcgccgaccccauccacagccugcgggugugcgucgacaccgugcgcaccaacguguaccuggccgucuucgacaagaaccucuacgacaagcugguguccagcuuccuggagaugaagagcgagaagcagguggagcagaagaucgccgagauccccaaggaggaggucaagcccuucaucaccgaguccaagccgagcguggagcagcggaagcaggacgacaagaagaucaaggcgugcguggaggaggucacgaccacccucgaggagaccaaguuccugacggagaaccugcuccuguacaucgacaucaacgggaaccugcaccccgacuccgccacccucgugagcgacaucgacaucaccuuccugaagaaggacgcccccuacaucgugggcgacgucgugcaggagggcgugcugaccgccgucgugauccccacgaagaaggccgggggcaccaccgagaugcucgcgaaggcccugcgcaaggugccgaccgacaacuacaucacgaccuaccccgggcagggccugaacggguacaccgucgaggaggccaagaccgugcucaagaagugcaaguccgccuucuacauccugcccagcaucaucuccaacgagaagcaggagauccugggcaccgugagcuggaaccuccgggagaugcuggcgcacgccgaggagacgcgcaagcugaugcccgucugcguggagaccaaggccaucguguccaccauccagcggaaguacaagggcaucaagauccaggagggggucguggacuacggcgcccgcuucuacuucuacaccagcaagacgaccguggccucccugaucaacacccucaacgaccugaacgagacccuggucacgaugccgcucggguacgugacccacggccugaaccuggaggaggcggcccgguacaugcgcagccucaaggugcccgccaccgucuccgugagcucccccgacgccgugaccgccuacaacggguaccugacgagcuccagcaagacccccgaggagcacuucaucgagaccaucucccuggcgggcagcuacaaggacuggagcuacuccggccagagcacccagcucgggaucgaguuccugaagcggggcgacaaguccgucuacuacacgagcaacccgaccaccuuccaccuggacggggaggugaucaccuucgacaaccucaagacgcugcugucccuccgcgaggugcggaccaucaaggucuucaccaccguggacaacaucaaccugcacacgcagguggucgacaugagcaugaccuacggccagcaguucggccccaccuaccuggacggggccgacgugaccaagaucaagccccacaacucccacgagggcaagacguucuacgugcucccgaacgacgacacccugcgcgucgaggccuucgaguacuaccacaccaccgaccccagcuuccuggggcgguacauguccgcccucaaccacacgaagaaguggaaguacccccaggugaacggccugaccagcaucaagugggccgacaacaacugcuaccuggcgaccgcccuccugacccugcagcagaucgagcucaaguucaaccccccggcccugcaggacgccuacuaccgcgcgcgggccggggaggccgccaacuucugcgcccugauccucgcguacugcaacaagacggugggcgagcugggcgacguccgcgagaccauguccuaccuguuccagcacgccaaccucgacagcugcaagcgggugcugaacgucgugugcaagaccugcgggcagcagcagaccacccugaagggcguggaggccgucauguacauggggacgcucuccuacgagcaguucaagaagggcgugcagauccccugcaccugcgggaagcaggccaccaaguaccuggugcagcaggagagccccuucgucaugauguccgcccccccggcgcaguacgagcugaagcacggcaccuucacgugcgccagcgaguacaccggcaacuaccagugcgggcacuacaagcacaucaccuccaaggagacccucuacugcaucgacggcgcccugcugacgaagagcagcgaguacaaggggcccaucaccgacguguucuacaaggagaacuccuacaccaccacgaucaagcccgugaccuacaagcucgacggcgucgugugcaccgagaucgaccccaagcuggacaacuacuacaagaaggacaacagcuacuucaccgagcagccgaucgaccuggugcccaaccagcccuaccccaacgccuccuucgacaacuucaaguucgucugcgacaacaucaaguucgccgacgaccucaaccagcugacgggguacaagaagccggcgagccgcgagcugaaggugaccuucuuccccgaccucaacggcgacguggucgccaucgacuacaagcacuacacccccuccuucaagaagggcgccaagcugcugcacaagcccaucguguggcacgugaacaacgccaccaacaaggcgacguacaagccgaacaccuggugcauccggugccucuggagcaccaagcccgucgagaccuccaacagcuucgacgugcugaaguccgaggacgcccaggggauggacaaccuggccugcgaggaccucaagcccgugagcgaggaggucguggagaaccccacgauccagaaggacgugcuggagugcaacgucaagaccaccgagguggugggcgacaucauccugaagccggccaacaacucccucaagaucaccgaggaggucgggcacacggaccugauggccgcguacguggacaacagcucccugaccaucaagaagcccaacgagcucagccgcgugcugggccugaagacccucgccacccacgggcuggccgccgucaacuccgugcccugggacacgaucgccaacuacgcgaagccguuccugaacaagguggucagcaccaccaccaacaucgugacgcgcugccucaaccgggugugcaccaacuacaugcccuacuucuucacccugcugcuccagcugugcaccuucacccgcuccacgaacagccggaucaaggccuccaugcccaccaccaucgccaagaacaccgucaagagcgugggcaaguucugccuggaggccagcuucaacuaccucaagucccccaacuucagcaagcugaucaacaucaucaucugguuccugcuccuguccgugugccugggcagccucaucuacuccacggccgcgcuggggguccugaugagcaaccucggcaugccguccuacugcaccggguaccgcgagggcuaccugaacagcaccaacgugaccaucgccacguacugcaccggcuccauccccugcagcgugugccuguccgggcucgacagccuggacaccuaccccucccuggagaccauccagaucacgaucagcuccuucaagugggaccucaccgccuucggccuggucgccgagugguuccuggccuacauccucuucacccgguucuucuacgugcuggggcuggcggccaucaugcagcucuucuucagcuacuucgccgugcacuucaucuccaacagcuggcugauguggcugaucaucaaccugguccagauggcccccaucuccgcgauggugcgcauguacaucuucuucgccagcuucuacuacguguggaagagcuacguccacgugguggacggcugcaacuccagcaccugcaugaugugcuacaagcggaaccgcgccacgcgggucgagugcaccaccaucgugaacgggguccgccgguccuucuacguguacgccaacggcggcaagggguucugcaagcuccacaacuggaacugcgugaacugcgacaccuucugcgccggcagcacguucaucuccgacgaggucgcgcgcgaccugagccugcaguucaagcggccgaucaaccccaccgaccaguccagcuacaucguggacuccgugaccgucaagaacgggagcauccaccucuacuucgacaaggccggccagaagaccuacgagcgccacucccugagccacuucgugaaccuggacaaccuccgggccaacaacacgaaggggucccugcccaucaacgugaucgucuucgacggcaagagcaagugcgaggaguccagcgccaaguccgccagcguguacuacucccagcugaugugccagcccauccuccugcuggaccaggcgcucgugagcgacgucggcgacagcgccgagguggccgugaagauguucgacgccuacgucaacaccuucuccagcaccuucaacguguccauggagaagcugaagacccugguggccacggcggaggccgagcucgccaagaacgucagccuggacaacgugcuguccaccuucaucagcgccgcgcgccagggguucguggacuccgacgucgagaccaaggacgugguggagugccucaagcugagccaccaguccgacaucgaggucaccggcgacagcugcaacaacuacaugcugacguacaacaagguggagaacaugaccccgcgggaccucggggccugcaucgacugcuccgcccgccacaucaacgcccagguggccaagagccacaacaucgcgcugaucuggaacgucaaggacuucaugucccugagcgagcagcuccggaagcagauccgcuccgccgccaagaagaacaaccugcccuucaagcugaccugcgccaccacgcgccagguggugaacgucgugaccaccaagaucgcccucaagggcggguga

SEQ ID NO: 17923 - RNA, 5841 nt, Artificial Sequence
  SARS-CoV-2__MT791962.1__non-structural protein 3 (NSP3) CDS gc
auggcccccaccaaggugaccuucggcgacgacacggucaucgaggugcagggguacaagagcgugaacaucaccuucgagcuggacgagcgcaucgacaagguccucaacgagaagugcuccgccuacaccguggagcugggcaccgaggugaacgaguucgcgugcgucguggccgacgccgugaucaagacgcugcagccggucagcgagcuccugaccccccuggggaucgaccucgacgagugguccauggccaccuacuaccuguucgacgagagcggcgaguucaagcuggccucccacauguacugcagcuucuacccccccgacgaggacgaggaggagggggacugcgaggaggaggaguucgagccguccacccaguacgaguacggcacggaggacgacuaccagggcaagccccucgaguucggggcgaccagcgccgcccugcagcccgaggaggagcaggaggaggacuggcuggacgacgacucccagcagaccgugggccagcaggacgggagcgaggacaaccagaccacgaccauccagaccaucguggagguccagccccagcucgagauggagcugaccccgguggugcagacgaucgaggucaacuccuucagcggcuaccugaagcucaccgacaacguguacaucaagaacgccgacaucguggaggaggcgaagaaggucaagcccaccgugguggucaacgccgccaacguguaccugaagcacgggggcggcguggccggggcccugaacaaggcgaccaacaacgccaugcaggucgaguccgacgacuacaucgccacgaacggcccccucaagguggggggcagcugcguccuguccggccacaaccuggccgagcacugccuccacgugguggggcccaacgucaacaagggcgaggacauccagcugcugaagagcgccuacgagaacuucaaccagcacgaggugcuccuggcgccgcugcucuccgccgggaucuucggcgccgaccccauccacagccugcgggugugcgucgacaccgugcgcaccaacguguaccuggccgucuucgacaagaaccucuacgacaagcugguguccagcuuccuggagaugaagagcgagaagcagguggagcagaagaucgccgagauccccaaggaggaggucaagcccuucaucaccgaguccaagccgagcguggagcagcggaagcaggacgacaagaagaucaaggcgugcguggaggaggucacgaccacccucgaggagaccaaguuccugacggagaaccugcuccuguacaucgacaucaacgggaaccugcaccccgacuccgccacccucgugagcgacaucgacaucaccuuccugaagaaggacgcccccuacaucgugggcgacgucgugcaggagggcgugcugaccgccgucgugauccccacgaagaaggccgggggcaccaccgagaugcucgcgaaggcccugcgcaaggugccgaccgacaacuacaucacgaccuaccccgggcagggccugaacggguacaccgucgaggaggccaagaccgugcucaagaagugcaaguccgccuucuacauccugcccagcaucaucuccaacgagaagcaggagauccugggcaccgugagcuggaaccuccgggagaugcuggcgcacgccgaggagacgcgcaagcugaugcccgucugcguggagaccaaggccaucguguccaccauccagcggaaguacaagggcaucaagauccaggagggggucguggacuacggcgcccgcuucuacuucuacaccagcaagacgaccguggccucccugaucaacacccucaacgaccugaacgagacccuggucacgaugccgcucggguacgugacccacggccugaaccuggaggaggcggcccgguacaugcgcagccucaaggugcccgccaccgucuccgugagcucccccgacgccgugaccgccuacaacggguaccugacgagcuccagcaagacccccgaggagcacuucaucgagaccaucucccuggcgggcagcuacaaggacuggagcuacuccggccagagcacccagcucgggaucgaguuccugaagcggggcgacaaguccgucuacuacacgagcaacccgaccaccuuccaccuggacggggaggugaucaccuucgacaaccucaagacgcugcugucccuccgcgaggugcggaccaucaaggucuucaccaccguggacaacaucaaccugcacacgcagguggucgacaugagcaugaccuacggccagcaguucggccccaccuaccuggacggggccgacgugaccaagaucaagccccacaacucccacgagggcaagacguucuacgugcucccgaacgacgacacccugcgcgucgaggccuucgaguacuaccacaccaccgaccccagcuuccuggggcgguacauguccgcccucaaccacacgaagaaguggaaguacccccaggugaacggccugaccagcaucaagugggccgacaacaacugcuaccuggcgaccgcccuccugacccugcagcagaucgagcucaaguucaaccccccggcccugcaggacgccuacuaccgcgcgcgggccggggaggccgccaacuucugcgcccugauccucgcguacugcaacaagacggugggcgagcugggcgacguccgcgagaccauguccuaccuguuccagcacgccaaccucgacagcugcaagcgggugcugaacgucgugugcaagaccugcgggcagcagcagaccacccugaagggcguggaggccgucauguacauggggacgcucuccuacgagcaguucaagaagggcgugcagauccccugcaccugcgggaagcaggccaccaaguaccuggugcagcaggagagccccuucgucaugauguccgcccccccggcgcaguacgagcugaagcacggcaccuucacgugcgccagcgaguacaccggcaacuaccagugcgggcacuacaagcacaucaccuccaaggagacccucuacugcaucgacggcgcccugcugacgaagagcagcgaguacaaggggcccaucaccgacguguucuacaaggagaacuccuacaccaccacgaucaagcccgugaccuacaagcucgacggcgucgugugcaccgagaucgaccccaagcuggacaacuacuacaagaaggacaacagcuacuucaccgagcagccgaucgaccuggugcccaaccagcccuaccccaacgccuccuucgacaacuucaaguucgucugcgacaacaucaaguucgccgacgaccucaaccagcugacgggguacaagaagccggcgagccgcgagcugaaggugaccuucuuccccgaccucaacggcgacguggucgccaucgacuacaagcacuacacccccuccuucaagaagggcgccaagcugcugcacaagcccaucguguggcacgugaacaacgccaccaacaaggcgacguacaagccgaacaccuggugcauccggugccucuggagcaccaagcccgucgagaccuccaacagcuucgacgugcugaaguccgaggacgcccaggggauggacaaccuggccugcgaggaccucaagcccgugagcgaggaggucguggagaaccccacgauccagaaggacgugcuggagugcaacgucaagaccaccgagguggugggcgacaucauccugaagccggccaacaacucccucaagaucaccgaggaggucgggcacacggaccugauggccgcguacguggacaacagcucccugaccaucaagaagcccaacgagcucagccgcgugcugggccugaagacccucgccacccacgggcuggccgccgucaacuccgugcccugggacacgaucgccaacuacgcgaagccguuccugaacaagguggucagcaccaccaccaacaucgugacgcgcugccucaaccgggugugcaccaacuacaugcccuacuucuucacccugcugcuccagcugugcaccuucacccgcuccacgaacagccggaucaaggccuccaugcccaccaccaucgccaagaacaccgucaagagcgugggcaaguucugccuggaggccagcuucaacuaccucaagucccccaacuucagcaagcugaucaacaucaucaucugguuccugcuccuguccgugugccugggcagccucaucuacuccacggccgcgcuggggguccugaugagcaaccucggcaugccguccuacugcaccggguaccgcgagggcuaccugaacagcaccaacgugaccaucgccacguacugcaccggcuccauccccugcagcgugugccuguccgggcucgacagccuggacaccuaccccucccuggagaccauccagaucacgaucagcuccuucaagugggaccucaccgccuucggccuggucgccgagugguuccuggccuacauccucuucacccgguucuucuacgugcuggggcuggcggccaucaugcagcucuucuucagcuacuucgccgugcacuucaucuccaacagcuggcugauguggcugaucaucaaccugguccagauggcccccaucuccgcgauggugcgcauguacaucuucuucgccagcuucuacuacguguggaagagcuacguccacgugguggacggcugcaacuccagcaccugcaugaugugcuacaagcggaaccgcgccacgcgggucgagugcaccaccaucgugaacgggguccgccgguccuucuacguguacgccaacggcggcaagggguucugcaagcuccacaacuggaacugcgugaacugcgacaccuucugcgccggcagcacguucaucuccgacgaggucgcgcgcgaccugagccugcaguucaagcggccgaucaaccccaccgaccaguccagcuacaucguggacuccgugaccgucaagaacgggagcauccaccucuacuucgacaaggccggccagaagaccuacgagcgccacucccugagccacuucgugaaccuggacaaccuccgggccaacaacacgaaggggucccugcccaucaacgugaucgucuucgacggcaagagcaagugcgaggaguccagcgccaaguccgccagcguguacuacucccagcugaugugccagcccauccuccugcuggaccaggcgcucgugagcgacgucggcgacagcgccgagguggccgugaagauguucgacgccuacgucaacaccuucuccagcaccuucaacgugccgauggagaagcugaagacccugguggccacggcggaggccgagcucgccaagaacgucucccuggacaacgugcugagcaccuucaucuccgccgcgcgccagggguucguggacagcgacgucgagaccaaggacgugguggagugccucaagcugucccaccagagcgacaucgaggucaccggcgacuccugcaacaacuacaugcugacguacaacaagguggagaacaugaccccccgggaccucggggccugcaucgacugcagcgcccgccacaucaacgcccagguggccaagucccacaacaucgcgcugaucuggaacgucaaggacuucaugagccuguccgagcagcuccggaagcagauccgcagcgccgccaagaagaacaaccugcccuucaagcugaccugcgccaccacgcgccagguggugaacgucgugaccaccaagaucgcccucaagggcggguga

SEQ ID NO: 17924 - RNA, 5841 nt, Artificial Sequence
  SARS-CoV-2__MT786438.1__non-structural protein 3 (NSP3) CDS gc
auggcccccaccaaggugaccuucggcgacgacacggucaucgaggugcagggguacaagagcgugaacaucaccuucgagcuggacgagcgcaucgacaagguccucaacgagaagugcuccgccuacaccguggagcugggcaccgaggugaacgaguucgcgugcgucguggccgacgccgugaucaagacgcugcagccggucagcgagcuccugaccccccuggggaucgaccucgacgagugguccauggccaccuacuaccuguucgacgagagcggcgaguucaagcuggccucccacauguacugcagcuucuacccccccgacgaggacgaggaggagggggacugcgaggaggaggaguucgagccguccacccaguacgaguacggcacggaggacgacuaccagggcaagccccucgaguucggggcgaccagcgccgcccugcagcccgaggaggagcaggaggaggacuggcuggacgacgacucccagcagaccgugggccagcaggacgggagcgaggacaaccagaccacgaccauccagaccaucguggagguccagccccagcucgagauggagcugaccccgguggugcagacgaucgaggucaacuccuucagcggcuaccugaagcucaccgacaacguguacaucaagaacgccgacaucguggaggaggcgaagaaggucaagcccaccgugguggucaacgccgccaacguguaccugaagcacgggggcggcguggccggggcccugaacaaggcgaccaacaacgccaugcaggucgaguccgacgacuacaucgccacgaacggcccccucaagguggggggcagcugcguccuguccggccacaaccuggccaagcacugccuccacgugguggggcccaacgucaacaagggcgaggacauccagcugcugaagagcgccuacgagaacuucaaccagcacgaggugcuccuggcgccgcugcucuccgccgggaucuucggcgccgaccccauccacagccugcgggugugcgucgacaccgugcgcaccaacguguaccuggccgucuucgacaagaaccucuacgacaagcugguguccagcuuccuggagaugaagagcgagaagcagguggagcagaagaucgccgagauccccaaggaggaggucaagcccuucaucaccgaguccaagccgagcguggagcagcggaagcaggacgacaagaagaucaaggcgugcguggaggaggucacgaccacccucgaggagaccaaguuccugacggagaaccugcuccuguacaucgacaucaacgggaaccugcaccccgacuccgccacccucgugagcgacaucgacaucaccuuccugaagaaggacgcccccuacaucgugggcgacgucgugcaggagggcgugcugaccgccgucgugauccccacgaagaaggccgggggcaccaccgagaugcucgcgaaggcccugcgcaaggugccgaccgacaacuacaucacgaccuaccccgggcagggccugaacggguacaccgucgaggaggccaagaccgugcucaagaagugcaaguccgccuucuacauccugcccagcaucaucuccaacgagaagcaggagauccugggcaccgugagcuggaaccuccgggagaugcuggcgcacgccgaggagacgcgcaagcugaugcccgucugcguggagaccaaggccaucguguccaccauccagcggaaguacaagggcaucaagauccaggagggggucguggacuacggcgcccgcuucuacuucuacaccagcaagacgaccguggccucccugaucaacacccucaacgaccugaacgagacccuggucacgaugccgcucggguacgugacccacggccugaaccuggaggaggcggcccgguacaugcgcagccucaaggugcccgccaccgucuccgugagcucccccgacgccgugaccgccuacaacggguaccugacgagcuccagcaagacccccgaggagcacuucaucgagaccaucucccuggcgggcagcuacaaggacuggagcuacuccggccagagcacccagcucgggaucgaguuccugaagcggggcgacaaguccgucuacuacacgagcaacccgaccaccuuccaccuggacggggaggugaucaccuucgacaaccucaagacgcugcugucccuccgcgaggugcggaccaucaaggucuucaccaccguggacaacaucaaccugcacacgcagguggucgacaugagcaugaccuacggccagcaguucggccccaccuaccuggacggggccgacgugaccaagaucaagccccacaacucccacgagggcaagacguucuacgugcucccgaacgacgacacccugcgcgucgaggccuucgaguacuaccacaccaccgaccccagcuuccuggggcgguacauguccgcccucaaccacacgaagaaguggaaguacccccaggugaacggccugaccagcaucaagugggccgagaacaacugcuaccuggcgaccgcccuccugacccugcagcagaucgagcucaaguucaaccccccggcccugcaggacgccuacuaccgcgcgcgggccggggaggccgccaacuucugcgcccugauccucgcguacugcaacaagacggugggcgagcugggcgacguccgcgagaccauguccuaccuguuccagcacgccaaccucgacagcugcaagcgggugcugaacgucgugugcaagaccugcgggcagcagcagaccacccugaagggcguggaggccgucauguacauggggacgcucuccuacgagcaguucaagaagggcgugcagauccccugcaccugcgggaagcaggccaccaaguaccuggugcagcaggagagccccuucgucaugauguccgcccccccggcgcaguacgagcugaagcacggcaccuucacgugcgccagcgaguacaccggcaacuaccagugcgggcacuacaagcacaucaccuccaaggagacccucuacugcaucgacggcgcccugcugacgaagagcagcgaguacaaggggcccaucaccgacguguucuacaaggagaacuccuacaccaccacgaucaagcccgugaccuacaagcucgacggcgucgugugcaccgagaucgaccccaagcuggacaacuacuacaagaaggacaacagcuacuucaccgagcagccgaucgaccuggugcccaaccagcccuaccccaacgccuccuucgacaacuucaaguucgucugcgacaacaucaaguucgccgacgaccucaaccagcugacgggguacaagaagccggcgagccgcgagcugaaggugaccuucuuccccgaccucaacggcgacguggucgccaucgacuacaagcacuacacccccuccuucaagaagggcgccaagcugcugcacaagcccaucguguggcacgugaacaacgccaccaacaaggcgacguacaagccgaacaccuggugcauccggugccucuggagcaccaagcccgucgagaccuccaacagcuucgacgugcugaaguccgaggacgcccaggggauggacaaccuggccugcgaggaccucaagcccgugagcgaggaggucguggagaaccccacgauccagaaggacgugcuggagugcaacgucaagaccaccgagguggugggcgacaucauccugaagccggccaacaacucccucaagaucaccgaggaggucgggcacacggaccugauggccgcguacguggacaacagcucccugaccaucaagaagcccaacgagcucagccgcgugcugggccugaagacccucgccacccacgggcuggccgccgucaacuccgugcccugggacacgaucgccaacuacgcgaagccguuccugaacaagguggucagcaccaccaccaacaucgugacgcgcugccucaaccgggugugcaccaacuacaugcccuacuucuucacccugcugcuccagcugugcaccuucacccgcuccacgaacagccggaucaaggccuccaugcccaccaccaucgccaagaacaccgucaagagcgugggcaaguucugccuggaggccagcuucaacuaccucaagucccccaacuucagcaagcugaucaacaucaucaucugguuccugcuccuguccgugugccugggcagccucaucuacuccacggccgcgcuggggguccugaugagcaaccucggcaugccguccuacugcaccggguaccgcgagggcuaccugaacagcaccaacgugaccaucgccacguacugcaccggcuccauccccugcagcgugugccuguccgggcucgacagccuggacaccuaccccucccuggagaccauccagaucacgaucagcuccuucaagugggaccucaccgccuucggccuggucgccgagugguuccuggccuacauccucuucacccgguucuucuacgugcuggggcuggcggccaucaugcagcucuucuucagcuacuucgccgugcacuucaucuccaacagcuggcugauguggcugaucaucaaccugguccagauggcccccaucuccgcgauggugcgcauguacaucuucuucgccagcuucuacuacguguggaagagcuacguccacgugguggacggcugcaacuccagcaccugcaugaugugcuacaagcggaaccgcgccacgcgggucgagugcaccaccaucgugaacgggguccgccgguccuucuacguguacgccaacggcggcaagggguucugcaagcuccacaacuggaacugcgugaacugcgacaccuucugcgccggcagcacguucaucuccgacgaggucgcgcgcgaccugagccugcaguucaagcggccgaucaaccccaccgaccaguccagcuacaucguggacuccgugaccgucaagaacgggagcauccaccucuacuucgacaaggccggccagaagaccuacgagcgccacucccugagccacuucgugaaccuggacaaccuccgggccaacaacacgaaggggucccugcccaucaacgugaucgucuucgacggcaagagcaagugcgaggaguccagcgccaaguccgccagcguguacuacucccagcugaugugccagcccauccuccugcuggaccaggcgcucgugagcgacgucggcgacagcgccgagguggccgugaagauguucgacgccuacgucaacaccuucuccagcaccuucaacgugccgauggagaagcugaagacccugguggccacggcggaggccgagcucgccaagaacgucucccuggacaacgugcugagcaccuucaucuccgccgcgcgccagggguucguggacagcgacgucgagaccaaggacgugguggagugccucaagcugucccaccagagcgacaucgaggucaccggcgacuccugcaacaacuacaugcugacguacaacaagguggagaacaugaccccccgggaccucggggccugcaucgacugcagcgcccgccacaucaacgcccagguggccaagucccacaacaucgcgcugaucuggaacgucaaggacuucaugagccuguccgagcagcuccggaagcagauccgcagcgccgccaagaagaacaaccugcccuucaagcugaccugcgccaccacgcgccagguggugaacgucgugaccaccaagaucgcccucaagggcggguga

SEQ ID NO: 17925 - RNA, 5841 nt, Artificial Sequence
  SARS-CoV-2__MT786444.1__non-structural protein 3 (NSP3) CDS gc
auggcccccaccaaggugaccuucggcgacgacacggucaucgaggugcagggguacaagagcgugaacaucaccuucgagcuggacgagcgcaucgacaagguccucaacgagaagugcuccgccuacaccguggagcugggcaccgaggugaacgaguucgcgugcgucguggccgacgccgugaucaagacgcugcagccggucagcgagcuccugaccccccuggggaucgaccucgacgagugguccauggccaccuacuaccuguucgacgagagcggcgaguucaagcuggccucccacauguacugcagcuucuacccccccgacgaggacgaggaggagggggacugcgaggaggaggaguucgagccguccacccaguacgaguacggcacggaggacgacuaccagggcaagccccucgaguucggggcgaccagcgccgcccugcagcccgaggaggagcaggaggaggacuggcuggacgacgacucccagcagaccgugggccagcaggacgggagcgaggacaaccagaccacgaccauccagaccaucguggagguccagccccagcucgagauggagcugaccccgguggugcagacgaucgaggucaacuccuucagcggcuaccugaagcucaccgacaacguguacaucaagaacgccgacaucguggaggaggcgaagaaggucaagcccaccgugguggucaacgccgccaacguguaccugaagcacgggggcggcguggccggggcccugaacaaggcgaccaacaacgccaugcaggucgaguccgacgacuacaucgccacgaacggcccccucaagguggggggcagcugcguccuguccggccacaaccuggccaagcacugccuccacgugguggggcccaacgucaacaagggcgaggacauccagcugcugaagagcgccuacgagaacuucaaccagcacgaggugcuccuggcgccgcugcucuccgccgggaucuucggcgccgaccccauccacagccugcgggugugcgucgacaccgugcgcaccaacguguaccuggccgucuucgacaagaaccucuacgacaagcugguguccagcuuccuggagaugaagagcgagaagcagguggagcagaagaucgccgagauccccaaggaggaggucaagcccuucaucaccgaguccaagccgagcguggagcagcggaagcaggacgacaagaagaucaaggcgugcguggaggaggucacgaccacccucgaggagaccaaguuccugacggagaaccugcuccuguacaucgacaucaacgggaaccugcaccccgacuccgccacccucgugagcgacaucgacaucaccuuccugaagaaggacgcccccuacaucgugggcgacgucgugcaggagggcgugcugaccgccgucgugauccccacgaagaaggccgggggcaccaccgagaugcucgcgaaggcccugcgcaaggugccgaccgacaacuacaucacgaccuaccccgggcagggccugaacggguacaccgucgaggaggccaagaccgugcucaagaagugcaaguccgccuucuacauccugcccagcaucaucuccaacgagaagcaggagauccugggcaccgugagcuggaaccuccgggagaugcuggcgcacgccgaggagacgcgcaagcugaugcccgucugcguggagaccaaggccaucguguccaccauccagcggaaguacaagggcaucaagauccaggagggggucguggacuacggcgcccgcuucuacuucuacaccagcaagacgaccguggccucccugaucaacacccucaacgaccugaacgagacccuggucacgaugccgcucggguacgugacccacggccugaaccuggaggaggcggcccgguacaugcgcagccucaaggugcccgccaccgucuccgugagcucccccgacgccgugaccgccuacaacggguaccugacgagcuccagcaagacccccgaggagcacuucaucgagaccaucucccuggcgggcagcuacaaggacuggagcuacuccggccagagcacccagcucgggaucgaguuccugaagcggggcgacaaguccgucuacuacacgagcaacccgaccaccuuccaccuggacggggaggugaucaccuucgacaaccucaagacgcugcugucccuccgcgaggugcggaccaucaaggucuucaccaccguggacaacaucaaccugcacacgcagguggucgacaugagcaugaccuacggccagcaguucggccccaccuaccuggacggggccgacgugaccaagaucaagccccacaacucccacgagggcaagacguucuacgugcucccgaacgacgacacccugcgcgucgaggccuucgaguacuaccacaccaccgaccccagcuuccuggggcgguacauguccgcccucaaccacacgaagaaguggaaguacccccaggugaacggccugaccagcaucaagugggccgagaacaacugcuaccuggcgaccgcccuccugacccugcagcagaucgagcucaaguucaaccccccggcccugcaggacgccuacuaccgcgcgcgggccggggaggccgccaacuucugcgcccugauccucgcguacugcaacaagacggugggcgagcugggcgacguccgcgagaccauguccuaccuguuccagcacgccaaccucgacagcugcaagcgggugcugaacgucgugugcaagaccugcgggcagcagcagaccacccugaagggcguggaggccgucauguacauggggacgcucuccuacgagcaguucaagaagggcgugcagauccccugcaccugcgggaagcaggccaccaaguaccuggugcagcaggagagccccuucgucaugauguccgcccccccggcgcaguacgagcugaagcacggcaccuucacgugcgccagcgaguacaccggcaacuaccagugcgggcacuacaagcacaucaccuccaaggagacccucuacugcaucgacggcgcccugcugacgaagagcagcgaguacaaggggcccaucaccgacguguucuacaaggagaacuccuacaccaccacgaucaagcccgugaccuacaagcucgacggcgucgugugcaccgagaucgaccccaagcuggacaacuacuacaagaaggacaacagcuacuucaccgagcagccgaucgaccuggugcccaaccagcccuaccccaacgccuccuucgacaacuucaaguucgucugcgacaacaucaaguucgccgacgaccucaaccagcugacgggguacaagaagccggcgagccgcgagcugaaggugaccuucuuccccgaccucaacggcgacguggucgccaucgacuacaagcacuacacccccuccuucaagaagggcgccaagcugcugcacaagcccaucguguggcacgugaacaacgccaccaacaaggcgacguacaagccgaacaccuggugcauccggugccucuggagcaccaagcccgucgagaccuccaacagcuucgacgugcugaaguccgaggacgcccaggggauggacaaccuggccugcgaggaccucaagcccgugagcgaggaggucguggagaaccccacgauccagaaggacgugcuggagugcaacgucaagaccaccgagguggugggcgacaucauccugaagccggccaacaacucccucaagaucaccgaggaggucgggcacacggaccugauggccgcguacguggacaacuucagccugaccaucaagaagcccaacgagcucucccgcgugcugggccugaagacccucgccacccacgggcuggccgccgucaacagcgugcccugggacacgaucgccaacuacgcgaagccguuccugaacaagguggucuccaccaccaccaacaucgugacgcgcugccucaaccgggugugcaccaacuacaugcccuacuucuucacccugcugcuccagcugugcaccuucacccgcagcacgaacucccggaucaaggccagcaugcccaccaccaucgccaagaacaccgucaaguccgugggcaaguucugccuggaggccagcuucaacuaccucaagagccccaacuucuccaagcugaucaacaucaucaucugguuccugcuccugagcgugugccugggcucccucaucuacagcacggccgcgcuggggguccugauguccaaccucggcaugccgagcuacugcaccggguaccgcgagggcuaccugaacuccaccaacgugaccaucgccacguacugcaccggcagcauccccugcuccgugugccugagcgggcucgacucccuggacaccuaccccagccuggagaccauccagaucacgaucuccagcuucaagugggaccucaccgccuucggccuggucgccgagugguuccuggccuacauccucuucacccgguucuucuacgugcuggggcuggcggccaucaugcagcucuucuucuccuacuucgccgugcacuucaucagcaacuccuggcugauguggcugaucaucaaccugguccagauggcccccaucagcgcgauggugcgcauguacaucuucuucgccuccuucuacuacguguggaagagcuacguccacgugguggacggcugcaacagcuccaccugcaugaugugcuacaagcggaaccgcgccacgcgggucgagugcaccaccaucgugaacgggguccgccggagcuucuacguguacgccaacggcggcaagggguucugcaagcuccacaacuggaacugcgugaacugcgacaccuucugcgccggcuccacguucaucagcgacgaggucgcgcgcgaccugucccugcaguucaagcggccgaucaaccccaccgaccagagcuccuacaucguggacagcgugaccgucaagaacggguccauccaccucuacuucgacaaggccggccagaagaccuacgagcgccacagccugucccacuucgugaaccuggacaaccuccgggccaacaacacgaaggggagccugcccaucaacgugaucgucuucgacggcaaguccaagugcgaggagagcuccgccaagagcgccuccguguacuacagccagcugaugugccagcccauccuccugcuggaccaggcgcucguguccgacgucggcgacagcgccgagguggccgugaagauguucgacgccuacgucaacaccuucagcuccaccuucaacgugccgauggagaagcugaagacccugguggccacggcggaggccgagcucgccaagaacgucagccuggacaacgugcuguccaccuucaucagcgccgcgcgccagggguucguggacuccgacgucgagaccaaggacgugguggagugccucaagcugagccaccaguccgacaucgaggucaccggcgacagcugcaacaacuacaugcugacguacaacaagguggagaacaugaccccccgggaccucggggccugcaucgacugcuccgcccgccacaucaacgcccagguggccaagagccacaacaucgcgcugaucuggaacgucaaggacuucaugucccugagcgagcagcuccggaagcagauccgcuccgccgccaagaagaacaaccugcccuucaagcugaccugcgccaccacgcgccagguggugaacgucgugaccaccaagaucgcccucaagggcggguga

SEQ ID NO: 17926 - RNA, 5841 nt, Artificial Sequence
  SARS-CoV-2__MT786809.1__non-structural protein 3 (NSP3) CDS gc
auggcccccaccaaggugaccuucggcgacgacacggucaucgaggugcagggguacaagagcgugaacaucaccuucgagcuggacgagcgcaucgacaagguccucaacgagaagugcuccgccuacaccguggagcugggcaccgaggugaacgaguucgcgugcgucguggccgacgccgugaucaagacgcugcagccggucagcgagcuccugaccccccuggggaucgaccucgacgagugguccauggccaccuacuaccuguucgacgagagcggcgaguucaagcuggccucccacauguacugcagcuucuacccccccgacgaggacgaggaggagggggacugcgaggaggaggaguucgagccguccacccaguacgaguacggcacggaggacgacuaccagggcaagccccucgaguucggggcgaucagcgccgcccugcagcccgaggaggagcaggaggaggacuggcuggacgacgacucccagcagaccgugggccagcaggacgggagcgaggacaaccagaccaccacgauccagaccaucguggagguccagccccagcucgagauggagcugaccccgguggugcagaccaucgaggucaacuccuucagcggcuaccugaagcucacggacaacguguacaucaagaacgccgacaucguggaggaggcgaagaaggucaagcccaccgugguggucaacgccgccaacguguaccugaagcacgggggcggcguggccggggcccugaacaaggcgaccaacaacgccaugcaggucgaguccgacgacuacaucgccaccaacggcccccucaagguggggggcagcugcguccuguccggccacaaccuggccaagcacugccuccacgugguggggcccaacgucaacaagggcgaggacauccagcugcugaagagcgccuacgagaacuucaaccagcacgaggugcuccuggcgccgcugcucuccgccgggaucuucggcgccgaccccauccacagccugcgggugugcgucgacacggugcgcaccaacguguaccuggccgucuucgacaagaaccucuacgacaagcugguguccagcuuccuggagaugaagagcgagaagcagguggagcagaagaucgccgagauccccaaggaggaggucaagcccuucaucaccgaguccaagccgagcguggagcagcggaagcaggacgacaagaagaucaaggcgugcguggaggaggucaccacgacccucgaggagaccaaguuccugaccgagaaccugcuccuguacaucgacaucaacgggaaccugcaccccgacuccgccacgcucgugagcgacaucgacaucaccuuccugaagaaggacgcccccuacaucgugggcgacgucgugcaggagggcgugcugaccgccgucgugauccccaccaagaaggccgggggcacgaccgagaugcucgcgaaggcccugcgcaaggugccgaccgacaacuacaucaccacguaccccgggcagggccugaacggguacaccgucgaggaggccaagaccgugcucaagaagugcaaguccgccuucuacauccugcccagcaucaucuccaacgagaagcaggagauccugggcaccgugagcuggaaccuccgggagaugcuggcgcacgccgaggagacccgcaagcugaugcccgucugcguggagacgaaggccaucguguccaccauccagcggaaguacaagggcaucaagauccaggagggggucguggacuacggcgcccgcuucuacuucuacaccagcaagaccacgguggccucccugaucaacacccucaacgaccugaacgagacccuggucaccaugccgcucggguacgugacgcacggccugaaccuggaggaggcggcccgguacaugcgcagccucaaggugcccgccaccgucuccgugagcucccccgacgccgugaccgccuacaacggguaccugaccagcuccagcaagacgcccgaggagcacuucaucgagaccaucucccuggcgggcagcuacaaggacuggagcuacuccggccagagcacccagcucgggaucgaguuccugaagcggggcgacaaguccgucuacuacaccagcaacccgacgaccuuccaccuggacggggaggugaucaccuucgacaaccucaagacccugcugucccuccgcgaggugcggacgaucaaggucuucaccaccguggacaacaucaaccugcacacccagguggucgacaugagcaugacguacggccagcaguucggccccaccuaccuggacggggccgacgugaccaagaucaagccccacaacucccacgagggcaagaccuucuacgugcucccgaacgacgacacgcugcgcgucgaggccuucgaguacuaccacaccaccgaccccagcuuccuggggcgguacauguccgcccucaaccacaccaagaaguggaaguacccccaggugaacggccugacgagcaucaagugggccgacaacaacugcuaccuggcgaccgcccuccugacccugcagcagaucgagcucaaguucaaccccccggcccugcaggacgccuacuaccgcgcgcgggccggggaggccgccaacuucugcgcccugauccucgcguacugcaacaagaccgugggcgagcugggcgacguccgcgagacgauguccuaccuguuccagcacgccaaccucgacagcugcaagcgggugcugaacgucgugugcaagaccugcgggcagcagcagaccacccugaagggcguggaggccgucauguacauggggacccucuccuacgagcaguucaagaagggcgugcagauccccugcacgugcgggaagcaggccaccaaguaccuggugcagcaggagagccccuucgucaugauguccgcccccccggcgcaguacgagcugaagcacggcaccuucaccugcgccagcgaguacacgggcaacuaccagugcgggcacuacaagcacaucaccuccaaggagacccucuacugcaucgacggcgcccugcugaccaagagcagcgaguacaaggggcccaucacggacguguucuacaaggagaacuccuacaccaccaccaucaagcccgugacguacaagcucgacggcgucgugugcaccgagaucgaccccaagcuggacaacuacuacaagaaggacaacagcuacuucaccgagcagccgaucgaccuggugcccaaccagcccuaccccaacgccuccuucgacaacuucaaguucgucugcgacaacaucaaguucgccgacgaccucaaccagcugaccggguacaagaagccggcgagccgcgagcugaaggugacguucuuccccgaccucaacggcgacguggucgccaucgacuacaagcacuacacccccuccuucaagaagggcgccaagcugcugcacaagcccaucguguggcacgugaacaacgccaccaacaaggcgaccuacaagccgaacacguggugcauccggugccucuggagcaccaagcccgucgagaccuccaacagcuucgacgugcugaaguccgaggacgcccaggggauggacaaccuggccugcgaggaccucaagcccgugagcgaggaggucguggagaaccccaccauccagaaggacgugcuggagugcaacgucaagacgaccgagguggugggcgacaucauccugaagccggccaacaacucccucaagaucaccgaggaggucgggcacaccgaccugauggccgcguacguggacaacagcucccugacgaucaagaagcccaacgagcucagccgcgugcugggccugaagacccucgccacccacgggcuggccgccgucaacuccgugcccugggacaccaucgccaacuacgcgaagccguuccugaacaagguggucagcacgaccaccaacaucgugacccgcugccucaaccgggugugcacgaacuacaugcccuacuucuucacccugcugcuccagcugugcaccuucacccgcuccaccaacagccggaucaaggccuccaugcccacgaccaucgccaagaacaccgucaagagcgugggcaaguucugccuggaggccagcuucaacuaccucaagucccccaacuucagcaagcugaucaacaucaucaucugguuccugcuccuguccgugugccugggcagccucaucuacuccaccgccgcgcuggggguccugaugagcaaccucggcaugccguccuacugcacgggguaccgcgagggcuaccugaacagcaccaacgugaccaucgccaccuacugcacgggcuccauccccugcagcgugugccuguccgggcucgacagccuggacaccuaccccucccuggagaccauccagaucaccaucagcuccuucaagugggaccucacggccuucggccuggucgccgagugguuccuggccuacauccucuucacccgguucuucuacgugcuggggcuggcggccaucaugcagcucuucuucagcuacuucgccgugcacuucaucuccaacagcuggcugauguggcugaucaucaaccugguccagauggcccccaucuccgcgauggugcgcauguacaucuucuucgccagcuucuacuacguguggaagagcuacguccacgugguggacggcugcaacuccagcaccugcaugaugugcuacaagcggaaccgcgccacccgggucgagugcacgaccaucgugaacgggguccgccgguccuucuacguguacgccaacggcggcaagggguucugcaagcuccacaacuggaacugcgugaacugcgacaccuucugcgccggcagcaccuucaucuccgacgaggucgcgcgcgaccugagccugcaguucaagcggccgaucaaccccacggaccaguccagcuacaucguggacuccgugaccgucaagaacgggagcauccaccucuacuucgacaaggccggccagaagaccuacgagcgccacucccugagccacuucgugaaccuggacaaccuccgggccaacaacaccaaggggucccugcccaucaacgugaucgucuucgacggcaagagcaagugcgaggaguccagcgccaaguccgccagcguguacuacucccagcugaugugccagcccauccuccugcuggaccaggcgcucgugagcgacgucggcgacagcgccgagguggccgugaagauguucgacgccuacgucaacacguucuccagcaccuucaacgugccgauggagaagcugaagacccugguggccaccgcggaggccgagcucgccaagaacgucucccuggacaacgugcugagcacguucaucuccgccgcgcgccagggguucguggacagcgacgucgagaccaaggacgugguggagugccucaagcugucccaccagagcgacaucgaggucaccggcgacuccugcaacaacuacaugcugaccuacaacaagguggagaacaugacgccccgggaccucggggccugcaucgacugcagcgcccgccacaucaacgcccagguggccaagucccacaacaucgcgcugaucuggaacgucaaggacuucaugagccuguccgagcagcuccggaagcagauccgcagcgccgccaagaagaacaaccugcccuucaagcugaccugcgccaccacccgccagguggugaacgucgugacgaccaagaucgcccucaagggcggguga

SEQ ID NO: 17927 - RNA, 5841 nt, Artificial Sequence
  SARS-CoV-2__MT786845.1__non-structural protein 3 (NSP3) CDS gc
auggcccccaccaaggugaccuucggcgacgacacggucaucgaggugcagggguacaagagcgugaacaucaccuucgagcuggacgagcgcaucgacaagguccucaacgagaagugcuccgccuacaccguggagcugggcaccgaggugaacgaguucgcgugcgucguggccgacgccgugaucaagacgcugcagccggucagcgagcuccugaccccccuggggaucgaccucgacgagugguccauggccaccuacuaccuguucgacgagagcggcgaguucaagcuggccucccacauguacugcagcuucuacccccccgacgaggacgaggaggagggggacugcgaggaggaggaguucgagccguccacccaguacgaguacggcacggaggacgacuaccagggcaagccccucgaguucggggcgaccagcgccgcccugcagcccgaggaggagcaggaggaggacuggcuggacgacgacucccagcagaccgugggccagcaggacgggagcgaggacaaccagaccacgaccauccagaccaucguggagguccagccccagcucgagauggagcugaccccgguggugcagacgaucgaggucaacuccuucagcggcuaccugaagcucaccgacaacguguacaucaagaacgccgacaucguggaggaggcgaagaaggucaagcccaccgugguggucaacgccgccaacguguaccugaagcacgggggcggcguggccggggcccugaacaaggcgaccaacaacgccaugcaggucgaguccgacgacuacaucgccacgaacggcccccucaagguggggggcagcugcguccuguccggccacaaccuggccaagcacugccuccacgugguggggcccaacgucaacaagggcgaggacauccagcugcugaagagcgccuacgagaacuucaaccagcacgaggugcuccuggcgccgcugcucuccgccgggaucuucggcgccgaccccauccacagccugcgggugugcgucgacaccgugcgcaccaacguguaccuggccgucuucgacaagaaccucuacgacaagcugguguccagcuuccuggagaugaagagcgagaagcagguggagcagaagaucgccgagauccccaaggaggaggucaagcccuucaucaccgaguccaagccgagcguggagcagcggaagcaggacgacaagaagaucaaggcgugcguggaggaggucacgaccacccucgaggagaccaaguuccugacggagaaccugcuccuguacaucgacaucaacgggaaccugcaccccgacuccgccacccucgugagcgacaucgacaucaccuuccugaagaaggacgcccccuacaucgugggcgacgucgugcaggagggcgugcugaccgccgucgugauccccacgaagaaggccgggggcaccaccgagaugcucgcgaaggcccugcgcaaggugccgaccgacaacuacaucacgaccuaccccgggcagggccugaacggguacaccgucgaggaggccaagaccgugcucaagaagugcaaguccgccuucuacauccugcccagcaucaucuccaacgagaagcaggagauccugggcaccgugagcuggaaccuccgggagaugcuggcgcacgccgaggagacgcgcaagcugaugcccgucugcguggagaccaaggccaucguguccaccauccagcggaaguacaagggcaucaagauccaggagggggucguggacuacggcgcccgcuucuacuucuacaccagcaagacgaccguggccucccugaucaacacccucaacgaccugaacgagacccuggucacgaugccgcucggguacgugacccacggccugaaccuggaggaggcggcccgguacaugcgcagccucaaggugcccgccaccgucuccgugagcucccccgacgccgugaccgccuacaacggguaccugacgagcuccagcaagacccccgaggagcacuucaucgagaccaucucccuggcgggcagcuacaaggacuggagcuacuccggccagagcacccagcucgggaucgaguuccugaagcggggcgacaaguccgucuacuacacgagcaacccgaccaccuuccaccuggacggggaggugaucaccuucgacaaccucaagacgcugcugucccuccgcgaggugcggaccaucaaggucuucaccaccguggacaacaucaaccugcacacgcagguggucgacaugagcaugaccuacggccagcaguucggccccaccuaccuggacggggccgacgugaccaagaucaagccccacaacucccacgagggcaagacguucuacgugcucccgaacgacgacacccugcgcgucgaggccuucgaguacuaccacaccaccgaccccagcuuccuggggcgguacauguccgcccucaaccacacgaagaaguggaaguacccccaggugaacggccugaccagcaucaagugggccgacaacaacugcuaccuggcgaccgcccuccugacccugcagcagaucgagcucaaguucaaccccccggcccugcaggacgccuacuaccgcgcgcgggccggggaggccgccaacuucugcgcccugauccucgcguacugcaacaagacggugggcgagcugggcgacguccgcgagaccauguccuaccuguuccagcacgccaaccucgacagcugcaagcgggugcugaacgucgugugcaagaccugcgggcagcagcagaccacccugaagggcguggaggccgucauguacauggggacgcucuccuacgagcaguucaagaagggcgugcagauccugugcaccugcgggaagcaggccaccaaguaccuggugcagcaggagagccccuucgucaugauguccgccccccccgcgcaguacgagcucaagcacggcaccuucacgugcgccagcgaguacaccggcaacuaccagugcgggcacuacaagcacaucaccuccaaggagacccuguacugcaucgacggcgcccugcucacgaagagcagcgaguacaaggggccgaucaccgacguguucuacaaggagaacuccuacaccaccacgaucaagcccgugaccuacaagcuggacggcgucgugugcaccgagaucgaccccaagcuggacaacuacuacaagaaggacaacagcuacuucaccgagcagcccaucgaccucgugccgaaccagcccuaccccaacgccuccuucgacaacuucaaguucgucugcgacaacaucaaguucgccgacgaccugaaccagcugacgggguacaagaagcccgcgagccgcgagcucaaggugaccuucuucccggaccugaacggcgacguggucgccaucgacuacaagcacuacacccccuccuucaagaagggcgccaagcugcuccacaagcccaucguguggcacgugaacaacgccaccaacaaggcgacguacaagcccaacaccuggugcauccggugccuguggagcaccaagccggucgagaccuccaacagcuucgacgugcugaaguccgaggacgcccaggggauggacaaccucgccugcgaggaccugaagcccgugagcgaggaggucguggagaaccccacgauccagaaggacgugcuggagugcaacgucaagaccaccgagguggugggcgacaucauccucaagcccgccaacaacucccugaagaucaccgaggaggucgggcacacggaccugauggccgcguacguggacaacagcucccucaccaucaagaagccgaacgagcugagccgcgugcugggccucaagacccuggccacccacgggcuggccgccgucaacuccgugcccugggacacgaucgccaacuacgcgaagcccuuccucaacaagguggucagcaccaccaccaacaucgugacgcgcugccugaaccgggugugcaccaacuacaugccguacuucuucacccugcuccugcagcugugcaccuucacccgcuccacgaacagccggaucaaggccuccaugcccaccaccaucgccaagaacaccgucaagagcgugggcaaguucugccucgaggccagcuucaacuaccugaagucccccaacuucagcaagcugaucaacaucaucaucugguuccuccugcuguccgugugccucggcagccugaucuacuccacggccgcgcuggggguccucaugagcaaccugggcaugcccuccuacugcaccggguaccgcgagggcuaccugaacagcaccaacgugaccaucgccacguacugcaccggcuccaucccgugcagcgugugccucuccgggcuggacagccuggacaccuaccccucccucgagaccauccagaucacgaucagcuccuucaagugggaccugaccgccuucggccuggucgccgagugguuccucgccuacauccuguucacccgguucuucuacgugcuggggcucgcggccaucaugcagcuguucuucagcuacuucgccgugcacuucaucuccaacagcuggcugauguggcugaucaucaaccucguccagauggcccccaucuccgcgauggugcgcauguacaucuucuucgccagcuucuacuacguguggaagagcuacguccacgugguggacggcugcaacuccagcaccugcaugaugugcuacaagcggaaccgcgccacgcgggucgagugcaccaccaucgugaacgggguccgccgguccuucuacguguacgccaacggcggcaagggguucugcaagcugcacaacuggaacugcgugaacugcgacaccuucugcgccggcagcacguucaucuccgacgaggucgcgcgcgaccugagccuccaguucaagcggcccaucaacccgaccgaccaguccagcuacaucguggacuccgugaccgucaagaacgggagcauccaccuguacuucgacaaggccggccagaagaccuacgagcgccacucccugagccacuucgugaaccucgacaaccugcgggccaacaacacgaaggggucccugcccaucaacgugaucgucuucgacggcaagagcaagugcgaggaguccagcgccaaguccgccagcguguacuacucccagcucaugugccagcccauccugcugcucgaccaggcgcuggugagcgacgucggcgacagcgccgagguggccgugaagauguucgacgccuacgucaacaccuucuccagcaccuucaacgugcccauggagaagcugaagacccucguggccacggcggaggccgagcuggccaagaacgucucccuggacaacgugcucagcaccuucaucuccgccgcgcgccagggguucguggacagcgacgucgagaccaaggacgugguggagugccugaagcugucccaccagagcgacaucgaggucaccggcgacuccugcaacaacuacaugcucacguacaacaagguggagaacaugaccccgcgggaccugggggccugcaucgacugcagcgcccgccacaucaacgcccagguggccaagucccacaacaucgcgcugaucuggaacgucaaggacuucaugagccucuccgagcagcugcggaagcagauccgcagcgccgccaagaagaacaaccugcccuucaagcucaccugcgccaccacgcgccagguggugaacgucgugaccaccaagaucgcccugaagggcggguga

SEQ ID NO: 17928 - RNA, 5841 nt, Artificial Sequence
  SARS-CoV-2__MT787503.1__non-structural protein 3 (NSP3) CDS gc
auggcccccaccaaggugaccuucggcgacgacacggucaucgaggugcagggguacaagagcgugaacaucaccuucgagcuggacgagcgcaucgacaagguccucaacgagaagugcuccgccuacaccguggagcugggcaccgaggugaacgaguucgcgugcgucguggccgacgccgugaucaagacgcugcagccggucagcgagcuccugaccccccuggggaucgaccucgacgagugguccauggccaccuacuaccuguucgacgagagcggcgaguucaagcuggccucccacauguacugcagcuucuacccccccgacgaggacgaggaggagggggacugcgaggaggaggaguucgagccguccacccaguacgaguacggcacggaggacgacuaccagggcaagccccucgaguucggggcgaccagcgccgcccugcagcccgaggaggagcaggaggaggacuggcuggacgacgacucccagcagaccgugggccagcaggacgggagcgaggacaaccagaccacgaccauccagaccaucguggagguccagccccagcucgagauggagcugaccccgguggugcagacgaucgaggucaacuccuucagcggcuaccugaagcucaccgacaacguguacaucaagaacgccgacaucguggaggaggcgaagaaggucaagcccaccgugguggucaacgccgccaacguguaccugaagcacgggggcggcguggccggggcccugaacaaggcgaccaacaacgccaugcaggucgaguccgacgacuacaucgccacgaacggcccccucaagguggggggcagcugcguccuguccggccacaaccuggccaagcacugccuccacgugguggggcccaacgucaacaagggcgaggacauccagcugcugaagagcgccuacgagaacuucaaccagcacgaggugcuccuggcgccgcugcucuccgccgggaucuucggcgccgaccccauccacagccugcgggugugcgucgacaccgugcgcaccaacguguaccuggccgucuucgacaagaaccucuacgacaagcugguguccagcuuccuggagaugaagagcgagaagcagguggagcagaagaucgccgagauccccaaggaggaggucaagcccuucaucaccgaguccaagccgagcguggagcagcggaagcaggacgacaagaagaucaaggcgugcguggaggaggucacgaccacccucgaggagaccaaguuccugacggagaaccugcuccuguacaucgacaucaacgggaaccugcaccccgacuccgccacccucgugagcgacaucgacaucaccuuccugaagaaggacgcccccuacaucgugggcgacgucgugcaggagggcgugcugaccgccgucgugauccccacgaagaaggccgggggcaccaccgagaugcucgcgaaggcccugcgcaaggugccgaccgacaacuacaucacgaccuaccccgggcagggccugaacggguacaccgucgaggaggccaagaccgugcucaagaagugcaaguccgccuucuacauccugcccagcaucaucuccaacgagaagcaggagauccugggcaccgugagcuggaaccuccgggagaugcuggcgcacgccgaggagacgcgcaagcugaugcccgucugcguggagaccaaggccaucguguccaccauccagcggaaguacaagggcaucaagauccaggagggggucguggacuacggcgcccgcuucuacuucuacaccagcaagacgaccguggccucccugaucaacacccucaacgaccugaacgagacccuggucacgaugccgcucggguacgugacccacggccugaaccuggaggaggcggcccgguacaugcgcagccucaaggugcccgccaccgucuccgugagcucccccgacgccgugaccgccuacaacggguaccugacgagcuccagcaagacccccgaggagcacuucaucgagaccaucucccuggcgggcagcuacaaggacuggagcuacuccggccagagcacccagcucgggaucgaguuccugaagcggggcgacaaguccgucuacuacacgagcaacccgaccaccuuccaccuggacggggaggugaucaccuucgacaaccucaagacgcugcugucccuccgcgaggugcggaccaucaaggucuucaccaccguggacaacaucaaccugcacacgcaggugauggacaugagcaugaccuacggccagcaguucggccccaccuaccuggacggggccgacgucaccaagaucaagccccacaacucccacgagggcaagacguucuacgugcucccgaacgacgacacccugcgcguggaggccuucgaguacuaccacaccaccgaccccagcuuccuggggcgguacauguccgcccucaaccacacgaagaaguggaaguacccccaggucaacggccugaccagcaucaagugggccgacaacaacugcuaccuggcgaccgcccuccugacccugcagcagaucgagcucaaguucaaccccccggcccugcaggacgccuacuaccgcgcgcgggccggggaggccgccaacuucugcgcccugauccucgcguacugcaacaagacggugggcgagcugggcgacgugcgcgagaccauguccuaccuguuccagcacgccaaccucgacagcugcaagcggguccugaacguggucugcaagaccugcgggcagcagcagaccacccugaagggcguggaggccgugauguacauggggacgcucuccuacgagcaguucaagaagggcguccagauccccugcaccugcgggaagcaggccaccaaguaccuggugcagcaggagagccccuucgugaugauguccgcccccccggcgcaguacgagcugaagcacggcaccuucacgugcgccagcgaguacaccggcaacuaccagugcgggcacuacaagcacaucaccuccaaggagacccucuacugcaucgacggcgcccugcugacgaagagcagcgaguacaaggggcccaucaccgacgucuucuacaaggagaacuccuacaccaccacgaucaagcccgugaccuacaagcucgacggcguggucugcaccgagaucgaccccaagcuggacaacuacuacaagaaggacaacagcuacuucaccgagcagccgaucgaccuggugcccaaccagcccuaccccaacgccuccuucgacaacuucaaguucgugugcgacaacaucaaguucgccgacgaccucaaccagcugacgggguacaagaagccggcgagccgcgagcugaaggucaccuucuuccccgaccucaacggcgacgugguggccaucgacuacaagcacuacacccccuccuucaagaagggcgccaagcugcugcacaagcccaucgucuggcacgugaacaacgccaccaacaaggcgacguacaagccgaacaccuggugcauccggugccucuggagcaccaagcccguggagaccuccaacagcuucgacguccugaaguccgaggacgcccaggggauggacaaccuggccugcgaggaccucaagcccgugagcgaggagguggucgagaaccccacgauccagaaggacgugcuggagugcaacgugaagaccaccgaggucgugggcgacaucauccugaagccggccaacaacucccucaagaucaccgaggagguggggcacacggaccugauggccgcguacgucgacaacagcucccugaccaucaagaagcccaacgagcucagccgcgugcugggccugaagacccucgccacccacgggcuggccgccgugaacuccguccccugggacacgaucgccaacuacgcgaagccguuccugaacaagguggugagcaccaccaccaacaucgucacgcgcugccucaaccgggugugcaccaacuacaugcccuacuucuucacccugcugcuccagcugugcaccuucacccgcuccacgaacagccggaucaaggccuccaugcccaccaccaucgccaagaacaccgugaagagcgucggcaaguucugccuggaggccagcuucaacuaccucaagucccccaacuucagcaagcugaucaacaucaucaucugguuccugcuccuguccgugugccugggcagccucaucuacuccacggccgcgcugggggugcugaugagcaaccucggcaugccguccuacugcaccggguaccgcgagggcuaccugaacagcaccaacgucaccaucgccacguacugcaccggcuccauccccugcagcgugugccuguccgggcucgacagccuggacaccuaccccucccuggagaccauccagaucacgaucagcuccuucaagugggaccucaccgccuucggccugguggccgagugguuccuggccuacauccucuucacccgguucuucuacguccuggggcuggcggccaucaugcagcucuucuucagcuacuucgccgugcacuucaucuccaacagcuggcugauguggcugaucaucaaccuggugcagauggcccccaucuccgcgaugguccgcauguacaucuucuucgccagcuucuacuacguguggaagagcuacgugcacgucguggacggcugcaacuccagcaccugcaugaugugcuacaagcggaaccgcgccacgcggguggagugcaccaccaucgucaacggggugcgccgguccuucuacgucuacgccaacggcggcaagggguucugcaagcuccacaacuggaacugcgugaacugcgacaccuucugcgccggcagcacguucaucuccgacgagguggcgcgcgaccugagccugcaguucaagcggccgaucaaccccaccgaccaguccagcuacaucgucgacuccgugaccgugaagaacgggagcauccaccucuacuucgacaaggccggccagaagaccuacgagcgccacucccugagccacuucgucaaccuggacaaccuccgggccaacaacacgaaggggucccugcccaucaacgugaucguguucgacggcaagagcaagugcgaggaguccagcgccaaguccgccagcgucuacuacucccagcugaugugccagcccauccuccugcuggaccaggcgcucgugagcgacgugggcgacagcgccgaggucgccgugaagauguucgacgccuacgugaacaccuucuccagcaccuucaacgucccgauggagaagcugaagacccugguggccacggcggaggccgagcucgccaagaacgugucccuggacaacguccugagcaccuucaucuccgccgcgcgccagggguucguggacagcgacguggagaccaaggacgucguggagugccucaagcugucccaccagagcgacaucgaggugaccggcgacuccugcaacaacuacaugcugacguacaacaaggucgagaacaugaccccccgggaccucggggccugcaucgacugcagcgcccgccacaucaacgcccagguggccaagucccacaacaucgcgcugaucuggaacgugaaggacuucaugagccuguccgagcagcuccggaagcagauccgcagcgccgccaagaagaacaaccugcccuucaagcugaccugcgccaccacgcgccaggucgugaacguggucaccaccaagaucgcccucaagggcggguga

SEQ ID NO: 17929 - RNA, 5841 nt, Artificial Sequence
  SARS-CoV-2__MT781415.1__non-structural protein 3 (NSP3) CDS gc
auggcccccaccaaggugaccuucggcgacgacacggucaucgaggugcagggguacaagagcgugaacaucaccuucgagcuggacgagcgcaucgacaagguccucaacgagaagugcuccgccuacaccguggagcugggcaccgaggugaacgaguucgcgugcgucguggccgacgccgugaucaagacgcugcagccggucagcgagcuccugaccccccuggggaucgaccucgacgagugguccauggccaccuacuaccuguucgacgagagcggcgaguucaagcuggccucccacauguacugcagcuucuacccccccgacgaggacgaggaggagggggacugcgaggaggaggaguucgagccguccacccaguacgaguacggcacggaggacgacuaccagggcaagccccucgaguucggggcgaccagcgccgcccugcagcccgaggaggagcaggaggaggacuggcuggacgacgacucccagcagaccgugggccagcaggacgggagcgaggacaaccagaccacgaccauccagaccaucguggagguccagccccagcucgagauggagcugaccccgguggugcagacgaucgaggucaacuccuucagcggcuaccugaagcucaccgacaacguguacaucaagaacgccgacaucguggaggaggcgaagaaggucaagcccaccgugguggucaacgccgccaacguguaccugaagcacgggggcggcguggccggggcccugaacaaggcgaccaacaacgccaugcaggucgaguccgacgacuacaucgccacgaacggcccccucaagguggggggcagcugcguccuguccggccacaaccuggccaagcacugccuccacgugguggggcccaacgucaacaagggcgaggacauccagcugcugaagagcgccuacgagaacuucaaccagcacgaggugcuccuggcgccgcugcucuccgccgggaucuucggcgccgaccccauccacagccugcgggugugcgucgacaccgugcgcaccaacguguaccuggccgucuucgacaagaaccucuacgacaagcugguguccagcuuccuggagaugaagagcgagaagcagguggagcagaagaucgccgagauccccaaggaggaggucaagcccuucaucaccgaguccaagccgagcguggagcagcggaagcaggacgacaagaagaucaaggcgugcguggaggaggucacgaccacccucgaggagaccaaguuccugacggagaaccugcuccuguacaucgacaucaacgggaaccugcaccccgacuccgccacccucgugagcgacaucgacaucaccuuccugaagaaggacgcccccuacaucgugggcgacgucgugcaggagggcgugcugaccgccgucgugauccccacgaagaaggccgggggcaccaccgagaugcucgcgaaggcccugcgcaaggugccgaccgacaacuacaucacgaccuaccccgggcagggccugaacggguacaccgucgaggaggccaagaccgugcucaagaagugcaaguccgccuucuacauccugcccagcaucaucuccaacgagaagcaggagauccugggcaccgugagcuggaacuuccgggagaugcucgcgcacgccgaggagacgcgcaagcugaugcccgucugcguggagaccaaggccaucguguccaccauccagcggaaguacaagggcaucaagauccaggagggggucguggacuacggcgcccgcuucuacuucuacaccagcaagacgaccguggccucccugaucaacacccugaacgaccucaacgagacccuggucacgaugccgcugggguacgugacccacggccucaaccuggaggaggcggcccgguacaugcgcagccugaaggugcccgccaccgucuccgugagcucccccgacgccgugaccgccuacaacggguaccucacgagcuccagcaagacccccgaggagcacuucaucgagaccaucucccuggcgggcagcuacaaggacuggagcuacuccggccagagcacccagcuggggaucgaguuccucaagcggggcgacaaguccgucuacuacacgagcaacccgaccaccuuccaccuggacggggaggugaucaccuucgacaaccugaagacgcuccugucccugcgcgaggugcggaccaucaaggucuucaccaccguggacaacaucaaccuccacacgcagguggucgacaugagcaugaccuacggccagcaguucggccccaccuaccuggacggggccgacgugaccaagaucaagccccacaacucccacgagggcaagacguucuacgugcugccgaacgacgacacccuccgcgucgaggccuucgaguacuaccacaccaccgaccccagcuuccuggggcgguacauguccgcccugaaccacacgaagaaguggaaguacccccaggugaacggccucaccagcaucaagugggccgacaacaacugcuaccuggcgaccgcccugcucacccugcagcagaucgagcugaaguucaaccccccggcccuccaggacgccuacuaccgcgcgcgggccggggaggccgccaacuucugcgcccugauccuggcguacugcaacaagacggugggcgagcucggcgacguccgcgagaccauguccuaccuguuccagcacgccaaccuggacagcugcaagcgggugcucaacgucgugugcaagaccugcgggcagcagcagaccacccugaagggcguggaggccgucauguacauggggacgcuguccuacgagcaguucaagaagggcgugcagauccccugcaccugcgggaagcaggccaccaaguaccucgugcagcaggagagccccuucgucaugauguccgcccccccggcgcaguacgagcugaagcacggcaccuucacgugcgccagcgaguacaccggcaacuaccagugcgggcacuacaagcacaucaccuccaaggagacccuguacugcaucgacggcgcccuccugacgaagagcagcgaguacaaggggcccaucaccgacguguucuacaaggagaacuccuacaccaccacgaucaagcccgugaccuacaagcuggacggcgucgugugcaccgagaucgaccccaagcucgacaacuacuacaagaaggacaacagcuacuucaccgagcagccgaucgaccuggugcccaaccagcccuaccccaacgccuccuucgacaacuucaaguucgucugcgacaacaucaaguucgccgacgaccugaaccagcucacgggguacaagaagccggcgagccgcgagcugaaggugaccuucuuccccgaccugaacggcgacguggucgccaucgacuacaagcacuacacccccuccuucaagaagggcgccaagcuccugcacaagcccaucguguggcacgugaacaacgccaccaacaaggcgacguacaagccgaacaccuggugcauccggugccuguggagcaccaagcccgucgagaccuccaacagcuucgacgugcucaaguccgaggacgcccaggggauggacaaccuggccugcgaggaccugaagcccgugagcgaggaggucguggagaaccccacgauccagaaggacgugcucgagugcaacgucaagaccaccgagguggugggcgacaucauccugaagccggccaacaacucccugaagaucaccgaggaggucgggcacacggaccucauggccgcguacguggacaacagcucccugaccaucaagaagcccaacgagcugagccgcgugcucggccugaagacccuggccacccacgggcucgccgccgucaacuccgugcccugggacacgaucgccaacuacgcgaagccguuccugaacaagguggucagcaccaccaccaacaucgugacgcgcugccugaaccgggugugcaccaacuacaugcccuacuucuucacccuccugcugcagcucugcaccuucacccgcuccacgaacagccggaucaaggccuccaugcccaccaccaucgccaagaacaccgucaagagcgugggcaaguucugccuggaggccagcuucaacuaccugaagucccccaacuucagcaagcucaucaacaucaucaucugguuccugcugcucuccgugugccugggcagccugaucuacuccacggccgcgcucgggguccugaugagcaaccugggcaugccguccuacugcaccggguaccgcgagggcuaccucaacagcaccaacgugaccaucgccacguacugcaccggcuccauccccugcagcgugugccuguccgggcuggacagccucgacaccuaccccucccuggagaccauccagaucacgaucagcuccuucaagugggaccugaccgccuucggccucgucgccgagugguuccuggccuacauccuguucacccgguucuucuacgugcucgggcuggcggccaucaugcagcuguucuucagcuacuucgccgugcacuucaucuccaacagcuggcucauguggcugaucaucaaccugguccagauggcccccaucuccgcgauggugcgcauguacaucuucuucgccagcuucuacuacguguggaagagcuacguccacgugguggacggcugcaacuccagcaccugcaugaugugcuacaagcggaaccgcgccacgcgggucgagugcaccaccaucgugaacgggguccgccgguccuucuacguguacgccaacggcggcaagggguucugcaagcugcacaacuggaacugcgugaacugcgacaccuucugcgccggcagcacguucaucuccgacgaggucgcgcgcgaccucagccugcaguucaagcggccgaucaaccccaccgaccaguccagcuacaucguggacuccgugaccgucaagaacgggagcauccaccuguacuucgacaaggccggccagaagaccuacgagcgccacucccucagccacuucgugaaccuggacaaccugcgggccaacaacacgaaggggucccuccccaucaacgugaucgucuucgacggcaagagcaagugcgaggaguccagcgccaaguccgccagcguguacuacucccagcugaugugccagcccauccugcuccuggaccaggcgcuggugagcgacgucggcgacagcgccgagguggccgugaagauguucgacgccuacgucaacaccuucuccagcaccuucaacgugccgauggagaagcucaagacccugguggccacggcggaggccgagcuggccaagaacgucucccucgacaacgugcugagcaccuucaucuccgccgcgcgccagggguucguggacagcgacgucgagaccaaggacgugguggagugccugaagcucucccaccagagcgacaucgaggucaccggcgacuccugcaacaacuacaugcugacguacaacaagguggagaacaugaccccccgggaccugggggccugcaucgacugcagcgcccgccacaucaacgcccagguggccaagucccacaacaucgcgcucaucuggaacgucaaggacuucaugagccuguccgagcagcugcggaagcagauccgcagcgccgccaagaagaacaaccuccccuucaagcugaccugcgccaccacgcgccagguggugaacgucgugaccaccaagaucgcccugaagggcggguga

SEQ ID NO: 17930 - RNA, 5841 nt, Artificial Sequence
  SARS-CoV-2__MT782381.1__non-structural protein 3 (NSP3) CDS gc
auggcccccaccaaggugaccuucggcgacgacacggucaucgaggugcagggguacaagagcgugaacaucaccuucgagcuggacgagcgcaucgacaagguccucaacgagaagugcuccgccuacaccguggagcugggcaccgaggugaacgaguucgcgugcgucguggccgacgccgugaucaagacgcugcagccggucagcgagcuccugaccucccuggggaucgaccucgacgaguggagcauggccaccuacuaccuguucgacgaguccggcgaguucaagcuggccagccacauguacugcuccuucuacccccccgacgaggacgaggaggagggggacugcgaggaggaggaguucgagcccagcacccaguacgaguacggcacggaggacgacuaccagggcaagccgcucgaguucggggcgaccuccgccgcccugcagcccgaggaggagcaggaggaggacuggcuggacgacgacagccagcagaccgugggccagcaggacggguccgaggacaaccagaccacgaccauccagaccaucguggagguccagccccagcucgagauggagcugacccccguggugcagacgaucgaggucaacagcuucuccggcuaccugaagcucaccgacaacguguacaucaagaacgccgacaucguggaggaggcgaagaaggucaagccgaccgugguggucaacgccgccaacguguaccugaagcacgggggcggcguggccggggcccugaacaaggcgaccaacaacgccaugcaggucgagagcgacgacuacaucgccacgaacggcccccucaagguggggggcuccugcguccugagcggccacaaccuggccaagcacugccuccacgugguggggcccaacgucaacaagggcgaggacauccagcugcugaaguccgccuacgagaacuucaaccagcacgaggugcuccuggcgccccugcucagcgccgggaucuucggcgccgacccgauccacucccugcgggugugcgucgacaccgugcgcaccaacguguaccuggccgucuucgacaagaaccucuacgacaagcuggugagcagcuuccuggagaugaaguccgagaagcagguggagcagaagaucgccgagauccccaaggaggaggucaagcccuucaucaccgagagcaagcccuccguggagcagcggaagcaggacgacaagaagaucaaggcgugcguggaggaggucacgaccacccucgaggagaccaaguuccugacggagaaccugcuccuguacaucgacaucaacgggaaccugcacccggacagcgccacccucguguccgacaucgacaucaccuuccugaagaaggacgcccccuacaucgugggcgacgucgugcaggagggcgugcugaccgccgucgugauccccacgaagaaggccgggggcaccaccgagaugcucgcgaaggcccugcgcaaggugcccaccgacaacuacaucacgaccuacccggggcagggccugaacggguacaccgucgaggaggccaagaccgugcucaagaagugcaagagcgccuucuacauccugcccuccaucaucagcaacgagaagcaggagauccugggcaccguguccuggaaccuccgggagaugcuggcgcacgccgaggagacgcgcaagcugaugcccgucugcguggagaccaaggccaucgugagcaccauccagcggaaguacaagggcaucaagauccaggagggggucguggacuacggcgcccgcuucuacuucuacaccuccaagacgaccguggccagccugaucaacacccucaacgaccugaacgagacccuggucacgaugccccucggguacgugacccacggccugaaccuggaggaggcggcccgguacaugcgcucccucaaggugccggccaccgucagcguguccagccccgacgccgugaccgccuacaacggguaccugacguccagcuccaagacccccgaggagcacuucaucgagaccaucagccuggcgggcagcuacaaggacugguccuacagcggccaguccacccagcucgggaucgaguuccugaagcggggcgacaagagcgucuacuacacguccaaccccaccaccuuccaccuggacggggaggugaucaccuucgacaaccucaagacgcugcugagccuccgcgaggugcggaccaucaaggucuucaccaccguggacaacaucaaccugcacacgcagguggucgacauguccaugaccuacggccagcaguucggcccgaccuaccuggacggggccgacgugaccaagaucaagccccacaacagccacgagggcaagacguucuacgugcuccccaacgacgacacccugcgcgucgaggccuucgaguacuaccacaccaccgacccguccuuccuggggcgguacaugagcgcccucaaccacacgaagaaguggaaguacccccaggugaacggccugaccuccaucaagugggccgacaacaacugcuaccuggcgaccgcccuccugacccugcagcagaucgagcucaaguucaacccccccgcccugcaggacgccuacuaccgcgcgcgggccggggaggccgccaacuucugcgcccugauccucgcguacugcaacaagacggugggcgagcugggcgacguccgcgagaccaugagcuaccuguuccagcacgccaaccucgacuccugcaagcgggugcugaacgucgugugcaagaccugcgggcagcagcagaccacccugaagggcguggaggccgucauguacauggggacgcucagcuacgagcaguucaagaagggcgugcagaucccgugcaccugcgggaagcaggccaccaaguaccuggugcagcaggagucccccuucgucaugaugagcgccccccccgcgcaguacgagcugaagcacggcaccuucacgugcgccuccgaguacaccggcaacuaccagugcgggcacuacaagcacaucaccagcaaggagacccucuacugcaucgacggcgcccugcugacgaagagcuccgaguacaaggggccgaucaccgacguguucuacaaggagaacagcuacaccaccacgaucaagcccgugaccuacaagcucgacggcgucgugugcaccgagaucgaccccaagcuggacaacuacuacaagaaggacaacuccuacuucaccgagcagcccaucgaccuggugccgaaccagcccuaccccaacgccagcuucgacaacuucaaguucgucugcgacaacaucaaguucgccgacgaccucaaccagcugacgggguacaagaagcccgcgucccgcgagcugaaggugaccuucuucccggaccucaacggcgacguggucgccaucgacuacaagcacuacacccccagcuucaagaagggcgccaagcugcugcacaagcccaucguguggcacgugaacaacgccaccaacaaggcgacguacaagcccaacaccuggugcauccggugccucugguccaccaagccggucgagaccagcaacuccuucgacgugcugaagagcgaggacgcccaggggauggacaaccuggccugcgaggaccucaagcccguguccgaggaggucguggagaaccccacgauccagaaggacgugcuggagugcaacgucaagaccaccgagguggugggcgacaucauccugaagcccgccaacaacagccucaagaucaccgaggaggucgggcacacggaccugauggccgcguacguggacaacuccagccugaccaucaagaagccgaacgagcucucccgcgugcugggccugaagacccucgccacccacgggcuggccgccgucaacagcgugcccugggacacgaucgccaacuacgcgaagcccuuccugaacaagguggucuccaccaccaccaacaucgugacgcgcugccucaaccgggugugcaccaacuacaugccguacuucuucacccugcugcuccagcugugcaccuucacccgcagcacgaacucccggaucaaggccagcaugcccaccaccaucgccaagaacaccgucaagagcgugggcaaguucugccuggaggccuccuucaacuaccucaagagccccaacuucuccaagcugaucaacaucaucaucugguuccugcuccugagcgugugccugggcucccucaucuacagcacggccgcgcuggggguccugauguccaaccucggcaugcccagcuacugcaccggguaccgcgagggcuaccugaacuccaccaacgugaccaucgccacguacugcaccggcagcaucccgugcuccgugugccugagcgggcucgacucccuggacaccuaccccagccuggagaccauccagaucacgaucuccagcuucaagugggaccucaccgccuucggccuggucgccgagugguuccuggccuacauccucuucacccgguucuucuacgugcuggggcuggcggccaucaugcagcucuucuucuccuacuucgccgugcacuucaucagcaacuccuggcugauguggcugaucaucaaccugguccagauggcccccaucagcgcgauggugcgcauguacaucuucuucgccagcuucuacuacguguggaaguccuacguccacgugguggacggcugcaacagcuccaccugcaugaugugcuacaagcggaaccgcgccacgcgggucgagugcaccaccaucgugaacgggguccgccggagcuucuacguguacgccaacggcggcaagggguucugcaagcuccacaacuggaacugcgugaacugcgacaccuucugcgccggcuccacguucaucagcgacgaggucgcgcgcgaccugucccugcaguucaagcggcccaucaacccgaccgaccagagcuccuacaucguggacagcgugaccgucaagaacggguccauccaccucuacuucgacaaggccggccagaagaccuacgagcgccacagccugucccacuucgugaaccuggacaaccuccgggccaacaacacgaaggggagccugcccaucaacgugaucgucuucgacggcaaguccaagugcgaggagagcuccgccaagagcgccuccguguacuacagccagcugaugugccagcccauccuccugcuggaccaggcgcucgugagcgacgucggcgacuccgccgagguggccgugaagauguucgacgccuacgucaacaccuucagcuccaccuucaacgugcccauggagaagcugaagacccugguggccacggcggaggccgagcucgccaagaacgucagccuggacaacgugcuguccaccuucaucagcgccgcgcgccagggguucguggacuccgacgucgagaccaaggacgugguggagugccucaagcugagccaccaguccgacaucgaggucaccggcgacagcugcaacaacuacaugcugacguacaacaagguggagaacaugaccccgcgggaccucggggccugcaucgacugcuccgcccgccacaucaacgcccagguggccaagagccacaacaucgcgcugaucuggaacgucaaggacuucaugucccugagcgagcagcuccggaagcagauccgcuccgccgccaagaagaacaaccugcccuucaagcugaccugcgccaccacgcgccagguggugaacgucgugaccaccaagaucgcccucaagggcggguga

SEQ ID NO: 17931 - RNA, 5841 nt, Artificial Sequence
  SARS-CoV-2__MT786334.1__non-structural protein 3 (NSP3) CDS gc
auggcccccaccaaggugaccuucggcgacgacacggucaucgaggugcagggguacaagagcgugaacaucaccuucgagcuggacgagcgcaucgacaagguccucaacgagaagugcuccgccuacaccguggagcugggcaccgaggugaacgaguucgcgugcgucguggccgacgccgugaucaagacgcugcagccggucagcgagcuccugaccccccuggggaucgaccucgacgagugguccauggccaccuacuaccuguucgacgagagcggcgaguucaagcuggccucccacauguacugcagcuucuacccccccgacgaggacgaggaggagggggacugcgaggaggaggaguucgagccguccacccaguacgaguacggcacggaggacgacuaccagggcaagccccucgaguucggggcgaccagcgccgcccugcagcccgaggaggagcaggaggaggacuggcuggacgacgacucccagcagaccgugggccagcaggacgggagcgaggacaaccagaccacgaccauccagaccaucguggagguccagccccagcucgagauggagcugaccccgguggugcagacgaucgaggucaacuccuucagcggcuaccugaagcucaccgacaacguguacaucaagaacgccgacaucguggaggaggcgaagaaggucaagcccaccgugguggucaacgccgccaacguguaccugaagcacgggggcggcguggccggggcccugaacaaggcgaccaacaacgccaugcaggucgaguccgacgacuacaucgccacgaacggcccccucaagguggggggcagcugcguccuguccggccacaaccuggccaagcacugccuccacgugguggggcccaacgucaacaagggcgaggacauccagcugcugaagagcgccuacgagaacuucaaccagcacgaggugcuccuggcgccgcugcucuccgccgggaucuucggcgccgaccccauccacagccugcgggugugcgucgacaccgugcgcaccaacguguaccuggccgucuucgacaagaaccucuacgacaagcugguguccagcuuccuggagaugaagagcgagaagcagguggagcagaagaucgccgagauccccaaggaggaggucaagcccuucaucaccgaguccaagccgagcguggagcagcggaagcaggacgacaagaagaucaaggcgugcguggaggaggucacgaccacccucgaggagaccaaguuccugacggagaaccugcuccuguacaucgacaucaacgggaaccugcaccccgacuccgccacccucgugagcgacaucgacaucaccuuccugaagaaggacgcccccuacaucgugggcgacgucgugcaggagggcgugcugaccgccgucgugauccccacgaagaaggccgggggcaccaccgagaugcucgcgaaggcccugcgcaaggugccgaccgacaacuacaucacgaccuaccccgggcagggccugaacggguacaccgucgaggaggccaagaccgugcucaagaagugcaaguccgccuucuacauccugcccagcaucaucuccaacgagaagcaggagauccugggcaccgugagcuggaaccuccgggagaugcuggcgcacgccgaggagacgcgcaagcugaugcccgucugcguggagaccaaggccaucguguccaccauccagcggaaguacaagggcaucaagauccaggagggggucguggacuacggcgcccgcuucuacuucuacaccagcaagacgaccguggccucccugaucaacacccucaacgaccugaacgagacccuggucacgaugccgcucggguacgugacccacggccugaaccuggaggaggcggcccgguacaugcgcagccucaaggugcccgccaccgucuccgugagcucccccgacgccgugaccgccuacaacggguaccugacgagcuccagcaagacccccgaggagcacuucaucgagaccaucucccuggcgggcagcuacaaggacuggagcuacuccggccagagcacccagcucgggaucgaguuccugaagcggggcgacaaguccgucuacuacacgagcaacccgaccaccuuccaccuggacggggaggugaucaccuucgacaaccucaagacgcugcugucccuccgcgaggugcggaccaucaaggucuucaccaccguggacaacaucaaccugcacacgcagguggucgacaugagcaugaccuacggccagcaguucggccccaccuaccuggacggggccgacgugaccaagaucaagccccacaacucccacgagggcaagacguucuacgugcucccgaacgacgacacccugcgcgucgaggccuucgaguacuaccacaccaccgaccccagcuuccuggggcgguacauguccgcccucaaccacacgaagaaguggaaguacccccaggugaacggccugaccagcaucaagugggccgacaacaacugcuaccuggcgaccgcccuccugacccugcagcagaucgagcucaaguucaaccccccggcccugcaggacgccuacuaccgcgcgcgggccggggaggccgccaacuucugcgcccugauccucgcguacugcaacaagacggugggcgagcugggcgacguccgcgagaccauguccuaccuguuccagcacgccaaccucgacagcugcaagcgggugcugaacgucgugugcaagaccugcgggcagcagcagaccacccugaagggcguggaggccgucauguacauggggacgcucuccuacgagcaguucaagaagggcgugcagauccccugcaccugcgggaagcaggccaccaaguaccuggugcagcaggagagccccuucgucaugauguccgcccccccggcgcaguacgagcugaagcacggcaccuucacgugcgccagcgaguacaccggcaacuaccagugcgggcacuacaagcacaucaccuccaaggagacccucuacugcaucgacggcgcccugcugacgaagagcagcgaguacaaggggcccaucaccgacguguucuacaaggagaacuccuacaccaccacgaucaagcccgugaccuacaagcucgacggcgucgugugcaccgagaucgaccccaagcuggacaacuacuacaagaaggacaacagcuacuucaccgagcagccgaucgaccuggugcccaaccagcccuaccccaacgccuccuucgacaacuucaaguucgucugcgacaacaucaaguucgccgacgaccucaaccagcugacgggguacaagaagccggcgagccgcgagcugaaggugaccuucuuccccgaccucaacggcgacguggucgccaucgacuacaagcacuacacccccuccuucaagaagggcgccaagcugcugcacaagcccaucguguggcacgugaacaacgccaccaacaaggcgacguacaagccgaacaccuggugcauccggugccucuggagcaccaaguccgucgagaccagcaacuccuucgacgugcugaagagcgaggacgcccaggggauggacaaccuggccugcgaggaccucaagcccguguccgaggaggucguggagaaccccacgauccagaaggacgugcuggagugcaacgucaagaccaccgagguggugggcgacaucauccugaagcccgccaacaacagccucaagaucaccgaggaggucgggcacacggaccugauggccgcguacguggacaacuccagccugaccaucaagaagccgaacgagcucucccgcgugcugggccugaagacccucgccacccacgggcuggccgccgucaacagcgugcccugggacacgaucgccaacuacgcgaagcccuuccugaacaagguggucuccaccaccaccaacaucgugacgcgcugccucaaccgggugugcaccaacuacaugccguacuucuucacccugcugcuccagcugugcaccuucacccgcagcacgaacucccggaucaaggccagcaugcccaccaccaucgccaagaacaccgucaagagcgugggcaaguucugccuggaggccuccuucaacuaccucaagagccccaacuucuccaagcugaucaacaucaucaucugguuccugcuccugagcgugugccugggcucccucaucuacagcacggccgcgcuggggguccugauguccaaccucggcaugcccagcuacugcaccggguaccgcgagggcuaccugaacuccaccaacgugaccaucgccacguacugcaccggcagcaucccgugcuccgugugccugagcgggcucgacucccuggacaccuaccccagccuggagaccauccagaucacgaucuccagcuucaagugggaccucaccgccuucggccuggucgccgagugguuccuggccuacauccucuucacccgguucuucuacgugcuggggcuggcggccaucaugcagcucuucuucuccuacuucgccgugcacuucaucagcaacuccuggcugauguggcugaucaucaaccugguccagauggcccccaucagcgcgauggugcgcauguacaucuucuucgccagcuucuacuacguguggaaguccuacguccacgugguggacggcugcaacagcuccaccugcaugaugugcuacaagcggaaccgcgccacgcgggucgagugcaccaccaucgugaacgggguccgccggagcuucuacguguacgccaacggcggcaagggguucugcaagcuccacaacuggaacugcgugaacugcgacaccuucugcgccggcuccacguucaucagcgacgaggucgcgcgcgaccugucccugcaguucaagcggcccaucaacccgaccgaccagagcuccuacaucguggacagcgugaccgucaagaacggguccauccaccucuacuucgacaaggccggccagaagaccuacgagcgccacagccugucccacuucgugaaccuggacaaccuccgggccaacaacacgaaggggagccugcccaucaacgugaucgucuucgacggcaaguccaagugcgaggagagcuccgccaagagcgccuccguguacuacagccagcugaugugccagcccauccuccugcuggaccaggcgcucgugagcgacgucggcgacuccgccgagguggccgugaagauguucgacgccuacgucaacaccuucagcuccaccuucaacgugcccauggagaagcugaagacccugguggccacggcggaggccgagcucgccaagaacgucagccuggacaacgugcuguccaccuucaucagcgccgcgcgccagggguucguggacuccgacgucgagaccaaggacgugguggagugccucaagcugagccaccaguccgacaucgaggucaccggcgacagcugcaacaacuacaugcugacguacaacaagguggagaacaugaccccgcgggaccucggggccugcaucgacugcuccgcccgccacaucaacgcccagguggccaagagccacaacaucgcgcugaucuggaacgucaaggacuucaugucccugagcgagcagcuccggaagcagauccgcuccgccgccaagaagaacaaccugcccuucaagcugaccugcgccaccacgcgccagguggugaacgucgugaccaccaagaucgcccucaagggcggguga

SEQ ID NO: 17932 - RNA, 5841 nt, Artificial Sequence
  SARS-CoV-2__MT775826.1__non-structural protein 3 (NSP3) CDS gc
auggcccccaccaaggugaccuucggcgacgacacggucaucgaggugcagggguacaagagcgugaacaucaccuucgagcuggacgagcgcaucgacaagguccucaacgagaagugcuccgccuacaccguggagcugggcaccgaggugaacgaguucgcgugcgucguggccgacgccgugaucaagacgcugcagccggucagcgagcuccugaccccccuggggaucgaccucgacgagugguccauggccaccuacuaccuguucgacgagagcggcgaguucaagcuggccucccacauguacugcagcuucuacccccccgacgaggacgaggaggagggggacugcgaggaggaggaguucgagccguccacccaguacgaguacggcacggaggacgacuaccagggcaagccccucgaguucggggcgaccagcgccgcccugcagcccgaggaggagcaggaggaggacuggcuggacgacgacucccagcagaccgugggccagcaggacgggagcgaggacaaccagaccacgaccauccagaccaucguggagguccagccccagcucgagauggagcugaccccgguggugcagacgaucgaggucaacuccuucagcggcuaccugaagcucaccgacaacguguacaucaagaacgccgacaucguggaggaggcgaagaaggucaagcccaccgugguggucaacgccgccaacguguaccugaagcacgggggcggcguggccggggcccugaacaaggcgaccaacaacgccaugcaggucgaguccgacgacuacaucgccacgaacggcccccucaagguggggggcagcugcguccuguccggcuacaaccuggccaagcacugccuccacgugguggggcccaacgucaacaagggcgaggacauccagcugcugaagagcgccuacgagaacuucaaccagcacgaggugcuccuggcgccgcugcucuccgccgggaucuucggcgccgaccccauccacagccugcgggugugcgucgacaccgugcgcaccaacguguaccuggccgucuucgacaagaaccucuacgacaagcugguguccagcuuccuggagaugaagagcgagaagcagguggagcagaagaucgccgagauccccaaggaggaggucaagcccuucaucaccgaguccaagccgagcguggagcagcggaagcaggacgacaagaagaucaaggcgugcguggaggaggucacgaccacccucgaggagaccaaguuccugacggagaaccugcuccuguacaucgacaucaacgggaaccugcaccccgacuccgccacccucgugagcgacaucgacaucaccuuccugaagaaggacgcccccuacaucgugggcgacgucgugcaggagggcgugcugaccgccgucgugauccccacgaagaaggccgggggcaccaccgagaugcucgcgaaggcccugcgcaaggugccgaccgacaacuacaucacgaccuaccccgggcagggccugaacggguacaccgucgaggaggccaagaccgugcucaagaagugcaaguccgccuucuacauccugcccagcaucaucuccaacgagaagcaggagauccugggcaccgugagcuggaaccuccgggagaugcuggcgcacgccgaggagacgcgcaagcugaugcccgucugcguggagaccaaggccaucguguccaccauccagcggaaguacaagggcaucaagauccaggagggggucguggacuacggcgcccgcuucuacuucuacaccagcaagacgaccguggccucccugaucaacacccucaacgaccugaacgagacccuggucacgaugccgcucggguacgugacccacggccugaaccuggaggaggcggcccgguacaugcgcagccucaaggugcccgccaccgucuccgugagcucccccgacgccgugaccgccuacaacggguaccugacgagcuccagcaagacccccgaggagcacuucaucgagaccaucucccuggcgggcagcuacaaggacuggagcuacuccggccagagcacccagcucgggaucgaguuccugaagcggggcgacaaguccgucuacuacacgagcaacccgaccaccuuccaccuggacggggaggugaucaccuucgacaaccucaagacgcugcugucccuccgcgaggugcggaccaucaaggucuucaccaccguggacaacaucaaccugcacacgcagguggucgacaugagcaugaccuacggccagcaguucggccccaccuaccuggacggggccgacgugaccaagaucaagccccacaacucccacgagggcaagacguucuacgugcucccgaacgacgacacccugcgcgucgaggccuucgaguacuaccacaccaccgaccccagcuuccuggggcgguacauguccgcccucaaccacacgaagaaguggaaguacccccaggugaacggccugaccagcaucaagugggccgacaacaacugcuaccuggcgaccgcccuccugacccugcagcagaucgagcucaaguucaaccccccggcccugcaggacgccuacuaccgcgcgcgggccggggaggccgccaacuucugcgcccugauccucgcguacugcaacaagacggugggcgagcugggcgacguccgcgagaccauguccuaccuguuccagcacgccaaccucgacagcugcaagcgggugcugaacgucgugugcaagaccugcgggcagcagcagaccacccugaagggcguggaggccgucauguacauggggacgcucuccuacgagcaguucaagaagggcgugcagauccccugcaccugcgggaagcaggccaccaaguaccuggugcagcaggagagccccuucgucaugauguccgcccccccggcgcaguacgagcugaagcacggcaccuucacgugcgccagcgaguacaccggcaacuaccagugcgggcacuacaagcacaucaccuccaaggagacccucuacugcaucgacggcgcccugcugacgaagagcagcgaguacaaggggcccaucaccgacguguucuacaaggagaacuccuacaccaccacgaucaagcccgugaccuacaagcucgacggcgucgugugcaccgagaucgaccccaagcuggacaacuacuacaagaaggacaacagcuacuucaccgagcagccgaucgaccuggugcccaaccagcccuaccccaacgccuccuucgacaacuucaaguucgucugcgacaacaucaaguucgccgacgaccucaaccagcugacgggguacaagaagccggcgagccgcgagcugaaggugaccuucuuccccgaccucaacggcgacguggucgccaucgacuacaagcacuacacccccuccuucaagaagggcgccaagcugcugcacaagcccaucguguggcacgugaacaacgccaccaacaaggcgacguacaagccgaacaccuggugcauccggugccucuggagcaccaagcccgucgagaccuccaacagcuucgacgugcugaaguccgaggacgcccaggggauggacaaccuggccugcgaggaccucaagcccgugagcgaggaggucguggagaaccccacgauccagaaggacgugcuggagugcaacgucaagaccaccgagguggugggcgacaucauccugaagccggccaacaacucccucaagaucaccgaggaggucgggcacacggaccugauggccgcguacguggacaacagcucccugaccaucaagaagcccaacgagcucagccgcgugcugggccugaagacccucgccacccacgggcuggccgccgucaacuccgugcccugggacacgaucgccaacuacgcgaagccguuccugaacaagguggucagcaccaccaccaacaucgugacgcgcugccucaaccgggugugcaccaacuacaugcccuacuucuucacccugcugcuccagcugugcaccuucacccgcuccacgaacagccggaucaaggccuccaugcccaccaccaucgccaagaacaccgucaagagcgugggcaaguucugccuggaggccagcuucaacuaccucaagucccccaacuucagcaagcugaucaacaucaucaucugguuccugcuccuguccgugugccugggcagccucaucuacuccacggccgcgcuggggguccugaugagcaaccucggcaugccguccuacugcaccggguaccgcgagggcuaccugaacagcaccaacgugaccaucgccacguacugcaccggcuccauccccugcagcgugugccuguccgggcucgacagccuggacaccuaccccucccuggagaccauccagaucacgaucagcuccuucaagugggaccucaccgccuucggccuggucgccgagugguuccuggccuacauccucuucacccgguucuucuacgugcuggggcuggcggccaucaugcagcucuucuucagcuacuucgccgugcacuucaucuccaacagcuggcugauguggcugaucaucaaccugguccagauggcccccaucuccgcgauggugcgcauguacaucuucuucgccagcuucuacuacguguggaagagcuacguccacgugguggacggcugcaacuccagcaccugcaugaugugcuacaagcggaaccgcgccacgcgggucgagugcaccaccaucgugaacgggguccgccgguccuucuacguguacgccaacggcggcaagggguucugcaagcuccacaacuggaacugcgugaacugcgacaccuucugcgccggcagcacguucaucuccgacgaggucgcgcgcgaccugagccugcaguucaagcggccgaucaaccccaccgaccaguccagcuacaucguggacuccgugaccgucaagaacgggagcauccaccucuacuucgacaaggccggccagaagaccuacgagcgccacucccugagccacuucgugaaccuggacaaccuccgggccaacaacacgaaggggucccugcccaucaacgugaucgucuucgacggcaagagcaagugcgaggaguccagcgccaaguccgccagcguguacuacucccagcugaugugccagcccauccuccugcuggaccaggcgcucgugagcgacgucggcgacagcgccgagguggccgugaagauguucgacgccuacgucaacaccuucuccagcaccuucaacgugccgauggagaagcugaagacccugguggccacggcggaggccgagcucgccaagaacgucucccuggacaacgugcugagcaccuucaucuccgccgcgcgccagggguucguggacagcgacgucgagaccaaggacgugguggagugccucaagcugucccaccagagcgacaucgaggucaccggcgacuccugcaacaacuacaugcugacguacaacaagguggagaacaugaccccccgggaccucggggccugcaucgacugcagcgcccgccacaucaacgcccagguggccaagucccacaacaucgcgcugaucuggaacgucaaggacuucaugagccuguccgagcagcuccggaagcagauccgcagcgccgccaagaagaacaaccugcccuucaagcugaccugcgccaccacgcgccagguggugaacgucgugaccaccaagaucgcccucaagggcggguga

SEQ ID NO: 17933 - RNA, 5841 nt, Artificial Sequence
  SARS-CoV-2__MT775832.1__non-structural protein 3 (NSP3) CDS gc
auggcccccaccaaggugaccuucggcgacgacacggucaucgaggugcagggguacaagagcgugaacaucaccuucgagcuggacgagcgcaucgacaagguccucaacgagaagugcuccgccuacaccguggagcugggcaccgaggugaacgaguucgcgugcgucguggccgacgccgugaucaagacgcugcagccggucagcgagcuccugaccccccuggggaucgaccucgacgagugguccauggccaccuacuaccuguucgacgagagcggcgaguucaagcuggccucccacauguacugcagcuucuacccccccgacgaggacgaggaggagggggacugcgaggaggaggaguucgagccguccacccaguacgaguacggcacggaggacgacuaccagggcaagccccucgaguucggggcgaccagcgccgcccugcagcccgaggaggagcaggaggaggacuggcuggacgacgacucccagcagaccgugggccagcaggacgggagcgaggacaaccagaccacgaccauccagaccaucguggagguccagccccagcucgagauggagcugaccccgguggugcagacgaucgaggucaacuccuucagcggcuaccugaagcucaccgacaacguguacaucaagaacgccgacaucguggaggaggcgaagaaggucaagcccaccgugguggucaacgccgccaacguguaccugaagcacgggggcggcguggccggggcccugaacaaggcgaccaacaacgccaugcaggucgaguccgacgacuacaucgccacgaacggcccccucaagguggggggcagcugcguccuguccggccacaaccuggccaagcacugccuccacgugguggggcccaacgucaacaagggcgaggacauccagcugcugaagagcgccuacgagaacuucaaccagcacgaggugcuccuggcgccgcugcucuccgccgggaucuucggcgccgaccccauccacagccugcgggugugcgucgacaccgugcgcaccaacguguaccuggccgucuucgacaagaaccucuacgacaagcugguguccagcuuccuggagaugaagagcgagaagcagguggagcagaagaucgccgagauccccaaggaggaggucaagcccuucaucaccgaguccaagccgagcguggagcagcggaagcaggacgacaagaagaucaaggcgugcguggaggaggucacgaccacccucgaggagaccaaguuccugacggagaaccugcuccuguacaucgacaucaacgggaaccugcaccccgacuccgccacccucgugagcgacaucgacaucaccuuccugaagaaggacgcccccuacaucgugggcgacgucgugcaggagggcgugcugaccgccgucgugauccccacgaagaaggccgggggcaccaccgagaugcucgcgaaggcccugcgcaaggugccgaccgacaacuacaucacgaccuaccccgggcagggccugaacggguacaccgucgaggaggccaagaccgugcucaagaagugcaaguccgccuucuacauccugcccagcaucaucuccaacgagaagcaggagauccugggcaccgugagcuggaaccuccgggagaugcuggcgcacgccgaggagacgcgcaagcugaugcccgucugcguggagaccaaggccaucguguccaccauccagcggaaguacaagggcaucaagauccaggagggggucguggacuacggcgcccgcuucuacuucuacaccagcaagacgaccguggccucccugaucaacacccucaacgaccugaacgagacccuggucacgaugccgcucggguacgugacccacggccugaaccuggaggaggcggcccgguacaugcgcagccucaaggugcccgccaccgucuccgugagcucccccgacgccgugaccgccuacaacggguaccugacgagcuccagcaagacccccgaggagcacuucaucgagaccaucucccuggcgggcagcuacaaggacuggagcuacuccggccagagcacccagcucgggaucgaguuccugaagcggggcgacaaguccgucuacuacacgagcaacccgaccaccuuccaccuggacggggaggugaucaccuucgacaaccucaagacgcugcugucccuccgcgaggugcggaccaucaaggucuucaccaccguggacaacaucaaccugcacacgcagguggucgacaugagcaugaccuacggccagcaguucggccccaccuaccuggacggggccgacgugaccaagaucaagccccacaacucccacgagggcaagacguucuacgugcucccgaacgacgacacccugcgcgucgaggccuucgaguacuaccacaccaccgaccccagcuuccuggggcgguacauguccgcccucaaccacacgaagaaguggaaguacccccaggugaacggccugaccagcaucaagugggccgacaacaacugcuaccuggcgaccgcccuccugacccugcagcagaucgagcucaaguucaaccccccggcccugcaggacgccuacuaccgcgcgcgggccggggaggccgccaacuucugcgcccugauccucgcguacugcaacaagacggugggcgagcugggcgacguccgcgagaccauguccuaccuguuccagcacgccaaccucgacagcugcaagcgggugcugaacgucgugugcaagaccugcgggcagcagcagaccacccugaagggcguggaggccgucauguacauggggacgcucuccuacgagcaguucaagaagggcgugcagauccccugcaccugcgggaagcaggccaccaaguaccuggugcagcaggagagccccuucgucaugauguccgcccccccggcgcaguacgagcugaagcacggcaccuucacgugcgccagcgaguacaccggcaacuaccagugcgggcacuacaagcacaucaccuccaaggagacccucuacugcaucgacggcgcccugcugacgaagagcagcgaguacaaggggcccaucaccgacguguucuacaaggagaacuccuacaccaccacgaucaagcccgugaccuacaagcucgacggcgucgugugcaccgagaucgaccccaagcuggacaacuacuacaagaaggacaacagcuacuucaccgagcagccgaucgaccuggugcccaaccagcccuaccccaacgccuccuucgacaacuucaaguucgucugcgacaacaucaaguucgccgacgaccucaaccagcugacgggguacaagaagccggcgagccgcgagcugaaggugaccuucuuccccgaccucaacggcgacguggucgccaucgacuacaagcacuacacccccuccuucaagaagggcgccaagcugcugcacaagcccaucguguggcacgugaacaacgccaccaacaaggcgacguacaagccgaacaccuggugcauccggugccucuggagcaccaagcccgucgagaccuccaacagcuucgacgugcugaaguccgaggacgugcaggggauggacaaccuggccugcgaggaccucaagcccgucagcgaggaggugguggagaaccccacgauccagaaggacguccuggagugcaacgugaagaccaccgagguggucggcgacaucauccugaagccggccaacaacucccucaagaucaccgaggagguggggcacacggaccugauggccgccuacguggacaacagcucccugaccaucaagaagcccaacgagcucagccgcguccugggccugaagacccucgcgacccacgggcuggccgccgugaacuccgugcccugggacacgaucgccaacuacgccaagccguuccugaacaaggucgugagcaccaccaccaacaucgugacgcgcugccucaaccgggucugcaccaacuacaugcccuacuucuucacccugcugcuccagcugugcaccuucacccgcuccacgaacagccggaucaaggcguccaugcccaccaccaucgccaagaacaccgugaagagcgugggcaaguucugccuggaggccagcuucaacuaccucaagucccccaacuucagcaagcugaucaacaucaucaucugguuccugcuccuguccgucugccugggcagccucaucuacuccacggccgcccugggggugcugaugagcaaccucggcaugccguccuacugcaccggguaccgcgagggcuaccugaacagcaccaacgugaccaucgcgacguacugcaccggcuccauccccugcagcgucugccuguccgggcucgacagccuggacaccuaccccucccuggagaccauccagaucacgaucagcuccuucaagugggaccucaccgccuucggccugguggccgagugguuccuggccuacauccucuucacccgguucuucuacgugcuggggcuggccgcgaucaugcagcucuucuucagcuacuucgccguccacuucaucuccaacagcuggcugauguggcugaucaucaaccuggugcagauggcccccaucuccgccauggugcgcauguacaucuucuucgcgagcuucuacuacgucuggaagagcuacgugcacguggucgacggcugcaacuccagcaccugcaugaugugcuacaagcggaaccgcgccacgcggguggagugcaccaccaucgucaacggggugcgccgguccuucuacguguacgccaacggcggcaagggguucugcaagcuccacaacuggaacugcgucaacugcgacaccuucugcgccggcagcacguucaucuccgacgagguggcccgcgaccugagccugcaguucaagcggccgaucaaccccaccgaccaguccagcuacaucguggacuccgucaccgugaagaacgggagcauccaccucuacuucgacaaggcgggccagaagaccuacgagcgccacucccugagccacuucgugaaccuggacaaccuccgggccaacaacacgaaggggucccugcccaucaacgucaucguguucgacggcaagagcaagugcgaggaguccagcgccaaguccgccagcguguacuacucccagcugaugugccagcccauccuccugcuggaccaggcccucgucagcgacgugggcgacagcgcggagguggccgucaagauguucgacgccuacgugaacaccuucuccagcaccuucaacgugccgauggagaagcugaagacccuggucgccacggccgaggcggagcucgccaagaacgugucccuggacaacgugcugagcaccuucaucuccgccgcccgccagggguucgucgacagcgacguggagaccaaggacguggucgagugccucaagcugucccaccagagcgacaucgaggugaccggcgacuccugcaacaacuacaugcugacguacaacaagguggagaacaugaccccccgggaccucggggcgugcaucgacugcagcgcccgccacaucaacgcccaggucgccaagucccacaacaucgcccugaucuggaacgugaaggacuucaugagccuguccgagcagcuccggaagcagauccgcagcgcggccaagaagaacaaccugcccuucaagcugaccugcgccaccacgcgccagguggucaacguggugaccaccaagaucgcccucaagggcggguga

SEQ ID NO: 17934 - RNA, 5841 nt, Artificial Sequence
  SARS-CoV-2__MT776407.1__non-structural protein 3 (NSP3) CDS gc
auggcccccaccaaggugaccuucggcgacgacacggucaucgaggugcagggguacaagagcgugaacaucaccuucgagcuggacgagcgcaucgacaagguccucaacgagaagugcuccgccuacaccguggagcugggcaccgaggugaacgaguucgcgugcgucguggccgacgccgugaucaagacgcugcagccggucagcgagcuccugaccccccuggggaucgaccucgacgagugguccauggccaccuacuaccuguucgacgagagcggcgaguucaagcuggccucccacauguacugcagcuucuacccccccgacgaggacgaggaggagggggacugcgaggaggaggaguucgagccguccacccaguacgaguacggcacggaggacgacuaccagggcaagccccucgaguucggggcgaccagcgccgcccugcagcuggaggaggagcaggaggaggacuggcucgacgacgacucccagcagaccgugggccagcaggacgggagcgaggacaaccagaccacgaccauccagaccaucguggagguccagccccagcuggagauggagcugacccccguggugcagacgaucgaggucaacuccuucagcggcuaccucaagcugaccgacaacguguacaucaagaacgccgacaucguggaggaggcgaagaaggucaagccgaccgugguggucaacgccgccaacguguaccugaagcacgggggcggcguggccggggcccucaacaaggcgaccaacaacgccaugcaggucgaguccgacgacuacaucgccacgaacggcccccugaagguggggggcagcugcguccuguccggccacaaccucgccaagcacugccugcacgugguggggcccaacgucaacaagggcgaggacauccagcugcucaagagcgccuacgagaacuucaaccagcacgaggugcugcuggcgccccuccuguccgccgggaucuucggcgccgacccgauccacagccugcgggugugcgucgacaccgugcgcaccaacguguaccucgccgucuucgacaagaaccuguacgacaagcugguguccagcuuccucgagaugaagagcgagaagcagguggagcagaagaucgccgagauccccaaggaggaggucaagcccuucaucaccgaguccaagcccagcguggagcagcggaagcaggacgacaagaagaucaaggcgugcguggaggaggucacgaccacccuggaggagaccaaguuccugacggagaaccuccugcuguacaucgacaucaacgggaaccuccacccggacuccgccacccuggugagcgacaucgacaucaccuuccugaagaaggacgcccccuacaucgugggcgacgucgugcaggagggcgugcucaccgccgucgugauccccacgaagaaggccgggggcaccaccgagaugcuggcgaaggcccugcgcaaggugcccaccgacaacuacaucacgaccuacccggggcagggccucaacggguacaccgucgaggaggccaagaccgugcugaagaagugcaaguccgccuucuacauccugcccagcaucaucuccaacgagaagcaggagauccucggcaccgugagcuggaaccugcgggagaugcuggcgcacgccgaggagacgcgcaagcugaugcccgucugcguggagaccaaggccaucguguccaccauccagcggaaguacaagggcaucaagauccaggagggggucguggacuacggcgcccgcuucuacuucuacaccagcaagacgaccguggccucccucaucaacacccugaacgaccugaacgagacccucgucacgaugccccugggguacgugacccacggccugaaccucgaggaggcggcccgguacaugcgcagccugaaggugccggccaccgucuccgugagcucccccgacgccgugaccgccuacaacggguaccugacgagcuccagcaagacccccgaggagcacuucaucgagaccaucucccucgcgggcagcuacaaggacuggagcuacuccggccagagcacccagcuggggaucgaguuccugaagcggggcgacaaguccgucuacuacacgagcaaccccaccaccuuccaccucgacggggaggugaucaccuucgacaaccugaagacgcugcucucccugcgcgaggugcggaccaucaaggucuucaccaccguggacaacaucaaccugcacacgcagguggucgacaugagcaugaccuacggccagcaguucggcccgaccuaccucgacggggccgacgugaccaagaucaagccccacaacucccacgagggcaagacguucuacgugcugcccaacgacgacacccugcgcgucgaggccuucgaguacuaccacaccaccgacccgagcuuccucgggcgguacauguccgcccugaaccacacgaagaaguggaaguacccccaggugaacggccugaccagcaucaagugggccgacaacaacugcuaccucgcgaccgcccugcugacccuccagcagaucgagcugaaguucaacccccccgcccugcaggacgccuacuaccgcgcgcgggccggggaggccgccaacuucugcgcccucauccuggcguacugcaacaagacggugggcgagcugggcgacguccgcgagaccauguccuaccucuuccagcacgccaaccuggacagcugcaagcgggugcugaacgucgugugcaagaccugcgggcagcagcagaccacccucaagggcguggaggccgucauguacauggggacgcuguccuacgagcaguucaagaagggcgugcagaucccgugcaccugcgggaagcaggccaccaaguaccuggugcagcaggagagccccuucgucaugauguccgccccccccgcgcaguacgagcucaagcacggcaccuucacgugcgccagcgaguacaccggcaacuaccagugcgggcacuacaagcacaucaccuccaaggagacccuguacugcaucgacggcgcccugcucacgaagagcagcgaguacaaggggccgaucaccgacguguucuacaaggagaacuccuacaccaccacgaucaagcccgugaccuacaagcuggacggcgucgugugcaccgagaucgaccccaagcuggacaacuacuacaagaaggacaacagcuacuucaccgagcagcccaucgaccucgugccgaaccagcccuaccccaacgccuccuucgacaacuucaaguucgucugcgacaacaucaaguucgccgacgaccugaaccagcugacgggguacaagaagcccgcgagccgcgagcucaaggugaccuucuucccggaccugaacggcgacguggucgccaucgacuacaagcacuacacccccuccuucaagaagggcgccaagcugcuccacaagcccaucguguggcacgugaacaacgccaccaacaaggcgacguacaagcccaacaccuggugcauccggugccuguggagcaccaagccggucgagaccuccaacagcuucgacgugcugaaguccgaggacgcccaggggauggacaaccucgccugcgaggaccugaagcccgugagcgaggaggucguggagaaccccacgauccagaaggacgugcuggagugcaacgucaagaccaccgagguggugggcgacaucauccucaagcccgccaacaacucccugaagaucaccgaggaggucgggcacacggaccugauggccgcguacguggacaacagcucccucaucaucaagaagccgaacgagcugagccgcgugcugggccucaagacccuggccacccacgggcuggccgccgucaacuccgugcccugggacaccaucgccaacuacgcgaagcccuuccucaacaagguggucagcacgaccaccaacaucgugacccgcugccugaaccgggugugcacgaacuacaugccguacuucuucacccugcuccugcagcugugcaccuucacccgcuccaccaacagccggaucaaggccuccaugcccacgaccaucgccaagaacaccgucaagagcgugggcaaguucugccucgaggccagcuucaacuaccugaagucccccaacuucagcaagcugaucaacaucaucaucugguuccuccugcuguccgugugccucggcagccugaucuacuccaccgccgcgcuggggguccucaugagcaaccugggcaugcccuccuacugcacgggguaccgcgagggcuaccugaacagcaccaacgugaccaucgccaccuacugcacgggcuccaucccgugcagcgugugccucuccgggcuggacagccuggacaccuaccccucccucgagaccauccagaucaccaucagcuccuucaagugggaccugacggccuucggccuggucgccgagugguuccucgccuacauccuguucacccgguucuucuacgugcuggggcucgcggccaucaugcagcuguucuucagcuacuucgccgugcacuucaucuccaacagcuggcugauguggcugaucaucaaccucguccagauggcccccaucuccgcgauggugcgcauguacaucuucuucgccagcuucuacuacguguggaagagcuacguccacgugguggacggcugcaacuccagcaccugcaugaugugcuacaagcggaaccgcgccacccgggucgagugcacgaccaucgugaacgggguccgccgguccuucuacguguacgccaacggcggcaagggguucugcaagcugcacaacuggaacugcgugaacugcgacaccuucugcgccggcagcaccuucaucuccgacgaggucgcgcgcgaccugagccuccaguucaagcggcccaucaacccgacggaccaguccagcuacaucguggacuccgugaccgucaagaacgggagcauccaccuguacuucgacaaggccggccagaagaccuacgagcgccacucccugagccacuucgugaaccucgacaaccugcgggccaacaacaccaaggggucccugcccaucaacgugaucgucuucgacggcaagagcaagugcgaggaguccagcgccaaguccgccagcguguacuacucccagcucaugugccagcccauccugcugcucgaccaggcgcuggugagcgacgucggcgacagcgccgagguggccgugaagauguucgacgccuacgucaacacguucuccagcaccuucaacgugcccauggagaagcugaagacccucguggccaccgcggaggccgagcuggccaagaacgucucccuggacaacgugcucagcacguucaucuccgccgcgcgccagggguucguggacagcgacgucgagaccaaggacgugguggagugccugaagcugucccaccagagcgacaucgaggucaccggcgacuccugcaacaacuacaugcucaccuacaacaagguggagaacaugacgccgcgggaccugggggccugcaucgacugcagcgcccgccacaucaacgcccagguggccaagucccacaacaucgcgcugaucuggaacgucaaggacuucaugagccucuccgagcagcugcggaagcagauccgcagcgccgccaagaagaacaaccugcccuucaagcucaccugcgccaccacccgccagguggugaacgucgugacgaccaagaucgcccugaagggcggguga

SEQ ID NO: 17935 - RNA, 5841 nt, Artificial Sequence
  SARS-CoV-2__MT772271.1__non-structural protein 3 (NSP3) CDS gc
auggcccccaccaaggugaccuucggcgacgacacggucaucgaggugcagggguacaagagcgugaacaucaccuucgagcuggacgagcgcaucgacaagguccucaacgagaagugcuccgccuacaccguggagcugggcaccgaggugaacgaguucgcgugcgucguggccgacgccgugaucaagacgcugcagccggucagcgagcuccugaccccccuggggaucgaccucgacgagugguccauggccaccuacuaccuguucgacgagagcggcgaguucaagcuggccucccacauguacugcagcuucuacccccccgacgaggacgaggaggagggggacugcgaggaggaggaguucgagccguccacccaguacgaguacggcacggaggacgacuaccagggcaagccccucgaguucggggcgaccagcgccgcccugcagcccgaggaggagcaggaggaggacuggcuggacgacgacucccagcagaccgugggccagcaggacgggagcgaggacaaccagaccacgaccauccagaccaucguggagguccagccccagcucgagauggagcugaccccgguggugcagacgaucgaggucaacuccuucagcggcuaccugaagcucaccgacaacguguacaucaagaacgccgacaucguggaggaggcgaagaaggucaagcccaccgugguggucaacgccgccaacguguaccugaagcacgggggcggcguggccggggcccugaacaaggcgaccaacaacgccaugcaggucgaguccgacgacuacaucgccacgaacggcccccucaagguggggggcagcugcguccuguccggccacaaccuggccaagcacugccuccacgugguggggcccaacgucaacaagggcgaggacauccagcugcugaagagcgccuacgagaacuucaaccagcacgaggugcuccuggcgccgcugcucuccgccgggaucuucggcgccgaccccauccacagccugcgggugugcgucgacaccgugcgcaccaacguguaccuggccgucuucgacaagaaccucuacgacaagcugguguccagcuuccuggagaugaagagcgagaagcagguggagcagaagaucgccgagauccccaaggaggaggucaagcccuucaucaccgaguccaagccgagcguggagcagcggaagcaggacgacaagaagaucaaggcgugcguggaggaggucacgaccacccucgaggagaccaaguuccugacggagaaccugcuccuguacaucgacaucaacgggaaccugcaccccgacuccgccacccucgugagcgacaucgacaucaccuuccugaagaaggacgcccccuacaucgugggcgacgucgugcaggagggcgugcugaccgccgucgugauccccacgaagaaggccgggggcaccaccgagaugcucgcgaaggcccugcgcaaggugccgaccgacaacuacaucacgaccuaccccgggcagggccugaacggguacaccgucgaggaggccaagaccgugcucaagaagugcaaguccgccuucuacauccugcccagcaucaucuccaacgagaagcaggagauccugggcaccgugagcuggaaccuccgggagaugcuggcgcacgccgaggagacgcgcaagcugaugcccgucugcguggagaccaaggccaucguguccaccauccagcggaaguacaagggcaucaagauccaggagggggucguggacuacggcgcccgcuucuacuucuacaccagcaagacgaccguggccucccugaucaacacccucaacgaccugaacgagacccuggucacgaugccgcucggguacgugacccacggccugaaccuggaggaggcggcccgguacaugcgcagccucaaggugcccgccaccgucuccgugagcucccccgacgccgugaccgccuacaacggguaccugacgagcuccagcaagacccccgaggagcacuucaucgagaccaucucccuggcgggcagcuacaaggacuggagcuacuccggccagagcacccagcucgggaucgaguuccugaagcggggcgacaaguccgucuacuacacgagcaacccgaccaccuuccaccuggacggggaggugaucaccuucgacaaccucaagacgcugcugucccuccgcgaggugcggaccaucaaggucuucaccaccguggacaacaucaaccugcacacgcagguggucgacaugagcaugaccuacggccagcaguucggccccaccuaccuggacggggccgacgugaccaagaucaagccccacaacucccacgagggcaagacguucuacgugcucccgaacgacgacacccugcgcgucgaggccuucgaguacuaccacaccaccgaccccagcuuccuggggcgguacauguccgcccucaaccacacgaagaaguggaaguacccccaggugaacggccugaccagcaucaagugggccgacaacaacugcuaccuggcgaccgcccuccugacccugcagcagaucgagcucaaguucaaccccccggcccugcaggacgccuacuaccgcgcgcgggccggggaggccgccaacuucugcgcccugauccucgcguacugcaacaagacggugggcgagcugggcgacguccgcgagaccauguccuaccuguuccagcacgccaaccucgacagcugcaagcgggugcugaacgucgugugcaagaccugcgggcagcagcagaccacccugaagggcguggaggccgucauguacauggggacgcucuccuacgagcaguucaagaagggcgugcagauccccugcaccugcgggaagcaggccaccaaguaccuggugcagcaggagagccccuucgucaugauguccgcccccccggcgcaguacgagcugaagcacggcaccuucacgugcgccagcgaguacaccggcaacuaccagugcgggcacuacaagcacaucaccuccaaggagacccucuacugcaucgacggcgcccugcugacgaagagcagcgaguacaaggggcccaucaccgacguguucuacaaggagaacuccuacaccaccacgaucaagcccgugaccuacaagcucgacggcgucgugugcaccgagaucgaccccaagcuggacaacuacuacaagaaggacaacagcuacuucaccgagcagccgaucgaccuggugcccaaccagcccuaccccaacgccuccuucgacaacuucaaguucgucugcgacaacaucaaguucgccgacgaccucaaccagcugacgggguacaagaagccggcgagccgcgagcugaaggugaccuucuuccccgaccucaacggcgacguggucgccaucgacuacaagcacuacacccccuccuucaagaagggcgccaagcugcugcacaagcccaucguguggcacgugaacaacgccaccaacaaggcgacguacaagccgaacaccuggugcauccggugccucuggagcaccaagcccgucgagaccuccaacagcuucgacgugcugaaguccgaggacgcccaggggauggacaaccuggccugcgaggaccucaagcccgugagcgaggaggucguggagaaccccacgauccagaaggacgugcuggagugcaacgucaagaccaccgagguggugggcgacaucauccugaagccggccaacaacucccucaagaucaccgaggaggucgggcacacggaccugauggccgcguacguggacaacagcucccugaccaucaagaagcccaacgagcucagccgcgugcugggccugaagacccucgccacccacgggcuggccgccgucaacuccgugcccugggacacgaucgccaacuacgcgaagccguuccugaacaagguggucagcaccaccaccaacaucgugacgcgcugccucaaccgggugugcaccaacuacaugcccuacuucuucacccugcugcuccagcugugcaccuucacccgcuccacgaacagccggaucaaggccuccaugcccaccaccaucgccaagaacaccgucaagagcgugggcaaguucugccuggaggccagcuucaacuaccucaagucccccaacuucagcaagcugaucaacaucaucaucugguuccugcuccuguccgugugccugggcagccucaucuacuccacggccgcgcuggggguccugaugagcaaccucggcaugccguccuacugcaccggguaccgcgagggcuaccugaacagcaccaacgugaccaucgccacguacugcaccggcuccauccccugcagcgugugccuguccgggcucgacagccuggacaccuaccccucccuggagaccauccagaucacgaucagcuccuucaagugggaccucaccgccuucggccuggucgccgagugguuccuggccuacauccucuucacccgguucuucuacgugcuggggcuggcggccaucaugcagcucuucuucagcuacuucgccgugcacuucaucuccaacagcuggcugauguggcugaucaucaaccugguccagauggcccccaucuccgcgauggugcgcauguacaucuucuucgccagcuucuacuacguguggaagagcuacguccacgugguggacggcugcaacuccagcaccugcaugaugugcuacaagcggaaccgcgccacgcgggucgagugcaccaccaucgugaacgggguccgccgguccuucuacguguacgccaacggcggcaagggguucugcaagcuccacaacuggaacugcgugaacugcgacaccuucugcgccggcagcacguucaucuccgacgaggucgcgcgcgaccugagccugcaguucaagcggccgaucaaccccaccgaccaguccagcuacaucguggacuccgugaccgucaagaacgggagcauccaccucuacuucgacaaggccggccagaagaccuacgagcgccacucccugagccgguucgugaaccuggacaaccuccgcgccaacaacacgaaggggucccugcccaucaacgugaucgucuucgacggcaagagcaagugcgaggaguccagcgccaaguccgccagcguguacuacucccagcugaugugccagcccauccuccugcuggaccaggcgcucgugagcgacgucggcgacagcgccgagguggccgugaagauguucgacgccuacgucaacaccuucuccagcaccuucaacgugccgauggagaagcugaagacccugguggccacggcggaggccgagcucgccaagaacgucucccuggacaacgugcugagcaccuucaucuccgccgcgcggcagggguucguggacagcgacgucgagaccaaggacgugguggagugccucaagcugucccaccagagcgacaucgaggucaccggcgacuccugcaacaacuacaugcugacguacaacaagguggagaacaugaccccccgcgaccucggggccugcaucgacugcagcgcccggcacaucaacgcccagguggccaagucccacaacaucgcgcugaucuggaacgucaaggacuucaugagccuguccgagcagcuccgcaagcagauccgcagcgccgccaagaagaacaaccugcccuucaagcugaccugcgccaccacgcggcagguggugaacgucgugaccaccaagaucgcccucaagggcggguga

SEQ ID NO: 17936 - RNA, 5841 nt, Artificial Sequence
  SARS-CoV-2__MT772417.1__non-structural protein 3 (NSP3) CDS gc
auggcccccaccaaggugaccuucggcgacgacacggucaucgaggugcagggguacaagagcgugaacaucaccuucgagcuggacgagcgcaucgacaagguccucaacgagaagugcuccgccuacaccguggagcugggcaccgaggugaacgaguucgcgugcgucguggccgacgccgugaucaagacgcugcagccggucagcgagcuccugaccccccuggggaucgaccucgacgagugguccauggccaccuacuaccuguucgacgagagcggcgaguucaagcuggccucccacauguacugcagcuucuacccccccgacgaggacgaggaggagggggacugcgaggaggaggaguucgagccguccacccaguacgaguacggcacggaggacgacuaccagggcaagccccucgaguucggggcgaccagcgccgcccugcagcccgaggaggagcaggaggaggacuggcuggacgacgacucccagcagaccgugggccagcaggacgggagcgaggacaaccagaccacgaccauccagaccaucguggagguccagccccagcucgagauggagcugaccccgguggugcagacgaucgaggucaacuccuucagcggcuaccugaagcucaccgacaacguguacaucaagaacgccgacaucguggaggaggcgaagaaggucaagcccaccgugguggucaacgccgccaacguguaccugaagcacgggggcggcguggccggggcccugaacaaggcgaccaacaacgccaugcaggucgaguccgacgacuacaucgccacgaacggcccccucaagguggggggcagcugcguccuguccggccacaaccuggccaagcacugccuccacgugguggggcccaacgucaacaagggcgaggacauccagcugcugaagagcgccuacgagaacuucaaccagcacgaggugcuccuggcgccgcugcucuccgccgggaucuucggcgccgaccccauccacagccugcgggugugcgucgacaccgugcgcaccaacguguaccuggccgucuucgacaagaaccucuacgacaagcugguguccagcuuccuggagaugaagagcgagaagcagguggagcagaacaucgccgagauccccaaggaggaggucaagcccuucaucaccgaguccaagccgagcguggagcagcggaagcaggacgacaagaagaucaaggcgugcguggaggaggucacgaccacccucgaggagaccaaguuccugacggagaaccugcuccuguacaucgacaucaacgggaaccugcaccccgacuccgccacccucgugagcgacaucgacaucaccuuccugaagaaggacgcccccuacaucgugggcgacgucgugcaggagggcgugcugaccgccgucgugauccccacgaagaaggccgggggcaccaccgagaugcucgcgaaggcccugcgcaaggugccgaccgacaacuacaucacgaccuaccccgggcagggccugaacggguacaccgucgaggaggccaagaccgugcucaagaagugcaaguccgccuucuacauccugcccagcaucaucuccaacgagaagcaggagauccugggcaccgugagcuggaaccuccgggagaugcuggcgcacgccgaggagacgcgcaagcugaugcccgucugcguggagaccaaggccaucguguccaccauccagcggaaguacaagggcaucaagauccaggagggggucguggacuacggcgcccgcuucuacuucuacaccagcaagacgaccguggccucccugaucaacacccucaacgaccugaacgagacccuggucacgaugccgcucggguacgugacccacggccugaaccuggaggaggcggcccgguacaugcgcagccucaaggugcccgccaccgucuccgugagcucccccgacgccgugaccgccuacaacggguaccugacgagcuccagcaagacccccgaggagcacuucaucgagaccaucucccuggcgggcagcuacaaggacuggagcuacuccggccagagcacccagcucgggaucgaguuccugaagcggggcgacaaguccgucuacuacacgagcaacccgaccaccuuccaccuggacggggaggugaucaccuucgacaaccucaagacgcugcugucccuccgcgaggugcggaccaucaaggucuucaccaccguggacaacaucaaccugcacacgcagguggucgacaugagcaugaccuacggccagcaguucggccccaccuaccuggacggggccgacgugaccaagaucaagccccacaacucccacgagggcaagacguucuacgugcucccgaacgacgacacccugcgcgucgaggccuucgaguacuaccacaccaccgaccccagcuuccuggggcgguacauguccgcccucaaccacacgaagaaguggaaguacccccaggugaacggccugaccagcaucaagugggccgacaacaacugcuaccuggcgaccgcccuccugacccugcagcagaucgagcucaaguucaaccccccggcccugcaggacgccuacuaccgcgcgcgggccggggaggccgccaacuucugcgcccugauccucgcguacugcaacaagacggugggcgagcugggcgacguccgcgagaccauguccuaccuguuccagcacgccaaccucgacagcugcaagcgggugcugaacgucgugugcaagaccugcgggcagcagcagaccacccugcgcggcguggaggccgucauguacauggggacgcucuccuacgagcaguucaagaagggcgugcagauccccugcaccugcgggaagcaggccaccaaguaccuggugcagcaggagagccccuucgucaugauguccgcccccccggcgcaguacgagcugaagcacggcaccuucacgugcgccagcgaguacaccggcaacuaccagugcgggcacuacaagcacaucaccuccaaggagacccucuacugcaucgacggcgcccugcugacgaagagcagcgaguacaaggggcccaucaccgacguguucuacaaggagaacuccuacaccaccacgaucaagcccgugaccuacaagcucgacggcgucgugugcaccgagaucgaccccaagcuggacaacuacuacaagaaggacaacagcuacuucaccgagcagccgaucgaccuggugcccaaccagcccuaccccaacgccuccuucgacaacuucaaguucgucugcgacaacaucaaguucgccgacgaccucaaccagcugacgggguacaagaagccggcgagccgggagcugaaggugaccuucuuccccgaccucaacggcgacguggucgccaucgacuacaagcacuacacccccuccuucaagaagggcgccaagcugcugcacaagcccaucguguggcacgugaacaacgccaccaacaaggcgacguacaagccgaacaccuggugcauccgcugccucuggagcaccaagcccgucgagaccuccaacagcuucgacgugcugaaguccgaggacgcccaggggauggacaaccuggccugcgaggaccucaagcccgugagcgaggaggucguggagaaccccacgauccagaaggacgugcuggagugcaacgucaagaccaccgagguggugggcgacaucauccugaagccggccaacaacucccucaagaucaccgaggaggucgggcacacggaccugauggccgcguacguggacaacagcucccugaccaucaagaagcccaacgagcucagccgcgugcugggccugaagacccucgccacccacgggcuggccgccgucaacuccgugcccugggacacgaucgccaacuacgcgaagccguuccugaacaagguggucagcaccaccaccaacaucgugacgcggugccucaaccgcgugugcaccaacuacaugcccuacuucuucacccugcugcuccagcugugcaccuucacccgguccacgaacagccgcaucaaggccuccaugcccaccaccaucgccaagaacaccgucaagagcgugggcaaguucugccuggaggccagcuucaacuaccucaagucccccaacuucagcaagcugaucaacaucaucaucugguuccugcuccuguccgugugccugggcagccucaucuacuccacggccgcgcuggggguccugaugagcaaccucggcaugccguccuacugcaccggguaccgggagggcuaccugaacagcaccaacgugaccaucgccacguacugcaccggcuccauccccugcagcgugugccuguccgggcucgacagccuggacaccuaccccucccuggagaccauccagaucacgaucagcuccuucaagugggaccucaccgccuucggccuggucgccgagugguuccuggccuacauccucuucacccgcuucuucuacgugcuggggcuggcggccaucaugcagcucuucuucagcuacuucgccgugcacuucaucuccaacagcuggcugauguggcugaucaucaaccugguccagauggcccccaucuccgcgauggugcggauguacaucuucuucgccagcuucuacuacguguggaagagcuacguccacgugguggacggcugcaacuccagcaccugcaugaugugcuacaagcgcaaccgggccacgcgcgucgagugcaccaccaucgugaacgggguccggcgcuccuucuacguguacgccaacggcggcaagggguucugcaagcuccacaacuggaacugcgugaacugcgacaccuucugcgccggcagcacguucaucuccgacgaggucgcgcgggaccugagccugcaguucaagcgcccgaucaaccccaccgaccaguccagcuacaucguggacuccgugaccgucaagaacgggagcauccaccucuacuucgacaaggccggccagaagaccuacgagcggcacucccugagcuacuucgugaaccuggacaaccuccgcgccaacaacacgaaggggucccugcccaucaacgugaucgucuucgacggcaagagcaagugcgaggaguccagcgccaaguccgccagcguguacuacucccagcugaugugccagcccauccuccugcuggaccaggcgcucgugagcgacgucggcgacagcgccgagguggccgugaagauguucgacgccuacgucaacaccuucuccagcaccuucaacgugccgauggagaagcugaagacccugguggccacggcggaggccgagcucgccaagaacgucucccuggacaacgugcugagcaccuucaucuccgccgcgcggcagggguucguggacagcgacgucgagaccaaggacgugguggagugccucaagcugucccaccagagcgacaucgaggucaccggcgacuccugcaacaacuacaugcugacguacaacaagguggagaacaugaccccccgcgaccucggggccugcaucgacugcagcgcccggcacaucaacgcccagguggccaagucccacaacaucgcgcugaucuggaacgucaaggacuucaugagccuguccgagcagcuccgcaagcagauccgcagcgccgccaagaagaacaaccugcccuucaagcugaccugcgccaccacgcggcagguggugaacgucgugaccaccaagaucgcccucaagggcggguga

SEQ ID NO: 17937 - RNA, 5841 nt, Artificial Sequence
  SARS-CoV-2__MT772475.1__non-structural protein 3 (NSP3) CDS gc
auggcccccaccaaggugaccuucggcgacgacacggucaucgaggugcagggguacaagagcgugaacaucaccuucgagcuggacgagcgcaucgacaagguccucaacgagaagugcuccgccuacaccguggagcugggcaccgaggugaacgaguucgcgugcgucguggccgacgccgugaucaagacgcugcagccggucagcgagcuccugaccccccuggggaucgaccucgacgagugguccauggccaccuacuaccuguucgacgagagcggcgaguucaagcuggccucccacauguacugcagcuucuacccccccgacgaggacgaggaggagggggacugcgaggaggaggaguucgagccguccacccaguacgaguacggcacggaggacgacuaccagggcaagccccucgaguucggggcgaccagcgccgcccugcagcccgaggaggagcaggaggaggacuggcuggacgacgacucccagcagaccgugggccagcaggacgggagcgaggacaaccagaccacgaccauccagaccaucguggagguccagccccagcucgagauggagcugaccccgguggugcagacgaucgaggucaacuccuucagcggcuaccugaagcucaccgacaacguguacaucaagaacgccgacaucguggaggaggcgaagaaggucaagcccaccgugguggucaacgccgccaacguguaccugaagcacgggggcggcguggccggggcccugaacaaggcgaccaacaacgccaugcaggucgaguccgacgacuacaucgccacgaacggcccccucaagguggggggcagcugcguccuguccggccacaaccuggccaagcacugccuccacgugguggggcccaacgucaacaagggcgaggacauccagcugcugaagagcgccuacgagaacuucaaccagcacgaggugcuccuggcgccgcugcucuccgccgggaucuucggcgccgaccccauccacagccugcgggugugcgucgacaccgugcgcaccaacguguaccuggccgucuucgacaagaaccucuacgacaagcugguguccagcuuccuggagaugaagagcgagaagcagguggagcagaacaucgccgagauccccaaggaggaggucaagcccuucaucaccgaguccaagccgagcguggagcagcggaagcaggacgacaagaagaucaaggcgugcguggaggaggucacgaccacccucgaggagaccaaguuccugacggagaaccugcuccuguacaucgacaucaacgggaaccugcaccccgacuccgccacccucgugagcgacaucgacaucaccuuccugaagaaggacgcccccuacaucgugggcgacgucgugcaggagggcgugcugaccgccgucgugauccccacgaagaaggccgggggcaccaccgagaugcucgcgaaggcccugcgcaagguguccaccgacaacuacaucacgaccuacccggggcagggccugaacggguacaccgucgaggaggccaagaccgugcucaagaagugcaagagcgccuucuacauccugcccuccaucaucagcaacgagaagcaggagauccugggcaccguguccuggaaccuccgggagaugcuggcgcacgccgaggagacgcgcaagcugaugcccgucugcguggagaccaaggccaucgugagcaccauccagcggaaguacaagggcaucaagauccaggagggggucguggacuacggcgcccgcuucuacuucuacaccuccaagacgaccguggccagccugaucaacacccucaacgaccugaacgagacccuggucacgaugccccucggguacgugacccacggccugaaccuggaggaggcggcccgguacaugcgcucccucaaggugccggccaccgucagcguguccagccccgacgccgugaccgccuacaacggguaccugacguccagcuccaagacccccgaggagcacuucaucgagaccaucagccuggcgggcagcuacaaggacugguccuacagcggccaguccacccagcucgggaucgaguuccugaagcggggcgacaagagcgucuacuacacguccaaccccaccaccuuccaccuggacggggaggugaucaccuucgacaaccucaagacgcugcugagccuccgcgaggugcggaccaucaaggucuucaccaccguggacaacaucaaccugcacacgcagguggucgacauguccaugaccuacggccagcaguucggcccgaccuaccuggacggggccgacgugaccaagaucaagccccacaacagccacgagggcaagacguucuacgugcuccccaacgacgacacccugcgcgucgaggccuucgaguacuaccacaccaccgacccguccuuccuggggcgguacaugagcgcccucaaccacacgaagaaguggaaguacccccaggugaacggccugaccuccaucaagugggccgacaacaacugcuaccuggcgaccgcccuccugacccugcagcagaucgagcucaaguucaacccccccgcccugcaggacgccuacuaccgcgcgcgggccggggaggccgccaacuucugcgcccugauccucgcguacugcaacaagacggugggcgagcugggcgacguccgcgagaccaugagcuaccuguuccagcacgccaaccucgacuccugcaagcgggugcugaacgucgugugcaagaccugcgggcagcagcagaccacccugaagggcguggaggccgucauguacauggggacgcucagcuacgagcaguucaagaagggcgugcagaucccgugcaccugcgggaagcaggccaccaaguaccuggugcagcaggaguccagcuucgucaugauguccgccccccccgcgcaguacgagcugaagcacggcaccuucacgugcgccagcgaguacaccggcaacuaccagugcgggcacuacaagcacaucaccagcaaggagacccucuacugcaucgacggcgcccugcugacgaaguccagcgaguacaaggggcccaucaccgacguguucuacaaggagaacuccuacaccaccacgaucaagccggugaccuacaagcucgacggcgucgugugcaccgagaucgaccccaagcuggacaacuacuacaagaaggacaacagcuacuucaccgagcagcccaucgaccuggugcccaaccagccguaccccaacgccuccuucgacaacuucaaguucgucugcgacaacaucaaguucgccgacgaccucaaccagcugacgggguacaagaagcccgcgagccgcgagcugaaggugaccuucuuccccgaccucaacggcgacguggucgccaucgacuacaagcacuacaccccguccuucaagaagggcgccaagcugcugcacaagcccaucguguggcacgugaacaacgccaccaacaaggcgacguacaagcccaacaccuggugcauccggugccucuggagcaccaagcccgucgagaccuccaacagcuucgacgugcugaaguccgaggacgcccaggggauggacaaccuggccugcgaggaccucaagccggugagcgaggaggucguggagaaccccacgauccagaaggacgugcuggagugcaacgucaccaccaccgagguggugggcgacaucauccugaagcccgccaacaacucccucaagaucacggaggaggucgggcacaccgaccugauggccgcguacguggacaacagcucccugaccaucaagaagcccaacgagcucagccgcgugcugggccugaagacccucgccacgcacgggcuggccgccgucaacuccgugccgugggacaccaucgccaacuacgcgaagcccuuccugaacaagguggucagcaccaccacgaacaucgugacccgcugccucaaccgggugugcaccaacuacaugcccuacuucuucacccugcugcuccagcugugcaccuucacgcgcuccaccaacagccggaucaaggccagcaugccgaccaccaucgccaagaacacggucaaguccgugggcaaguucugccuggaggccagcuucaacuaccucaagucccccaacuucagcaagcugaucaacaucaucaucugguuccugcuccuguccgugugccugggcagccucaucuacuccaccgccgcgcuggggguccugaugagcaaccucggcaugcccuccuacugcaccggguaccgcgagggcuaccugaacagcaccaacgugacgaucgccaccuacugcaccggcuccauccccugcagcgugugccuguccgggcucgacagccuggacaccuacccgucccuggagacgauccagaucaccaucagcuccuucaagugggaccucaccgccuucggccuggucgccgagugguuccuggccuacauccucuucacccgguucuucuacgugcuggggcuggcggccaucaugcagcucuucuucagcuacuucgccgugcacuucaucuccaacagcuggcugauguggcugaucaucaaccugguccagauggcccccaucagcgcgauggugcgcauguacaucuucuucgccuccuucuacuacguguggaagagcuacguccacgugguggacggcugcaacuccagcacgugcaugaugugcuacaagcggaaccgcgccacccgggucgagugcaccaccaucgugaacgggguccgccgguccuucuacguguacgccaacggcggcaagggguucugcaagcuccacaacuggaacugcgugaacugcgacacguucugcgccggcagcaccuucaucuccgacgaggucgcgcgcgaccugagccugcaguucaagcggcccaucaaccccaccgaccaguccagcuacaucguggacuccgugaccgucaagaacgggagcauccaccucuacuucgacaaggccggccagaagacguacgagcgccacucccugagccacuucgugaacuucgacaaccugcgggccaacaacaccaaggggucccucccgaucaacgugaucgucuucgacggcaagagcaagugcgaggaguccagcgccaaguccgccagcguguacuacagccagcugaugugccagcccauccugcuccuggaccaggcgcugguguccgacgucggcgacagcgccgagguggccgugaagauguucgacgccuacgucaacaccuucuccagcaccuucaacgugcccauggagaagcucaagacgcugguggccaccgcggaggccgagcuggccaagaacgucucccucgacaacgugcugagcaccuucaucuccgccgcgcgccagggguucguggacagcgacgucgagaccaaggacgugguggagugccugaagcucucccaccagagcgacaucgaggucacgggcgacuccugcaacaacuacaugcugaccuacaacaagguggagaacaugaccccccgggaccugggggccugcaucgacugcagcgcccgccacaucaacgcccagguggccaagucccacaacaucgcgcucaucuggaacgucaaggacuucaugagccuguccgagcagcugcggaagcagauccgcagcgccgccaagaagaacaaccucccguucaagcugaccugcgccacgacccgccagguggugaacgucgugaccaccaagaucgcccugaagggcggguga

SEQ ID NO: 17938 - RNA, 5841 nt, Artificial Sequence
  SARS-CoV-2__MT772564.1__non-structural protein 3 (NSP3) CDS gc
auggcccccaccaaggugaccuucggcgacgacacggucaucgaggugcagggguacaagagcgugaacaucaccuucgagcuggacgagcgcaucgacaagguccucaacgagaagugcuccgccuacaccguggagcugggcaccgaggugaacgaguucgcgugcgucguggccgacgccgugaucaagacgcugcagccggucagcgagcuccugaccccccuggggaucgaccucgacgagugguccauggccaccuacuaccuguucgacgagagcggcgaguucaagcuggccucccacauguacugcagcuucuacccccccgacgaggacgaggaggagggggacugcgaggaggaggaguucgagccguccacccaguacgaguacggcacggaggacgacuaccagggcaagccccucgaguucggggcgaccagcgccgcccugcagcccgaggaggagcaggaggaggacuggcuggacgacgacucccagcagaccgugggccagcaggacgggagcgaggacaaccagaccacgaccauccagaccaucguggagguccagccccagcucgagauggagcugaccccgguggugcagacgaucgaggucaacuccuucagcggcuaccugaagcucaccgacaacguguacaucaagaacgccgacaucguggaggaggcgaagaaggucaagcccaccgugguggucaacgccgccaacguguaccugaagcacgggggcggcguggccggggcccugaacaaggcgaccaacaacgccaugcaggucgaguccgacgacuacaucgccacgaacggcccccucaagguggggggcagcugcguccuguccggccacaaccuggccaagcacugccuccacgugguggggcccaacgucaacaagggcgaggacauccagcugcugaagagcgccuacgagaacuucaaccagcacgaggugcuccuggcgccgcugcucuccgccgggaucuucggcgccgaccccauccacagccugcgggugugcgucgacaccgugcgcaccaacguguaccuggccgucuucgacaagaaccucuacgacaagcugguguccagcuuccuggagaugaagagcgagaagcagguggagcagaagaucgucgagauccccaaggaggaggugaagcccuucaucaccgaguccaagccgagcguggagcagcggaagcaggacgacaagaagaucaaggccugcgucgaggaggugacgaccacccucgaggagaccaaguuccugacggagaaccugcuccuguacaucgacaucaacgggaaccugcaccccgacuccgcgacccucgugagcgacaucgacaucaccuuccugaagaaggacgcccccuacaucgucggcgacguggugcaggagggcguccugaccgccguggugauccccacgaagaaggccgggggcaccaccgagaugcucgccaaggcgcugcgcaaggucccgaccgacaacuacaucacgaccuaccccgggcagggccugaacggguacaccguggaggaggccaagaccgugcucaagaagugcaaguccgccuucuacauccugcccagcaucaucuccaacgagaagcaggagauccugggcaccgucagcuggaaccuccgggagaugcuggcccacgcggaggagacgcgcaagcugaugcccgugugcguggagaccaaggccaucgucuccaccauccagcggaaguacaagggcaucaagauccaggagggggugguggacuacggcgcccgcuucuacuucuacaccagcaagacgaccgucgccucccugaucaacacccucaacgaccugaacgagacccuggugacgaugccgcucggguacgugacccacggccugaaccuggaggaggccgcgcgguacaugcgcagccucaagguccccgccaccguguccgugagcucccccgacgccgucaccgccuacaacggguaccugacgagcuccagcaagacccccgaggagcacuucaucgagaccaucucccuggccggcagcuacaaggacuggagcuacuccggccagagcacccagcucgggaucgaguuccugaagcggggcgacaaguccguguacuacacgagcaacccgaccaccuuccaccuggacggggaggugaucaccuucgacaaccucaagacgcugcugucccuccgcgagguccggaccaucaagguguucaccaccguggacaacaucaaccugcacacgcaggucguggacaugagcaugaccuacggccagcaguucggccccaccuaccuggacggggcggacgugaccaagaucaagccccacaacucccacgagggcaagacguucuacguccucccgaacgacgacacccugcgcguggaggccuucgaguacuaccacaccaccgaccccagcuuccuggggcgguacauguccgcccucaaccacacgaagaaguggaaguacccccaggugaacggccugaccagcaucaagugggccgacaacaacugcuaccuggccaccgcgcuccugacccugcagcagaucgagcucaaguucaaccccccggcccugcaggacgccuacuaccgcgcccgggcgggggaggccgccaacuucugcgcccugauccucgccuacugcaacaagacggucggcgagcugggcgacgugcgcgagaccauguccuaccuguuccagcacgcgaaccucgacagcugcaagcggguccugaacguggugugcaagaccugcgggcagcagcagaccacccugaagggcgucgaggccgugauguacauggggacgcucuccuacgagcaguucaagaagggcgugcagauccccugcaccugcgggaagcaggccaccaaguaccugguccagcaggagagccccuucgugaugauguccgcccccccggcccaguacgagcugaagcacggcaccuucacgugcgcgagcgaguacaccggcaacuaccagugcgggcacuacaagcacaucaccuccaaggagacccucuacugcaucgacggcgcccugcugacgaagagcagcgaguacaaggggcccaucaccgacguguucuacaaggagaacuccuacaccaccacgaucaagcccgucaccuacaagcucgacggcguggugugcaccgagaucgaccccaagcuggacaacuacuacaagaaggacaacagcuacuucaccgagcagccgaucgaccugguccccaaccagcccuaccccaacgccuccuucgacaacuucaaguucgugugcgacaacaucaaguucgccgacgaccucaaccagcugacgggguacaagaagccggccagccgcgagcugaaggugaccuucuuccccgaccucaacggcgacgucguggcgaucgacuacaagcacuacacccccuccuucaagaagggcgccaagcugcugcacaagcccaucguguggcacgucaacaacgccaccaacaaggccacguacaagccgaacaccuggugcauccggugccucuggagcaccaagcccguggagaccuccaacagcuucgacgugcugaaguccgaggacgcgcaggggauggacaaccuggccugcgaggaccucaagcccgucagcgaggaggugguggagaaccccacgauccagaaggacguccuggagugcaacgugaagaccaccgagguggucggcgacaucauccugaagccggccaacaacucccucaagaucaccgaggagguggggcacacggaccugauggccgccuacguggacaacagcucccugaccaucaagaagcccaacgagcucagccgcguccugggccugaagacccucgcgacccacgggcuggccgccgugaacuccgugcccugggacacgaucgccaacuacgccaagccguuccugaacaaggucgugagcaccaccaccaacaucgugacgcgcugccucaaccgggucugcaccaacuacaugcccuacuucuucacccugcugcuccagcugugcaccuucacccgcuccacgaacagccggaucaaggcguccaugcccaccaccaucgccaagaacaccgugaagagcgugggcaaguucugccuggaggccagcuucaacuaccucaagucccccaacuucagcaagcugaucaacaucaucaucugguuccugcuccuguccgucugccugggcagccucaucuacuccacggccgcccugggggugcugaugagcaaccucggcaugccguccuacugcaccggguaccgcgagggcuaccugaacagcaccaacgugaccaucgcgacguacugcaccggcuccauccccugcagcgucugccuguccgggcucgacagccuggacaccuaccccucccuggagaccauccagaucacgaucagcuccuucaagugggaccucaccgccuucggccugguggccgagugguuccuggccuacauccucuucacccgguucuucuacgugcuggggcuggccgcgaucaugcagcucuucuucagcuacuucgccguccacuucaucuccaacagcuggcugauguggcugaucaucaaccuggugcagauggcccccaucuccgccauggugcgcauguacaucuucuucgcgagcuucuacuacgucuggaagagcuacgugcacguggucgacggcugcaacuccagcaccugcaugaugugcuacaagcggaaccgcgccacgcggguggagugcaccaccaucgucaacggggugcgccgguccuucuacguguacgccaacggcggcaagggguucugcaagcuccacaacuggaacugcgucaacugcgacaccuucugcgccggcagcacguucaucuccgacgagguggcccgcgaccugagccugcaguucaagcggccgaucaaccccaccgaccaguccagcuacaucguggacuccgucaccgugaagaacgggagcauccaccucuacuucgacaaggcgggccagaagaccuacgagcgccacucccugagccacuucgugaaccuggacaaccuccgggccaacaacacgaaggggucccugcccaucaacgucaucguguucgacggcaagagcaagugcgaggaguccagcgccaaguccgccagcguguacuacucccagcugaugugccagcccauccuccugcuggaccaggcccucgucagcgacgugggcgacagcgcggagguggccgucaagauguucgacgccuacgugaacaccuucuccagcaccuucaacgugccgauggagaagcugaagacccuggucgccacggccgaggcggagcucgccaagaacgugucccuggacaacgugcugagcaccuucaucuccgccgcccgccagggguucgucgacagcgacguggagaccaaggacguggucgagugccucaagcugucccaccagagcgacaucgaggugaccggcgacuccugcaacaacuacaugcugacguacaacaagguggagaacaugaccccccgggaccucggggcgugcaucgacugcagcgcccgccacaucaacgcccaggucgccaagucccacaacaucgcccugaucuggaacgugaaggacuucaugagccuguccgagcagcuccggaagcagauccgcagcgcggccaagaagaacaaccugcccuucaagcugaccugcgccaccacgcgccagguggucaacguggugaccaccaagaucgcccucaagggcggguga

SEQ ID NO: 17939 - RNA, 5841 nt, Artificial Sequence
  SARS-CoV-2__MT772565.1__non-structural protein 3 (NSP3) CDS gc
auggcccccaccaaggugaccuucggcgacgacacggucaucgaggugcagggguacaagagcgugaacaucaccuucgagcuggacgagcgcaucgacaagguccucaacgagaagugcuccgccuacaccguggagcugggcaccgaggugaacgaguucgcgugcgucguggccgacgccgugaucaagacgcugcagccggucagcgagcuccugaccccccuggggaucgaccucgacgagugguccauggccaccuacuaccuguucgacgagagcggcgaguucaagcuggccucccacauguacugcagcuucuacccccccgacgaggacgaggaggagggggacugcgaggaggaggaguucgagccguccacccaguacgaguacggcacggaggacgacuaccagggcaagccccucgaguucggggcgaccagcgccgcccugcagcccgaggaggagcaggaggaggacuggcuggacgacgacucccagcagaccgugggccagcaggacgggagcgaggacaaccagaccacgaccauccagaccaucguggagguccagccccagcucgagauggagcugaccccgguggugcagacgaucgaggucaacuccuucagcggcuaccugaagcucaccgacaacguguacaucaagaacgccgacaucguggaggaggcgaagaaggucaagcccaccgugguggucaacgccgccaacguguaccugaagcacgggggcggcguggccggggcccugaacaaggcgaccaacaacgccaugcaggucgaguccgacgacuacaucgccacgaacggcccccucaagguggggggcagcugcguccuguccggccacaaccuggccaagcacugccuccacgugguggggcccaacgucaacaagggcgaggacauccaguuccugaagagcgccuacgagaacuucaaccagcacgaggugcugcucgcgccgcugcuguccgccgggaucuucggcgccgaccccauccacagccuccgggugugcgucgacaccgugcgcaccaacguguaccuggccgucuucgacaagaaccuguacgacaagcucguguccagcuuccuggagaugaagagcgagaagcagguggagcagaagaucgccgagauccccaaggaggaggucaagcccuucaucaccgaguccaagccgagcguggagcagcggaagcaggacgacaagaagaucaaggcgugcguggaggaggucacgaccacccuggaggagaccaaguuccucacggagaaccugcugcucuacaucgacaucaacgggaaccugcaccccgacuccgccacccuggugagcgacaucgacaucaccuuccucaagaaggacgcccccuacaucgugggcgacgucgugcaggagggcgugcugaccgccgucgugauccccacgaagaaggccgggggcaccaccgagaugcuggcgaaggcccuccgcaaggugccgaccgacaacuacaucacgaccuaccccgggcagggccugaacggguacaccgucgaggaggccaagaccgugcugaagaagugcaaguccgccuucuacauccuccccagcaucaucuccaacgagaagcaggagauccugggcaccgugagcuggaaccugcgggagaugcucgcgcacgccgaggagacgcgcaagcugaugcccgucugcguggagaccaaggccaucguguccaccauccagcggaaguacaagggcaucaagauccaggagggggucguggacuacggcgcccgcuucuacuucuacaccagcaagacgaccguggccucccugaucaacacccugaacgaccucaacgagacccuggucacgaugccgcugggguacgugacccacggccucaaccuggaggaggcggcccgguacaugcgcagccugaaggugcccgccaccgucuccgugagcucccccgacgccgugaccgccuacaacggguaccucacgagcuccagcaagacccccgaggagcacuucaucgagaccaucucccuggcgggcagcuacaaggacuggagcuacuccggccagagcacccagcuggggaucgaguuccucaagcggggcgacaaguccgucuacuacacgagcaacccgaccaccuuccaccuggacggggaggugaucaccuucgacaaccugaagacgcuccugucccugcgcgaggugcggaccaucaaggucuucaccaccguggacaacaucaaccuccacacgcagguggucgacaugagcaugaccuacggccagcaguucggccccaccuaccuggacggggccgacgugaccaagaucaagccccacaacucccacgagggcaagacguucuacgugcugccgaacgacgacacccuccgcgucgaggccuucgaguacuaccacaccaccgaccccagcuuccuggggcgguacauguccgcccugaaccacacgaagaaguggaaguacccccaggugaacggccucaccagcaucaagugggccgacaacaacugcuaccuggcgaccgcccugcucacccugcagcagaucgagcugaaguucaaccccccggcccuccaggacgccuacuaccgcgcgcgggccggggaggccgccaacuucugcgcccugauccuggcguacugcaacaagacggugggcgagcucggcgacguccgcgagaccauguccuaccuguuccagcacgccaaccuggacagcugcaagcgggugcucaacgucgugugcaagaccugcgggcagcagcagaccacccugaagggcguggaggccgucauguacauggggacgcuguccuacgagcaguucaagaagggcgugcagauccccugcaccugcgggaagcaggccaccaaguaccucgugcagcaggagagccccuucgucaugauguccgcccccccggcgcaguacgagcugaagcacggcaccuucacgugcgccagcgaguacaccggcaacuaccagugcgggcacuacaagcacaucaccuccaaggagacccuguacugcaucgacggcgcccuccugacgaagagcagcgaguacaaggggcccaucaccgacguguucuacaaggagaacuccuacaccaccacgaucaagcccgugaccuacaagcuggacggcgucgugugcaccgagaucgaccccaagcucgacaacuacuacaagaaggacaacagcuacuucaccgagcagccgaucgaccuggugcccaaccagcccuaccccaacgccuccuucgacaacuucaaguucgucugcgacaacaucaaguucgccgacgaccugaaccagcucacgggguacaagaagccggcgagccgcgagcugaaggugaccuucuuccccgaccugaacggcgacguggucgccaucgacuacaagcacuacacccccuccuucaagaagggcgccaagcuccugcacaagcccaucguguggcacgugaacaacgccaccaacaaggcgacguacaagccgaacaccuggugcauccggugccuguggagcaccaagcccgucgagaccuccaacagcuucgacgugcucaaguccgaggacgcccaggggauggacaaccuggccugcgaggaccugaagcccgugagcgaggaggucguggagaaccccacgauccagaaggacgugcucgagugcaacgucaagaccaccgagguggugggcgacaucauccugaagccggccaacaacucccugaagaucaccgaggaggucgggcacacggaccucauggccgcguacguggacaacagcucccugaccaucaagaagcccaacgagcugagccgcgugcucggccugaagacccuggccacccacgggcucgccgccgucaacuccgugcccugggacacgaucgccaacuacgcgaagccguuccugaacaagguggucagcaccaccaccaacaucgugacgcgcugccugaaccgggugugcaccaacuacaugcccuacuucuucacccuccugcugcagcucugcaccuucacccgcuccacgaacagccggaucaaggccuccaugcccaccaccaucgccaagaacaccgucaagagcgugggcaaguucugccuggaggccagcuucaacuaccugaagucccccaacuucagcaagcucaucaacaucaucaucugguuccugcugcucuccgugugccugggcagccugaucuacuccacggccgcgcucgggguccugaugagcaaccugggcaugccguccuacugcaccggguaccgcgagggcuaccucaacagcaccaacgugaccaucgccacguacugcaccggcuccauccccugcagcgugugccuguccgggcuggacagccucgacaccuaccccucccuggagaccauccagaucacgaucagcuccuucaagugggaccugaccgccuucggccucgucgccgagugguuccuggccuacauccuguucacccgguucuucuacgugcucgggcuggcggccaucaugcagcuguucuucagcuacuucgccgugcacuucaucuccaacagcuggcucauguggcugaucaucaaccugguccagauggcccccaucuccgcgauggugcgcauguacaucuucuucgccagcuucuacuacguguggaagagcuacguccacgugguggacggcugcaacuccagcaccugcaugaugugcuacaagcggaaccgcgccacgcgggucgagugcaccaccaucgugaacgggguccgccgguccuucuacguguacgccaacggcggcaagggguucugcaagcugcacaacuggaacugcgugaacugcgacaccuucugcgccggcagcacguucaucuccgacgaggucgcgcgcgaccucagccugcaguucaagcggccgaucaacuccaccgaccagagcuccuacaucguggacagcgugaccgucaagaacggguccauccaccuguacuucgacaaggccggccagaagaccuacgagcgccacagccucucccacuucgugaaccuggacaaccugcgggccaacaacacgaaggggagccuccccaucaacgugaucgucuucgacggcaaguccaagugcgaggagagcuccgccaagagcgccuccguguacuacagccagcugaugugccagcccauccugcuccuggaccaggcgcuggugagcgacgucggcgacuccgccgagguggccgugaagauguucgacgccuacgucaacaccuucagcuccaccuucaacgugcccauggagaagcucaagacccugguggccacggcggaggccgagcuggccaagaacgucagccucgacaacgugcuguccaccuucaucagcgccgcgcgccagggguucguggacuccgacgucgagaccaaggacgugguggagugccugaagcucagccaccaguccgacaucgaggucaccggcgacagcugcaacaacuacaugcugacguacaacaagguggagaacaugaccccgcgggaccugggggccugcaucgacugcuccgcccgccacaucaacgcccagguggccaagagccacaacaucgcgcucaucuggaacgucaaggacuucaugucccugagcgagcagcugcggaagcagauccgcuccgccgccaagaagaacaaccuccccuucaagcugaccugcgccaccacgcgccagguggugaacgucgugaccaccaagaucgcccugaagggcggguga

SEQ ID NO: 17940 - RNA, 5841 nt, Artificial Sequence
  SARS-CoV-2__MT772569.1__non-structural protein 3 (NSP3) CDS gc
auggcccccaccaaggugaccuucggcgacgacacggucaucgaggugcagggguacaagagcgugaacaucaccuucgagcuggacgagcgcaucgacaagguccucaacgagaagugcuccgccuacaccguggagcugggcaccgaggugaacgaguucgcgugcgucguggccgacgccgugaucaagacgcugcagccggucagcgagcuccugaccccccuggggaucgaccucgacgagugguccauggccaccuacuaccuguucgacgagagcggcgaguucaagcuggccucccacauguacugcagcuucuacccccccgacgaggacgaggaggagggggacugcgaggaggaggaguucgagccgcucacccaguacgaguacggcacggaggacgacuaccagggcaagccccuggaguucggggcgaccuccgccgcccugcagcccgaggaggagcaggaggaggacuggcucgacgacgacagccagcagaccgugggccagcaggacggguccgaggacaaccagaccacgaccauccagaccaucguggagguccagccccagcuggagauggagcugaccccgguggugcagacgaucgaggucaacagcuucuccggcuaccucaagcugaccgacaacguguacaucaagaacgccgacaucguggaggaggcgaagaaggucaagcccaccgugguggucaacgccgccaacguguaccugaagcacgggggcggcguggccggggcccucaacaaggcgaccaacaacgccaugcaggucgagagcgacgacuacaucgccacgaacggcccccugaagguggggggcuccugcguccugagcggccacaaccucgccaagcacugccugcacgugguggggcccaacgucaacaagggcgaggacauccagcugcucaaguccgccuacgagaacuucaaccagcacgaggugcugcuggcgccgcuccugagcgccgggaucuucggcgccgaccccauccacucccugcgggugugcgucgacaccgugcgcaccaacguguaccucgccgucuucgacaagaaccuguacgacaagcuggugagcuccuuccucgagaugaagagcgagaagcagguggagcagaagaucgccgagauccccaaggaggaggucaagcccuucaucaccgagagcaagccguccguggagcagcggaagcaggacgacaagaagaucaaggcgugcguggaggaggucacgaccacccuggaggagaccaaguuccugacggagaaccuccugcuguacaucgacaucaacgggaaccuccaccccgacagcgccacccugguguccgacaucgacaucaccuuccugaagaaggacgcccccuacaucgugggcgacgucgugcaggagggcgugcucaccgccgucgugauccccacgaagaaggccgggggcaccaccgagaugcuggcgaaggcccugcgcaaggugccgaccgacaacuacaucacgaccuaccccgggcagggccucaacggguacaccgucgaggaggccaagaccgugcugaagaagugcaagagcgccuucuacauccugcccuccaucaucagcaacgagaagcaggagauccucggcaccguguccuggaaccugcgggagaugcuggcgcacgccgaggagacgcgcaagcugaugcccgucugcguggagaccaaggccaucgugagcaccauccagcggaaguacaagggcaucaagauccaggagggggucguggacuacggcgcccgcuucuacuucuacaccuccaagacgaccguggccagccucaucaacacccugaacgaccugaacgagacccucgucacgaugccgcugggguacgugacccacggccugaaccucgaggaggcggcccgguacaugcgcucccugaaggugcccgccaccgucagcguguccagccccgacgccgugaccgccuacaacggguaccugacguccagcuccaagacccccgaggagcacuucaucgagaccaucagccucgcgggcuccuacaaggacuggagcuacagcggccaguccacccagcuggggaucgaguuccugaagcggggcgacaagagcgucuacuacacguccaacccgaccaccuuccaccucgacggggaggugaucaccuucgacaaccugaagacgcugcucagccugcgcgaggugcggaccaucaaggucuucaccaccguggacaacaucaaccugcacacgcagguggucgacauguccaugaccuacggccagcaguucggccccaccuaccucgacggggccgacgugaccaagaucaagccccacaacagccacgagggcaagacguucuacgugcugccgaacgacgacacccugcgcgucgaggccuucgaguacuaccacaccaccgaccccuccuuccucgggcgguacaugagcgcccugaaccacacgaagaaguggaaguacccccaggugaacggccugaccuccaucaagugggccgacaacaacugcuaccucgcgaccgcccugcugacccuccagcagaucgagcugaaguucaaccccccggcccugcaggacgccuacuaccgcgcgcgggccggggaggccgccaacuucugcgcccucauccuggcguacugcaacaagacggugggcgagcugggcgacguccgcgagaccaugagcuaccucuuccagcacgccaaccuggacuccugcaagcgggugcugaacgucgugugcaagaccugcgggcagcagcagaccacccucaagggcguggaggccgucauguacauggggacgcugagcuacgagcaguucaagaagggcgugcagauccccugcaccugcgggaagcaggccaccaaguaccuggugcagcaggagucccccuucgucaugaugagcgcccccccggcgcaguacgagcucaagcacggcaccuucacgugcgccuccgaguacaccggcaacuaccagugcgggcacuacaagcacaucaccagcaaggagacccuguacugcaucgacggcgcccugcucacgaaguccagcgaguacaaggggcccaucaccgacguguucuacaaggagaacagcuacaccaccacgaucaagcccgugaccuacaagcuggacggcgucgugugcaccgagaucgaccccaagcuggacaacuacuacaagaaggacaacuccuacuucaccgagcagccgaucgaccucgugcccaaccagcccuaccccaacgccagcuucgacaacuucaaguucgucugcgacaacaucaaguucgccgacgaccugaaccagcugacgggguacaagaagccggcgucccgcgagcucaaggugaccuucuuccccgaccugaacggcgacguggucgccaucgacuacaagcacuacacccccagcuucaagaagggcgccaagcugcuccacaagcccaucguguggcacgugaacaacgccaccaacaaggcgacguacaagccgaacaccuggugcauccggugccugugguccaccaagcccgucgagaccagcaacuccuucgacgugcugaagagcgaggacgcccaggggauggacaaccucgccugcgaggaccugaagcccguguccgaggaggucguggagaaccccacgauccagaaggacgugcuggagugcaacgucaagaccaccgagguggugggcgacaucauccucaagccggccaacaacagccugaagaucaccgaggaggucgggcacacggaccugauggccgcguacguggacaacuccagccucaccaucaagaagcccaacgagcugucccgcgugcugggccucaagacccuggccacccacgggcuggccgccgucaacagcgugcccugggacacgaucgccaacuacgcgaagccguuccucaacaagguggucuccaccaccaccaacaucgugacgcgcugccugaaccgggugugcaccaacuacaugcccuacuucuucacccugcuccugcagcugugcaccuucacccgcagcacgaacucccggaucaaggccagcaugcccaccaccaucgccaagaacaccgucaaguccgugggcaaguucugccucgaggccagcuucaacuaccugaagagccccaacuucuccaagcugaucaacaucaucaucugguuccuccugcugagcgugugccucggcucccugaucuacagcacggccgcgcuggggguccucauguccaaccugggcaugccgagcuacugcaccggguaccgcgagggcuaccugaacuccaccaacgugaccaucgccacguacugcaccggcagcauccccugcuccgugugccucagcgggcuggacucccuggacaccuaccccagccucgagaccauccagaucacgaucuccagcuucaagugggaccugaccgccuucggccuggucgccgagugguuccucgccuacauccuguucacccgguucuucuacgugcuggggcucgcggccaucaugcagcuguucuucuccuacuucgccgugcacuucaucagcaacuccuggcugauguggcugaucaucaaccucguccagauggcccccaucagcgcgauggugcgcauguacaucuucuucgccuccuucuacuacguguggaagagcuacguccacgugguggacggcugcaacagcuccaccugcaugaugugcuacaagcggaaccgcgccacgcgggucgagugcaccaccaucgugaacgggguccgccggagcuucuacguguacgccaacggcggcaagggguucugcaagcugcacaacuggaacugcgugaacugcgacaccuucugcgccggcuccacguucaucagcgacgaggucgcgcgcgaccugucccuccaguucaagcggccgaucaaccccaccgaccagagcuccuacaucguggacagcgugaccgucaagaacggguccauccaccuguacuucgacaaggccggccagaagaccuacgagcgccacagccugucccacuucgugaaccucgacaaccugcgggccaacaacacgaaggggagccugcccaucaacgugaucgucuucgacggcaaguccaagugcgaggagagcuccgccaagagcgccuccguguacuacagccagcucaugugccagcccauccugcugcucgaccaggcgcugguguccgacgucggcgacagcgccgagguggccgugaagauguucgacgccuacgucaacaccuucagcuccaccuucaacgugccgauggagaagcugaagacccucguggccacggcggaggccgagcuggccaagaacgucagccuggacaacgugcucuccaccuucaucagcgccgcgcgccagggguucguggacuccgacgucgagaccaaggacgugguggagugccugaagcugagccaccaguccgacaucgaggucaccggcgacagcugcaacaacuacaugcucacguacaacaagguggagaacaugaccccccgggaccugggggccugcaucgacugcuccgcccgccacaucaacgcccagguggccaagagccacaacaucgcgcugaucuggaacgucaaggacuucaugucccucagcgagcagcugcggaagcagauccgcuccgccgccaagaagaacaaccugcccuucaagcucaccugcgccaccacgcgccagguggugaacgucgugaccaccaagaucgcccugaagggcggguga

SEQ ID NO: 17941 - RNA, 5841 nt, Artificial Sequence
  SARS-CoV-2__MT758193.1__non-structural protein 3 (NSP3) CDS gc
auggcccccaccaaggugaccuucggcgacgacacggucaucgaggugcagggguacaagagcgugaacaucaccuucgagcuggacgagcgcaucgacaagguccucaacgagaagugcuccgccuacaccguggagcugggcaccgaggugaacgaguucgcgugcgucguggccgacgccgugaucaagacgcugcagccggucagcgagcuccugaccccccuggggaucgaccucgacgagugguccauggccaccuacuaccuguucgacgagagcggcgaguucaagcuggccucccacauguacugcagcuucuacccccccgacgaggacgaggaggagggggacugcgaggaggaggaguucgagccguccacccaguacgaguacggcacggaggacgacuaccagggcaagccccucgaguucggggcgaccagcgccgcccugcagcccgaggaggagcaggaggaggacuggcuggacgacgacucccagcagaccgugggccagcaggacgggagcgaggacaaccagaccacgaccauccagaccaucguggagguccagccccagcucgagauggagcugaccccgguggugcagacgaucgaggucaacuccuucagcggcuaccugaagcucaccgacaacguguacaucaagaacgccgacaucguggaggaggcgaagaaggucaagcccaccgugguggucaacgccgccaacguguaccugaagcacgggggcggcguggccggggcccugaacaaggcgaccaacaacgccaugcaggucgaguccgacgacuacaucgccacgaacggcccccucaagguggggggcagcugcguccuguccggccacaaccuggccaagcacugccuccacgugguggggcccaacgucaacaagggcgaggacauccagcugcugaagagcgccuacgagaacuucaaccagcacgaggugcuccuggcgccgcugcucuccgccgggaucuucggcgccgaccccauccacagccugcgggugugcgucgacaccgugcgcaccaacguguaccuggccgucuucgacaagaaccucuacgacaagcugguguccagcuuccuggagaugaagagcgagaagcagguggagcagaagaucgccgagauccccaaggaggaggucaagcccuucaucaccgaguccaagccgagcguggagcagcggaagcaggacgacaagaagaucaaggcgugcguggaggaggucacgaccacccucgaggagaccaaguuccugacggagaaccugcuccuguacaucgacaucaacgggaaccugcaccccgacuccgccacccucgugagcgacaucgacaucaccuuccugaagaaggacgcccccuacaucgugggcgacgucgugcaggagggcgugcugaccgccgucgugauccccacgaagaaggccgggggcaccaccgagaugcucgcgaaggcccugcgcaaggugccgaccgacaacuacaucacgaccuaccccgggcagggccugaacggguacaccgucgaggaggccaagaccgugcucaagaagugcaaguccgccuucuacauccugcccagcaucaucuccaacgagaagcaggagauccugggcaccgugagcuggaaccuccgggagaugcuggcgcacgccgaggagacgcgcaagcugaugcccgucugcguggagaccaaggccaucguguccaccauccagcggaaguacaagggcaucaagauccaggagggggucguggacuacggcgcccgcuucuacuucuacaccagcaagacgaccguggccucccugaucaacacccucaacgaccugaacgagacccuggucacgaugccgcucggguacgugacccacggccugaaccuggaggaggcggcccgguacaugcgcagccucaaggugcccgccaccgucuccgugagcucccccgacgccgugaccgccuacaacggguaccugacgagcuccagcaagacccccgaggagcacuucaucgagaccaucucccuggcgggcagcuacaaggacuggagcuacuccggccagagcacccagcucgggaucgaguuccugaagcggggcgacaaguccgucuacuacacgagcaacccgaccaccuuccaccuggacggggaggugaucaccuucgacaaccucaagacgcugcugucccuccgcgaggugcggaccaucaaggucuucaccaccguggacaacaucaaccugcacacgcagguggucgacaugagcaugaccuacggccagcaguucggccccaccuaccuggacggggccgacgugaccaagaucaagccccacaacucccacgagggcaagacguucuacgugcucccgaacgacgacacccugcgcgucgaggccuucgaguacuaccacaccaccgaccccagcuuccuggggcgguacauguccgcccucaaccacacgaagaaguggaaguacccccaggugaacggccugaccagcaucaagugggccgacaacaacugcuaccuggcgaccgcccuccugacccugcagcagaucgagcucaaguucaaccccccggcccugcaggacgccuacuaccgcgcgcgggccggggaggccgccaacuucugcgcccugauccucgcguacugcaacaagacggugggcgagcugggcgacguccgcgagaccauguccuaccuguuccagcacgccaaccucgacagcugcaagcgggugcugaacgucgugugcaagaccugcgggcagcagcagaccacccugaagggcguggaggccgucauguacauggggacgcucuccuacgagcaguucaagaagggcgugcagauccccugcaccugcgggaagcaggccaccaaguaccuggugcagcaggagagccccuucgucaugauguccgcccccccggcgcaguacgagcugaagcacggcaccuucacgugcgccagcgaguacaccggcaacuaccagugcgggcacuacaagcacaucaccuccaaggagacccucuacugcaucgacggcgcccugcugacgaagagcagcgaguacaaggggcccaucaccgacguguucuacaaggagaacuccuacaccaccacgaucaagcccgugaccuacaagcucgacggcgucgugugcaccgagaucgaccccaagcuggacaacuacuacaagaaggacaacagcuacuucaccgagcagccgaucgaccuggugcccaaccagcccuaccccaacgccuccuucgacaacuucaaguucgucugcgacaacaucaaguucgccgacgaccucaaccagcugacgggguacaagaagccggcgagccgcgagcugaaggugaccuucuuccccgaccucaacggcgacguggucgccaucgacuacaagcacuacacccccuccuucaagaagggcgccaagcugcugcacaagcccaucguguggcacgugaacaacgccaccaacaaggcgacguacaagccgaacaccuggugcauccggugccucuggagcaccaagcccgucgagaccuccaacagcuucgacgugcugaaguccgaggacgcccaggggauggacaaccuggccugcgaggaccucaagcccgugagcgaggaggucguggagaaccccacgauccagaaggacgugcuggagugcaacgucaagaccaccgagguggugggcgacaucauccugaagccggccaacaacucccucaagaucaccgaggaggucgggcacacggaccugauggccgcguacguggacaacagcucccugaccaucaagaagcccaacgagcucagccgcgugcugggccugaagacccucgccacccacgggcuggccgccgucaacuccgugcccugggacacgaucgccaacuacgcgaagccguuccugaacaagguggucagcaccaccaccaacaucgugacgcgcugccucaaccgggugugcaccaacuacaugcccuacuucuucacccugcugcuccagcugugcaccuucacccgcuccacgaacagccggaucaaggccuccaugcccaccaccaucgccaagaacaccgucaagagcgugggcaaguucugccuggaggccagcuucaacuaccucaagucccccaacuucagcaagcugaucaacaucaucaucugguuccugcuccuguccgugugccugggcagccucaucuacuccacggccgcgcuggggguccugaugagcaaccucggcaugccguccuacugcaccggguaccgcgagggcuaccugaacagcaccaacgugaccaucgccacguacugcaccggcuccauccccugcagcgugugccuguccgggcucgacagccuggacaccuaccccucccuggagaccauccagaucacgaucagcuccuucaagugggaccucaccgccuucggccuggucgccgagugguuccuggccuacauccucuucacccgguucuucuacgugcuggggcuggcggccaucaugcagcucuucuucagcuacuucgccgugcacuucaucuccaacagcuggcugauguggcugaucaucaaccugguccagauggcccccaucuccgcgauggugcgcauguacaucuucuucgccagcuucuacuacguguggaagagcuacguccacgugguggacggcugcaacuccagcaccugcaugaugugcuacaagcggaaccgcgccacgcgggucgagugcaccaccaucgugaacgggguccgccgguccuucuacguguacgccaacggcggcaagggguucugcaagcuccacaacuggaacugcgugaacugcgacaccuucugcgccggcagcacguucaucuccgacgaggucgcgcgcgaccugagccugcaguucaagcggccgaucaaccccaccgaccaguccagcuacaucguggacuccgugaccgucaagaacgggagcauccaccucuacuucgacaaggccggccagaagaccuacgagcgccacucccugagccacuucgugaaccuggacaaccuccgggccaacaacacgaaggggucccugcccaucaacgugaucgucuucgacggcaagagcaagugcgaggaguccagcgccaaguccgccagcguguacuacucccagcugaugugccagcccauccuccugcuggaccaggcgcucgugagcgacgucggcgacagcgccgagguggccgugaagauguucgacgccuacgucaacaccuucuccagcaccuucaacgugccgauggagaagcugaagacccugguggccacggcggaggccgagcucgccaagaacgucucccuggacaacgugcugagcaccuucaucuccgccgcgcgccagggguucguggacagcgacgucgagaccaaggacgugguggagugccucaagcugucccaccagagcgacaucgaggucaccggcgacuccugcaacaacuacaugcugacguacaacaagguggagaacaugaccccccgggaccucggggccugcaucgacugcagcgcccgccacaucaacgcccagguggccaagucccacaacaucgcgcugaucuggaacgucaaggacuucaugagccuguccgagcagcuccggaagcagauccgcagcgacgccaagaagaacaaccugcccuucaagcugaccugcgccaccacgcgccagguggugaacgucgugaccaccaagaucgcccucaagggcggguga

SEQ ID NO: 17942 - RNA, 5841 nt, Artificial Sequence
  SARS-CoV-2__MT758215.1__non-structural protein 3 (NSP3) CDS gc
auggcccccaccaaggugaccuucggcgacgacacggucaucgaggugcagggguacaagagcgugaacaucaccuucgagcuggacgagcgcaucgacaagguccucaacgagaagugcuccgccuacaccguggagcugggcaccgaggugaacgaguucgcgugcgucguggccgacgccgugaucaagacgcugcagccggucagcgagcuccugaccccccuggggaucgaccucgacgagugguccauggccaccuacuaccuguucgacgagagcggcgaguucaagcuggccucccacauguacugcagcuucuacccccccgacgaggacgaggaggagggggacugcgaggaggaggaguucgagccguccacccaguacgaguacggcacggaggacgacuaccagggcaagccccucgaguucggggcgaccagcgccgcccugcagcccgaggaggagcaggaggaggacuggcuggacgacgacucccagcagaccgugggccagcaggacgggagcgaggacaaccagaccacgaccauccagaccaucguggagguccagccccagcucgagauggagcugaccccgguggugcagacgaucgaggucaacuccuucagcggcuaccugaagcucaccgacaacguguacaucaagaacgccgacaucguggaggaggcgaagaaggucaagcccaccgugguggucaacgccgccaacguguaccugaagcacgggggcggcguggccggggcccugaacaaggcgaccaacaacgccaugcaggucgaguccgacgacuacaucgccacgaacggcccccucaagguggggggcagcugcguccuguccggccacaaccuggccaagcacugccuccacgugguggggcccaacgucaacaagggcgaggacauccagcugcugaagagcgccuacgagaacuucaaccagcacgaggugcuccuggcgccgcugcucuccgccgggaucuucggcgccgaccccauccacagccugcgggugugcgucgacaccgugcgcaccaacguguaccuggccgucuucgacaagaaccucuacgacaagcugguguccagcuuccuggagaugaagagcgagaagcagguggagcagaagaucgccgagauccccaaggaggaggucaagcccuucaucaccgaguccaagccgagcguggagcagcggaagcaggacgacaagaagaucaaggcgugcguggaggaggucacgaccacccucgaggagaccaaguuccugacggagaaccugcuccuguacaucgacaucaacgggaaccugcaccccgacuccgccacccucgugagcgacaucgacaucaccuuccugaagaaggacgcccccuacaucgugggcgacgucgugcaggagggcgugcugaccgccgucgugauccccacgaagaaggccgggggcaccaccgagaugcucgcgaaggcccugcgcaaggugccgaccgacaacuacaucacgaccuaccccgggcagggccugaacggguacaccgucgaggaggccaagaccgugcucaagaagugcaaguccgccuucuacauccugcccagcaucaucuccaacgagaagcaggagauccugggcaccgugagcuggaaccuccgggagaugcuggcgcacgccgaggagacgcgcaagcugaugcccgucugcguggagaccaaggccaucguguccaccauccagcggaaguacaagggcaucaagauccaggagggggucguggacuacggcgcccgcuucuacuucuacaccagcaagacgaccguggccucccugaucaacacccucaacgaccugaacgagacccuggucacgaugccgcucggguacgugacccacggccugaaccuggaggaggcggcccgguacaugcgcagccucaaggugcccgccaccgucuccgugagcucccccgacgccgugaccgccuacaacggguaccugacgagcuccagcaagacccccgaggagcacuucaucgagaccaucucccuggcgggcagcuacaaggacuggagcuacuccggccagagcacccagcucgggaucgaguuccugaagcggggcgacaaguccgucuacuacacgagcaacccgaccaccuuccaccuggacggggaggugaucaccuucgacaaccucaagacgcugcugucccuccgcgaggugcggaccaucaaggucuucaccaccguggacaacaucaaccugcacacgcagguggucgacaugagcaugaccuacggccagcaguucggccccaccuaccuggacggggccgacgugaccaagaucaagccccacaacucccacgagggcaagacguucuacgugcucccgaacgacgacacccugcgcgucgaggccuucgaguacuaccacaccaccgaccccagcuuccuggggcgguacauguccgcccucaaccacacgaagaaguggaaguacccccaggugaacggccugaccagcaucaagugggccgacaacaacugcuaccuggcgaccgcccuccugacccugcagcagaucgagcucaaguucaaccccccggcccugcaggacgccuacuaccgcgcgcgggccggggaggccgccaacuucugcgcccugauccucgcguacugcaacaagacggugggcgagcugggcgacguccgcgagaccauguccuaccuguuccagcacgccaaccucgacagcugcaagcgggugcugaacgucgugugcaagaccugcgggcagcagcagaccacccugaagggcguggaggccgucauguacauggggacgcucuccuacgagcaguucaagaagggcgugcagauccccugcaccugcgggaagcaggccaccaaguaccuggugcagcaggagagccccuucgucaugauguccgcccccccggcgcaguacgagcugaagcacggcaccuucacgugcgccagcgaguacaccggcaacuaccagugcgggcacuacaagcacaucaccuccaaggagacccucuacugcaucgacggcgcccugcugacgaagagcagcgaguacaaggggcccaucaccgacguguucuacaaggagaacuccuacaccaccacgaucaagcccgugaccuacaagcucgacggcgucgugugcaccgagaucgaccccaagcuggacaacuacuacaagaaggacaacagcuacuucaccgagcagccgaucgaccuggugcccaaccagcccuaccccaacgccuccuucgacaacuucaaguucgucugcgacaacaucaaguucgccgacgaccucaaccagcugacgggguacaagaagccggcgagccgcgagcugaaggugaccuucuuccccgaccucaacggcgacguggucgccaucgacuacaagcacuacacccccuccuucaagaagggcgccaagcugcugcacaagcccaucguguggcacgugaacaacgccaccaacaaggcgacguacaagccgaacaccuggugcauccggugccucuggagcaccaagcccgucgagaccuccaacagcuucgacgugcugaaguccgaggacgcccaggggauggacaaccuggccugcgaggaccucaagcccgugagcgaggaggucguggagaaccccacgauccagaaggacgugcuggagugcaacgucaagaccaccgagguggugggcgacaucauccugaagccggccaacaacucccucaagaucaccgaggaggucgggcacacggaccugauggccgcguacguggacaacagcucccugaccaucaagaagcccaacgagcucagccgcgugcugggccugaagacccucgccacccacgggcuggccgccgucaacuccgugcccugggacacgaucgccaacuacgcgaagccguuccugaacaagguggucagcaccaccaccaacaucgugacgcgcugccucaaccgggugugcaccaacuacaugcccuacuucuucacccugcugcuccagcugugcaccuucacccgcuccacgaacagccggaucaaggccuccaugcccaccaccaucgccaagaacaccgucaagagcgugggcaaguucugccuggaggccagcuucaacuaccucaagucccccaacuucagcaagcugaucaacaucaucaucugguuccugcuccuguccgugugccugggcagccucaucuacuccacggccgcgcuggggguccugaugagcaaccucggcaugccguccuacugcaccggguaccgcgagggcuaccugaacagcaccaacgugaccaucgccacguacugcaccggcuccauccccugcagcgugugccuguccgggcucgacagccuggacaccuaccccucccuggagaccauccagaucacgaucagcuccuucaagugggaccucaccgccuucggccuggucgccgagugguuccuggccuacauccucuucacccgguucuucuacgugcuggggcuggcggccaucaugcagcucuucuucagcuacuucgccguguacuucaucuccaacagcuggcugauguggcugaucaucaaccugguccagauggcccccaucuccgcgauggugcgcauguacaucuucuucgccagcuucuacuacguguggaagagcuacguccacgugguggacggcugcaacuccagcaccugcaugaugugcuacaagcggaaccgcgccacgcgggucgagugcaccaccaucgugaacgggguccgccgguccuucuacguguacgccaacggcggcaagggguucugcaagcuccacaacuggaacugcgugaacugcgacaccuucugcgccggcagcacguucaucuccgacgaggucgcgcgcgaccugagccugcaguucaagcggccgaucaaccccaccgaccaguccagcuacaucguggacuccgugaccgucaagaacgggagcauccaccucuacuucgacaaggccggccagaagaccuacgagcgccacucccugagccacuucgugaaccuggacaaccuccgggccaacaacacgaaggggucccugcccaucaacgugaucgucuucgacggcaagagcaagugcgaggaguccagcgccaaguccgccagcguguacuacucccagcugaugugccagcccauccuccugcuggaccaggcgcucgugagcgacgucggcgacagcgccgagguggccgugaagauguucgacgccuacgucaacaccuucuccagcaccuucaacgugccgauggagaagcugaagacccugguggccacggcggaggccgagcucgccaagaacgucucccuggacaacgugcugagcaccuucaucuccgccgcgcgccagggguucguggacagcgacgucgagaccaaggacgugguggagugccucaagcugucccaccagagcgacaucgaggucaccggcgacuccugcaacaacuacaugcugacguacaacaagguggagaacaugaccccccgggaccucggggccugcaucgacugcagcgcccgccacaucaacgcccagguggccaagucccacaacaucgcgcugaucuggaacgucaaggacuucaugagccuguccgagcagcuccggaagcagauccgcagcgccgccaagaagaacaaccugcccuucaagcugaccugcgccaccacgcgccagguggugaacgucgugaccaccaagaucgcccucaagggcggguga

SEQ ID NO: 17943 - RNA, 5841 nt, Artificial Sequence
  SARS-CoV-2__MT758240.1__non-structural protein 3 (NSP3) CDS gc
auggcccccaccaaggugaccuucggcgacgacacggucaucgaggugcagggguacaagagcgugaacaucaccuucgagcuggacgagcgcaucgacaagguccucaacgagaagugcuccgccuacaccguggagcugggcaccgaggugaacgaguucgcgugcgucguggccgacgccgugaucaagacgcugcagccggucagcgagcuccugaccccccuggggaucgaccucgacgagugguccauggccaccuacuaccuguucgacgagagcggcgaguucaagcuggccucccacauguacugcagcuucuacccccccgacgaggacgaggaggagggggacugcgaggaggaggaguucgagccguccacccaguacgaguacggcacggaggacgacuaccagggcaagccccucgaguucggggcgaccagcgccgcccugcagcccgaggaggagcaggaggaggacuggcuggacgacgacucccagcagaccgugggccagcaggacgggagcgaggacaaccagaccacgaccauccagaccaucguggagguccagccccagcucgagauggagcugaccccgguggugcagacgaucgaggucaacuccuucagcggcuaccugaagcucaccgacaacguguacaucaagaacgccgacaucguggaggaggcgaagaaggucaagcccaccgugguggucaacgccgccaacguguaccugaagcacgggggcggcguggccggggcccugaacaaggcgaccaacaacgccaugcaggucgaguccgacgacuacaucgccacgaacggcccccucaagguggggggcagcugcguccuguccggccacaaccuggccaagcacugccuccacgugguggggcccaacgucaacaagggcgaggacauccagcugcugaagagcgccuacgagaacuucaaccagcacgaggugcuccuggcgccgcugcucuccgccgggaucuucggcgccgacagcauccacucccugcgggugugcgucgacaccgugcgcaccaacguguaccuggccgucuucgacaagaaccucuacgacaagcuggugagcagcuuccuggagaugaaguccgagaagcagguggagcagaagaucgccgagauccccaaggaggaggucaagcccuucaucaccgagagcaagcccuccguggagcagcggaagcaggacgacaagaagaucaaggcgugcguggaggaggucacgaccacccucgaggagaccaaguuccugacggagaaccugcuccuguacaucgacaucaacgggaaccugcacccggacagcgccacccucguguccgacaucgacaucaccuuccugaagaaggacgcccccuacaucgugggcgacgucgugcaggagggcgugcugaccgccgucgugauccccacgaagaaggccgggggcaccaccgagaugcucgcgaaggcccugcgcaaggugcccaccgacaacuacaucacgaccuacccggggcagggccugaacggguacaccgucgaggaggccaagaccgugcucaagaagugcaagagcgccuucuacauccugcccuccaucaucagcaacgagaagcaggagauccugggcaccguguccuggaaccuccgggagaugcuggcgcacgccgaggagacgcgcaagcugaugcccgucugcguggagaccaaggccaucgugagcaccauccagcggaaguacaagggcaucaagauccaggagggggucguggacuacggcgcccgcuucuacuucuacaccuccaagacgaccguggccagccugaucaacacccucaacgaccugaacgagacccuggucacgaugccccucggguacgugacccacggccugaaccuggaggaggcggcccgguacaugcgcucccucaaggugccggccaccgucagcguguccagccccgacgccgugaccgccuacaacggguaccugacguccagcuccaagacccccgaggagcacuucaucgagaccaucagccuggcgggcagcuacaaggacugguccuacagcggccaguccacccagcucgggaucgaguuccugaagcggggcgacaagaucgucuacuacacgagcaaccccaccaccuuccaccuggacggggaggugaucaccuucgacaaccucaagacgcugcugucccuccgcgaggugcggaccaucaaggucuucaccaccguggacaacaucaaccugcacacgcagguggucgacaugagcaugaccuacggccagcaguucggcccgaccuaccuggacggggccgacgugaccaagaucaagccccacaacucccacgagggcaagacguucuacgugcuccccaacgacgacacccugcgcgucgaggccuucgaguacuaccacaccaccgacccgagcuuccuggggcgguacauguccgcccucaaccacacgaagaaguggaaguacccccaggugaacggccugaccagcaucaagugggccgacaacaacugcuaccuggcgaccgcccuccugacccugcagcagaucgagcucaaguucaacccccccgcccugcaggacgccuacuaccgcgcgcgggccggggaggccgccaacuucugcgcccugauccucgcguacugcaacaagacggugggcgagcugggcgacguccgcgagaccauguccuaccuguuccagcacgccaaccucgacagcugcaagcgggugcugaacgucgugugcaagaccugcgggcagcagcagaccacccugaagggcguggaggccgucauguacauggggacgcucuccuacgagcaguucaagaagggcgugcagaucccgugcaccugcgggaagcaggccaccaaguaccuggugcagcaggagagccccuucgucaugauguccgccccccccgcgcaguacgagcugaagcacggcaccuucacgugcgccagcgaguacaccggcaacuaccagugcgggcacuacaagcacaucaccuccaaggagacccucuacugcaucgacggcgcccugcugacgaagagcagcgaguacaaggggccgaucaccgacguguucuacaaggagaacuccuacaccaccacgaucaagcccgugaccuacaagcucgacggcgucgugugcaccgagaucgaccccaagcuggacaacuacuacaagaaggacaacagcuacuucaccgagcagcccaucgaccuggugccgaaccagcccuaccccaacgccuccuucgacaacuucaaguucgucugcgacaacaucaaguucgccgacgaccucaaccagcugacgggguacaagaagcccgcgagccgcgagcugaaggugaccuucuucccggaccucaacggcgacguggucgccaucgacuacaagcacuacacccccuccuucaagaagggcgccaagcugcugcacaagcccaucguguggcacgugaacaacgccaccaacaaggcgacguacaagcccaacaccuggugcauccggugccucuggagcaccaagccggucgagaccuccaacagcuucgacgugcugaaguccgaggacgcccaggggauggacaaccuggccugcgaggaccucaagcccgugagcgaggaggucguggagaaccccacgauccagaaggacgugcuggagugcaacgucaagaccaccgagguggugggcgacaucauccugaagcccgccaacaacucccucaagaucaccgaggaggucgggcacacggaccugauggccgcguacguggacaacagcucccugaccaucaagaagccgaacgagcucagccgcgugcugggccugaagacccucgccacccacgggcuggccgccgucaacuccgugcccugggacacgaucgccaacuacgcgaagcccuuccugaacaagguggucagcaccaccaccaacaucgugacgcgcugccucaaccgggugugcaccaacuacaugccguacuucuucacccugcugcuccagcugugcaccuucacccgcuccacgaacagccggaucaaggccuccaugcccaccaccaucgccaagaacaccgucaagagcgugggcaaguucugccuggaggccagcuucaacuaccucaagucccccaacuucagcaagcugaucaacaucaucaucugguuccugcuccuguccgugugccugggcagccucaucuacuccacggccgcgcuggggguccugaugagcaaccucggcaugcccuccuacugcaccggguaccgcgagggcuaccugaacagcaccaacgugaccaucgccacguacugcaccggcuccaucccgugcagcgugugccuguccgggcucgacagccuggacaccuaccccucccuggagaccauccagaucacgaucagcuccuucaagugggaccucaccgccuucggccuggucgccgagugguuccuggccuacauccucuucacccgguucuucuacgugcuggggcuggcggccaucaugcagcucuucuucagcuacuucgccgugcacuucaucuccaacagcuggcugauguggcugaucaucaaccugguccagauggcccccaucuccgcgauggugcgcauguacaucuucuucgccagcuucuacuacguguggaagagcuacguccacgugguggacggcugcaacuccagcaccugcaugaugugcuacaagcggaaccgcgccacgcgggucgagugcaccaccaucgugaacgggguccgccgguccuucuacguguacgccaacggcggcaagggguucugcaagcuccacaacuggaacugcgugaacugcgacaccuucugcgccggcagcacguucaucuccgacgaggucgcgcgcgaccugagccugcaguucaagcggcccaucaacccgaccgaccaguccagcuacaucguggacuccgugaccgucaagaacgggagcauccaccucuacuucgacaaggccggccagaagaccuacgagcgccacucccugagccacuucgugaaccuggacaaccuccgggccaacaacacgaaggggucccugcccaucaacgugaucgucuucgacggcaagagcaagugcgaggaguccagcgccaaguccgccagcguguacuacucccagcugaugugccagcccauccuccugcuggaccaggcgcucgugagcgacgucggcgacagcgccgagguggccgugaagauguucgacgucuacgugaacaccuucuccagcaccuucaacgugcccauggagaagcugaagacccuggucgccacggccgaggcggagcucgccaagaacgugucccuggacaacgugcugagcaccuucaucuccgccgcccgccagggguucgucgacagcgacguggagaccaaggacguggucgagugccucaagcugucccaccagagcgacaucgaggugaccggcgacuccugcaacaacuacaugcugacguacaacaagguggagaacaugaccccgcgggaccucggggcgugcaucgacugcagcgcccgccacaucaacgcccaggucgccaagucccacaacaucgcccugaucuggaacgugaaggacuucaugagccuguccgagcagcuccggaagcagauccgcagcgcggccaagaagaacaaccugcccuucaagcugaccugcgccaccacgcgccagguggucaacguggugaccaccaagaucgcccucaagggcggguga

SEQ ID NO: 17944 - RNA, 5841 nt, Artificial Sequence
  SARS-CoV-2__MT758436.1__non-structural protein 3 (NSP3) CDS gc
auggcccccaccaaggugaccuucggcgacgacacggucaucgaggugcagggguacaagagcgugaacaucaccuucgagcuggacgagcgcaucgacaagguccucaacgagaagugcuccgccuacaccguggagcugggcaccgaggugaacgaguucgcgugcgucguggccgacgccgugaucaagacgcugcagccggucagcgagcuccugaccccccuggggaucgaccucgacgagugguccauggccaccuacuaccuguucgacgagagcggcgaguucaagcuggccucccacauguacugcagcuucuacccccccgacgaggacgaggaggagggggacugcgaggaggaggaguucgagccguccacccaguacgaguacggcacggaggacgacuaccagggcaagccccucgaguucggggcgaccagcgccgcccugcagcccgaggaggagcaggaggaggacuggcuggacgacgacucccagcagaccgugggccagcaggacgggagcgaggacaaccagaccacgaccauccagaccaucguggagguccagccccagcucgagauggagcugaccccgguggugcagacgaucgaggucaacuccuucagcggcuaccugaagcucaccgacaacguguacaucaagaacgccgacaucguggaggaggcgaagaaggucaagcccaccgugguggucaacgccgccaacguguaccugaagcacgggggcggcguggccggggcccugaacaaggcgaccaacaacgccaugcaggucgaguccgacgacuacaucgccacgaacggcccccucaagguggggggcagcugcguccuguccggccacaaccuggccaagcacugccuccacgugguggggcccaacgucaacaagggcgaggacauccagcugcugaagagcgccuacgagaacuucaaccagcacgaggugcuccuggcgccgcugcucuccgccgggaucuucggcgccgaccccauccacagccugcgggugugcgucgacaccgugcgcaccaacguguaccuggccgucuucgacaagaaccucuacgacaagcugguguccagcuuccuggagaugaagagcgagaagcagguggagcagaagaucgccgagauccccaaggaggaggucaagcccuucaucaccgaguccaagccgagcguggagcagcggaagcaggacgacaagaagaucaaggcgugcguggaggaggucacgaccacccucgaggagaccaaguuccugacggagaaccugcuccuguacaucgacaucaacgggaaccugcaccccgacuccgccacccucgugagcgacaucgacaucaccuuccugaagaaggacgcccccuacaucgugggcgacgucgugcaggagggcgugcugaccgccgucgugauccccacgaagaaggccgggggcaccaccgagaugcucgcgaaggcccugcgcaaggugccgaccgacaacuacaucacgaccuaccccgggcagggccugaacggguacaccgucgaggaggccaagaccgugcucaagaagugcaaguccgccuucuacauccugcccagcaucaucuccaacgagaagcaggagauccugggcaccgugagcuggaaccuccgggagaugcuggcgcacgccgaggagacgcgcaagcugaugcccgucugcguggagaccaaggccaucguguccaccauccagcggaaguacaagggcaucaagauccaggagggggucguggacuacggcgcccgcuucuacuucuacaccagcaagacgaccguggccucccugaucaacacccucaacgaccugaacgagacccuggucacgaugccgcucggguacgugacccacggccugaaccuggaggaggcggcccgguacaugcgcagccucaaggugcccgccaccgucuccgugagcucccccgacgccgugaccgccuacaacggguaccugacgagcuccagcaagacccccgaggagcacuucaucgagaccaucucccuggcgggcagcuacaaggacuggagcuacuccggccagagcacccagcucgggaucgaguuccugaagcggggcgacaaguccgucuacuacacgagcaacccgaccaccuuccaccuggacggggaggugaucaccuucgacaaccucaagacgcugcugucccuccgcgaggugcggaccaucaaggucuucaccgccguggacaacaucaaccugcacacccagguggucgacaugagcaugacguacggccagcaguucggccccaccuaccuggacggggccgacgugaccaagaucaagccccacaacucccacgagggcaagaccuucuacgugcucccgaacgacgacacgcugcgcgucgaggccuucgaguacuaccacaccaccgaccccagcuuccuggggcgguacauguccgcccucaaccacaccaagaaguggaaguacccccaggugaacggccugacgagcaucaagugggcggacaacaacugcuaccuggccaccgcccuccugacccugcagcagaucgagcucaaguucaaccccccggcccugcaggacgcguacuaccgcgcccgggccggggaggccgccaacuucugcgcgcugauccucgccuacugcaacaagaccgugggcgagcugggcgacguccgcgagacgauguccuaccuguuccagcacgccaaccucgacagcugcaagcgggugcugaacgucgugugcaagaccugcgggcagcagcagaccacccugaagggcguggaggccgucauguacauggggacccucuccuacgagcaguucaagaagggcgugcagauccccugcacgugcgggaagcaggccaccaaguaccuggugcagcaggagagccccuucgucaugauguccgcgcccccggcccaguacgagcugaagcacggcaccuucaccugcgccagcgaguacacgggcaacuaccagugcgggcacuacaagcacaucaccuccaaggagacccucuacugcaucgacggcgcccugcugaccaagagcagcgaguacaaggggcccaucacggacguguucuacaaggagaacuccuacaccaccaccaucaagcccgugacguacaagcucgacggcgucgugugcaccgagaucgaccccaagcuggacaacuacuacaagaaggacaacagcuacuucaccgagcagccgaucgaccuggugcccaaccagcccuaccccaacgccuccuucgacaacuucaaguucgucugcgacaacaucaaguucgcggacgaccucaaccagcugaccggguacaagaagccggccagccgcgagcugaaggugacguucuuccccgaccucaacggcgacguggucgccaucgacuacaagcacuacacccccuccuucaagaagggcgccaagcugcugcacaagcccaucguguggcacgugaacaacgcgaccaacaaggccaccuacaagccgaacacguggugcauccggugccucuggagcaccaagcccgucgagaccuccaacagcuucgacgugcugaaguccgaggacgcccaggggauggacaaccuggccugcgaggaccucaagcccgugagcgaggaggucguggagaaccccaccauccagaaggacgugcuggagugcaacgucaagacgaccgagguggugggcgacaucauccugaagccggccaacaacucccucaagaucaccgaggaggucgggcacaccgaccugauggcggccuacguggacaacagcucccugacgaucaagaagcccaacgagcucagccgcgugcugggccugaagacccucgccacccacgggcuggccgccgucaacuccgugcccugggacaccaucgcgaacuacgccaagccguuccugaacaagguggucagcacgaccaccaacaucgugacccgcugccucaaccgggugugcacgaacuacaugcccuacuucuucacccugcugcuccagcugugcaccuucacccgcuccaccaacagccggaucaaggccuccaugcccacgaccaucgccaagaacaccgucaagagcgugggcaaguucugccuggaggccagcuucaacuaccucaagucccccaacuucagcaagcugaucaacaucaucaucugguuccugcuccuguccgugugccugggcagccucaucuacuccaccgcggcccuggggguccugaugagcaaccucggcaugccguccuacugcacgggguaccgcgagggcuaccugaacagcaccaacgugaccaucgccaccuacugcacgggcuccauccccugcagcgugugccuguccgggcucgacagccuggacaccuaccccucccuggagaccauccagaucaccaucagcuccuucaagugggaccucacggccuucggccuggucgccgagugguuccuggcguacauccucuucacccgguucuucuacgugcuggggcuggccgccaucaugcagcucuucuucagcuacuucgccgugcacuucaucuccaacagcuggcugauguggcugaucaucaaccugguccagauggcgcccaucuccgccauggugcgcauguacaucuucuucgccagcuucuacuacguguggaagagcuacguccacgugguggacggcugcaacuccagcaccugcaugaugugcuacaagcggaaccgcgccacccgggucgagugcacgaccaucgugaacgggguccgccgguccuucuacguguacgccaacggcggcaagggguucugcaagcuccacaacuggaacugcgugaacugcgacaccuucugcgcgggcagcaccuucaucuccgacgaggucgcccgcgaccugagccugcaguucaagcggccgaucaaccccacggaccaguccagcuacaucguggacuccgugaccgucaagaacgggagcauccaccucuacuucgacaaggccggccagaagaccuacgagcgccacucccugagccacuucgugaaccuggacaaccuccgggccaacaacaccaaggggucccugcccaucaacgugaucgucuucgacggcaagagcaagugcgaggaguccagcgccaaguccgcgagcguguacuacucccagcugaugugccagcccauccuccugcuggaccaggcccucgugagcgacgucggcgacagcgccgagguggccgugaagauguucgacgccuacgucaacacguucuccagcaccuucaacgugccgauggagaagcugaagacccugguggcgaccgccgaggccgagcucgccaagaacgucucccuggacaacgugcugagcacguucaucuccgcggcccgccagggguucguggacagcgacgucgagaccaaggacgugguggagugccucaagcugucccaccagagcgacaucgaggucaccggcgacuccugcaacaacuacaugcugaccuacaacaagguggagaacaugacgccccgggaccucggggccugcaucgacugcagcgcccgccacaucaacgcccagguggcgaagucccacaacaucgcccugaucuggaacgucaaggacuucaugagccuguccgagcagcuccggaagcagauccgcagcgccgccaagaagaacaaccugcccuucaagcugaccugcgccaccacccgccagguggugaacgucgugacgaccaagaucgcgcucaagggcggguga

SEQ ID NO: 17945 - RNA, 5841 nt, Artificial Sequence
  SARS-CoV-2__MT758439.1__non-structural protein 3 (NSP3) CDS gc
auggcccccaccaaggugaccuucggcgacgacacggucaucgaggugcagggguacaagagcgugaacaucaccuucgagcuggacgagcgcaucgacaagguccucaacgagaagugcuccgccuacaccguggagcugggcaccgaggugaacgaguucgcgugcgucguggccgacgccgugaucaagacgcugcagccggucagcgagcuccugaccccccuggggaucgaccucgacgagugguccauggccaccuacuaccuguucgacgagagcggcgaguucaagcuggccucccacauguacugcagcuucuacccccccgacgaggacgaggaggagggggacugcgaggaggaggacuucgagccguccacccaguacgaguacggcacggaggacgacuaccagggcaagccccucgaguucggggcgaccagcgccgcccugcagcccgaggaggagcaggaggaggacuggcuggacgacgacucccagcagaccgugggccagcaggacgggagcgaggacaaccagaccacgaccauccagaccaucguggagguccagccccagcucgagauggagcugaccccgguggugcagacgaucgaggucaacuccuucagcggcuaccugaagcucaccgacaacguguacaucaagaacgccgacaucguggaggaggcgaagaaggucaagcccaccgugguggucaacgccgccaacguguaccugaagcacgggggcggcguggccggggcccugaacaaggcgaccaacaacgccaugcaggucgaguccgacgacuacaucgccacgaacggcccccucaagguggggggcagcugcguccuguccggccacaaccuggccaagcacugccuccacgugguggggcccaacgucaacaagggcgaggacauccagcugcugaagagcgccuacgagaacuucaaccagcacgaggugcuccuggcgccgcugcucuccgccgggaucuucggcgccgaccccauccacagccugcgggugugcgucgacaccgugcgcaccaacguguaccuggccgucuucgacaagaaccucuacgacaagcugguguccagcuuccuggagaugaagagcgagaagcagguggagcagaagaucgccgagauccccaaggaggaggucaagcccuucaucaccgaguccaagccgagcguggagcagcggaagcaggacgacaagaagaucaaggcgugcguggaggaggucacgaccacccucgaggagaccaaguuccugacggagaaccugcuccuguacaucgacaucaacgggaaccugcaccccgacuccgccacccucgugagcgacaucgacaucaccuuccugaagaaggacgcccccuacaucgugggcgacgucgugcaggagggcgugcugaccgccgucgugauccccacgaagaaggccgggggcaccaccgagaugcucgcgaaggcccugcgcaaggugccgaccgacaacuacaucacgaccuaccccgggcagggccugaacggguacaccgucgaggaggccaagaccgugcucaagaagugcaaguccgccuucuacauccugcccagcaucaucuccaacgagaagcaggagauccugggcaccgugagcuggaaccuccgggagaugcuggcgcacgccgaggagacgcgcaagcugaugcccgucugcguggagaccaaggccaucguguccaccauccagcggaaguacaagggcaucaagauccaggagggggucguggacuacggcgcccgcuucuacuucuacaccagcaagacgaccguggccucccugaucaacacccucaacgaccugaacgagacccuggucacgaugccgcucggguacgugacccacggccugaaccuggaggaggcggcccgguacaugcgcagccucaaggugcccgccaccgucuccgugagcucccccgacgccgugaccgccuacaacggguaccugacgagcuccagcaagacccccgaggagcacuucaucgagaccaucucccuggcgggcagcuacaaggacuggagcuacuccggccagagcacccagcucgggaucgaguuccugaagcggggcgacaaguccgucuacuacacgagcaacccgaccaccuuccaccuggacggggaggugaucaccuucgacaaccucaagacgcugcugucccuccgcgaggugcggaccaucaaggucuucaccaccguggacaacaucaaccugcacacgcagguggucgacaugagcaugaccuacggccagcaguucggccccaccuaccuggacggggccgacgugaccaagaucaagccccacaacucccacgagggcaagacguucuacgugcucccgaacgacgacacccugcgcgucgaggccuucgaguacuaccacaccaccgaccccagcuuccuggggcgguacauguccgcccucaaccacacgaagaaguggaaguacccccaggugaacggccugaccagcaucaagugggccgacaacaacugcuaccuggcgaccgcccuccugacccugcagcagaucgagcucaaguucaaccccccggcccugcaggacgccuacuaccgcgcgcgggccggggaggccgccaacuucugcgcccugauccucgcguacugcaacaagacggugggcgagcugggcgacguccgcgagaccauguccuaccuguuccagcacgccaaccucgacagcugcaagcgggugcugaacgucgugugcaagaccugcgggcagcagcagaccacccugaagggcguggaggccgucauguacauggggacgcucuccuacgagcaguucaagaagggcgugcagauccccugcaccugcgggaagcaggccaccaaguaccuggugcagcaggagagccccuucgucaugauguccgcccccccggcgcaguacgagcugaagcacggcaccuucacgugcgccagcgaguacaccggcaacuaccagugcgggcacuacaagcacaucaccuccaaggagacccucuacugcaucgacggcgcccugcugacgaagagcagcgaguacaaggggcccaucaccgacguguucuacaaggagaacuccuacaccaccacgaucaagcccgugaccuacaagcucgacggcgucgugugcaccgagaucgaccccaagcuggacaacuacuacaagaaggacaacagcuacuucaccgagcagccgaucgaccuggugcccaaccagcccuaccccaacgccuccuucgacaacuucaaguucgucugcgacaacaucaaguucgccgacgaccucaaccagcugacgggguacaagaagccggcgagccgcgagcugaaggugaccuucuuccccgaccucaacggcgacguggucgccaucgacuacaagcacuacacccccuccuucaagaagggcgccaagcugcugcacaagcccaucguguggcacgugaacaacgccaccaacaaggcgacguacaagccgaacaccuggugcauccggugccucuggagcaccaagcccgucgagaccuccaacagcuucgacgugcugaaguccgaggacgcccaggggauggacaaccuggccugcgaggaccucaagcccgugagcgaggaggucguggagaaccccacgauccagaaggacgugcuggagugcaacgucaagaccaccgagguggugggcgacaucauccugaagccggccaacaacucccucaagaucaccgaggaggucgggcacacggaccugauggccgcguacguggacaacagcucccugaccaucaagaagcccaacgagcucagccgcgugcugggccugaagacccucgccacccacgggcuggccgccgucaacuccgugcccugggacacgaucgccaacuacgcgaagccguuccugaacaagguggucagcaccaccaccaacaucgugacgcgcugccucaaccgggugugcaccaacuacaugcccuacuucuucacccugcugcuccagcugugcaccuucacccgcuccacgaacagccggaucaaggccuccaugcccaccaccaucgccaagaacaccgucaagagcgugggcaaguucugccuggaggccagcuucaacuaccucaagucccccaacuucagcaagcugaucaacaucaucaucugguuccugcuccuguccgugugccugggcagccucaucuacuccacggccgcgcuggggguccugaugagcaaccucggcaugccguccuacugcaccggguaccgcgagggcuaccugaacagcaccaacgugaccaucgccacguacugcaccggcuccauccccugcagcgugugccuguccgggcucgacagccuggacaccuaccccucccuggagaccauccagaucacgaucagcuccuucaagugggaccucaccgccuucggccuggucgccgagugguuccuggccuacauccucuucacccgguucuucuacgugcuggggcuggcggccaucaugcagcucuucuucagcuacuucgccgugcacuucaucuccaacagcuggcugauguggcugaucaucaaccugguccagauggcccccaucuccgcgauggugcgcauguacaucuucuucgccagcuucuacuacguguggaagagcuacguccacgugguggacggcugcaacuccagcaccugcaugaugugcuacaagcggaaccgcgccacgcgggucgagugcaccaccaucgugaacgggguccgccgguccuucuacguguacgccaacggcggcaagggguucugcaagcuccacaacuggaacugcgugaacugcgacaccuucugcgccggcagcacguucaucuccgacgaggucgcgcgcgaccugagccugcaguucaagcggccgaucaaccccaccgaccaguccagcuacaucguggacuccgugaccgucaagaacgggagcauccaccucuacuucgacaaggccggccagaagaccuacgagcgccacucccugagccacuucgugaaccuggacaaccuccgggccaacaacacgaaggggucccugcccaucaacgugaucgucuucgacggcaagagcaagugcgaggaguccagcgccaaguccgccagcguguacuacucccagcugaugugccagcccauccuccugcuggaccaggcgcucgugagcgacgucggcgacagcgccgagguggccgugaagauguucgacgccuacgucaacaccuucuccagcaccuucaacgugccgauggagaagcugaagacccugguggccacggcggaggccgagcucgccaagaacgucucccuggacaacgugcugagcaccuucaucuccgccgcgcgccagggguucguggacagcgacgucgagaccaaggacgugguggagugccucaagcugucccaccagagcgacaucgaggucaccggcgacuccugcaacaacuacaugcugacguacaacaagguggagaacaugaccccccgggaccucggggccugcaucgacugcagcgcccgccacaucaacgcccagguggccaagucccacaacaucgcgcugaucuggaacgucaaggacuucaugagccuguccgagcagcuccggaagcagauccgcagcgccgccaagaagaacaaccugcccuucaagcugaccugcgccaccacgcgccagguggugaacgucgugaccaccaagaucgcccucaagggcggguga

SEQ ID NO: 17946 - RNA, 5841 nt, Artificial Sequence
  SARS-CoV-2__MT762396.1__non-structural protein 3 (NSP3) CDS gc
auggcccccaccaaggugaccuucggcgacgacacggucaucgaggugcagggguacaagagcgugaacaucaccuucgagcuggacgagcgcaucgacaagguccucaacgagaagugcuccgccuacaccguggagcugggcaccgaggugaacgaguucgcgugcgucguggccgacgccgugaucaagauccugcagccggucagcgagcuccugacgccccuggggaucgaccucgacgagugguccauggccaccuacuaccuguucgacgagagcggcgaguucaagcuggccucccacauguacugcagcuucuacccccccgacgaggacgaggaggagggggacugcgaggaggaggaguucgagccguccacccaguacgaguacggcaccgaggacgacuaccagggcaagccccucgaguucggggcgacgagcgccgcccugcagcccgaggaggagcaggaggaggacuggcuggacgacgacucccagcagaccgugggccagcaggacgggagcgaggacaaccagaccaccacgauccagaccaucguggagguccagccccagcucgagauggagcugaccccgguggugcagaccaucgaggucaacuccuucagcggcuaccugaagcucacggacaacguguacaucaagaacgccgacaucguggaggaggcgaagaaggucaagcccaccgugguggucaacgccgccaacguguaccugaagcacgggggcggcguggccggggcccugaacaaggcgaccaacaacgccaugcaggucgaguccgacgacuacaucgccaccaacggcccccucaagguggggggcagcugcguccuguccggccacaaccuggccaagcacugccuccacgugguggggcccaacgucaacaagggcgaggacauccagcugcugaagagcgccuacgagaacuucaaccagcacgaggugcuccuggcgccgcugcucuccgccgggaucuucggcgccgaccccauccacagccugcgggugugcgucgacacggugcgcaccaacguguaccuggccgucuucgacaagaaccucuacgacaagcugguguccagcuuccuggagaugaagagcgagaagcagguggagcagaagaucgccgagauccccaaggaggaggucaagcccuucaucaccgaguccaagccgagcguggagcagcggaagcaggacgacaagaagaucaaggcgugcguggaggaggucaccacgacccucgaggagaccaaguuccugaccgagaaccugcuccuguacaucgacaucaacgggaaccugcaccccgacuccgccacgcucgugagcgacaucgacaucaccuuccugaagaaggacgcccccuacaucgugggcgacgucgugcaggagggcgugcugaccgccgucgugauccccaccaagaaggccgggggcacgaccgagaugcucgcgaaggcccugcgcaaggugccgaccgacaacuacaucaccacguaccccgggcagggccugaacggguacaccgucgaggaggccaagaccgugcucaagaagugcaaguccgccuucuacauccugcccagcaucaucuccaacgagaagcaggagauccugggcaccgugagcuggaaccuccgggagaugcuggcgcacgccgaggagacccgcaagcugaugcccgucugcguggagacgaaggccaucguguccaccauccagcggaaguacaagggcaucaagauccaggagggggucguggacuacggcgcccgcuucuacuucuacaccagcaagaccacgguggccucccugaucaacacccucaacgaccugaacgagacccuggucaccaugccgcucggguacgugacgcacggccugaaccuggaggaggcggcccgguacaugcgcagccucaaggugcccgccaccgucuccgugagcucccccgacgccgugaccgccuacaacggguaccugaccagcuccagcaagacgcccgaggagcacuucaucgagaccaucucccuggcgggcagcuacaaggacuggagcuacuccggccagagcacccagcucgggaucgaguuccugaagcggggcgacaaguccgucuacuacaccagcaacccgacgaccuuccaccuggacggggaggugaucaccuucgacaaccucaagacccugcugucccuccgcgaggugcggacgaucaaggucuucaccaccguggacaacaucaaccugcacacccagguggucgacaugagcaugacguacggccagcaguucggccccaccuaccuggacggggccgacgugaccaagaucaagccccacaacucccacgagggcaagaccuucuacgugcucccgaacgacgacacgcugcgcgucgaggccuucgaguacuaccacaccaccgaccccagcuuccuggggcgguacauguccgcccucaaccacaccaagaaguggaaguacccccaggugaacggccugacgagcaucaagugggccgacaacaacugcuaccuggcgaccgcccuccugacccugcagcagaucgagcucaaguucaaccccccggcccugcaggacgccuacuaccgcgcgcgggccggggaggccgccaacuucugcgcccugauccucgcguacugcaacaagaccgugggcgagcugggcgacguccgcgagacgauguccuaccuguuccagcacgccaaccucgacagcugcaagcgggugcugaacgucgugugcaagaccugcgggcagcagcagaccacccugaagggcguggaggccgucauguacauggggacccucuccuacgagcaguucaagaagggcgugcagauccccugcacgugcgggaagcaggccaccaaguaccuggugcagcaggagagccccuucgucaugauguccgcccccccggcgcaguacgagcugaagcacggcaccuucaccugcgccagcgaguacacgggcaacuaccagugcgggcacuacaagcacaucaccuccaaggagacccucuacugcaucgacggcgcccugcugaccaagagcagcgaguacaaggggcccaucacggacguguucuacaaggagaacuccuacaccaccaccaucaagcccgugacguacaagcucgacggcgucgugugcaccgagaucgaccccaagcuggacaacuacuacaagaaggacaacagcuacuucaccgagcagccgaucgaccuggugcccaaccagcccuaccccaacgccuccuucgacaacuucaaguucgucugcgacaacaucaaguucgccgacgaccucaaccagcugaccggguacaagaagccggcgagccgcgagcugaaggugacguucuuccccgaccucaacggcgacguggucgccaucgacuacaagcacuacacccccuccuucaagaagggcgccaagcugcugcacaagcccaucguguggcacgugaacaacgccaccaacaaggcgaccuacaagccgaacacguggugcauccggugccucuggagcaccaagcccgucgagaccuccaacagcuucgacgugcugaaguccgaggacgcccaggggauggacaaccuggccugcgaggaccucaagcccgugagcgaggaggucguggagaaccccaccauccagaaggacgugcuggagugcaacgucaagacgaccgagguggugggcgacaucauccugaagccggccaacaacucccucaagaucaccgaggaggucgggcacaccgaccugauggccgcguacguggacaacagcucccugacgaucaagaagcccaacgagcucagccgcgugcugggccugaagacccucgccacccacgggcuggccgccgucaacuccgugcccugggacaccaucgccaacuacgcgaagccguuccugaacaagguggucagcacgaccaccaacaucgugacccgcugccucaaccgggugugcacgaacuacaugcccuacuucuucacccugcugcuccagcugugcaccuucacccgcuccaccaacagccggaucaaggccuccaugcccacgaccaucgccaagaacaccgucaagagcgugggcaaguucugccuggaggccagcuucaacuaccucaagucccccaacuucagcaagcugaucaacaucaucaucugguuccugcuccuguccgugugccugggcagccucaucuacuccaccgccgcgcuggggguccugaugagcaaccucggcaugccguccuacugcacgggguaccgcgagggcuaccugaacagcaccaacgugaccaucgccaccuacugcacgggcuccauccccugcagcgugugccuguccgggcucgacagccuggacaccuaccccucccuggagaccauccagaucaccaucagcuccuucaagugggaccucacggccuucggccuggucgccgagugguuccuggccuacauccucuucacccgguucuucuacgugcuggggcuggcggccaucaugcagcucuucuucagcuacuucgccgugcacuucaucuccaacagcuggcugauguggcugaucaucaaccugguccagauggcccccaucuccgcgauggugcgcauguacaucuucuucgccagcuucuacuacguguggaagagcuacguccacgugguggacggcugcaacuccagcaccugcaugaugugcuacaagcggaaccgcgccacccgggucgagugcacgaccaucgugaacgggguccgccgguccuucuacguguacgccaacggcggcaagggguucugcaagcuccacaacuggaacugcgugaacugcgacaccuucugcgccggcagcaccuucaucuccgacgaggucgcgcgcgaccugagccugcaguucaagcggccgaucaaccccacggaccaguccagcuacaucguggacuccgugaccgucaagaacgggagcauccaccucuacuucgacaaggccggccagaagaccuacgagcgccacucccugagccacuucgugaaccuggacaaccuccgggccaacaacaccaaggggucccugcccaucaacgugaucgucuucgacggcaagagcaagugcgaggaguccagcgccaaguccgccagcguguacuacucccagcugaugugccagcccauccuccugcuggaccaggcgcucgugagcgacgucggcgacagcgccgagguggccgugaagauguucgacgccuacgucaacacguucuccagcaccuucaacgugccgauggagaagcugaagacccugguggccaccgcggaggccgagcucgccaagaacgucucccuggacaacgugcugagcacguucaucuccgccgcgcgccagggguucguggacagcgacgucgagaccaaggacgugguggagugccucaagcugucccaccagagcgacaucgaggucaccggcgacuccugcaacaacuacaugcugaccuacaacaagguggagaacaugacgccccgggaccucggggccugcaucgacugcagcgcccgccacaucaacgcccagguggccaagucccacaacaucgcgcugaucuggaacgucaaggacuucaugagccuguccgagcagcuccggaagcagauccgcagcgccgccaagaagaacaaccugcccuucaagcugaccugcgccaccacccgccagguggugaacgucgugacgaccaagaucgcccucaagggcggguga

SEQ ID NO: 17947 - RNA, 5841 nt, Artificial Sequence
  SARS-CoV-2__MT762397.1__non-structural protein 3 (NSP3) CDS gc
auggcccccaccaaggugaccuucggcgacgacacggucaucgaggugcagggguacaagagcgugaacaucaccuucgagcuggacgagcgcaucgacaagguccucaacgagaagugcuccgccuacaccguggagcugggcaccgaggugaacgaguucgcgugcgucguggccgacgccgugaucaagacgcugcagccggucagcgagcuccugaccccccuggggaucgaccucgacgagugguccauggccaccuacuaccuguucgacgagagcggcgaguucaagcuggccucccacauguacugcagcuucuacccccccgacgaggacgaggaggagggggacugcgaggaggaggaguucgagccguccacccaguacgaguacggcacggaggacgacuaccagggcaagccccucgaguucggggcgaccagcgccgcccugcagcccgaggaggagcaggaggaggacuggcuggacgacgacucccagcagaccgugggccagcaggacgggagcgaggacaaccagaccacgaccauccagaccaucguggagguccagccccagcucgagauggagcugaccccgguggugcagacgaucgaggucaacuccuucagcggcuaccugaagcucaccgacaacguguacaucaagaacgccgacaucguggaggaggcgaagaaggucaagcccaccgugguggucaacgccgccaacguguaccugaagcacgggggcggcguggccggggcccugaacaaggcgaccaacaacgccaugcaggucgaguccgacgacuacaucgccacgaacggcccccucaagguggggggcagcugcguccuguccggccacaaccuggccaagcacugccuccacgugguggggcccaacgucaacaagggcgaggacauccagcugcugaagagcgccuacgagaacuucaaccagcacgaggugcuccuggcgccgcugcucuccgccgggaucuucggcgccgaccccauccacagccugcgggugugcgucgacaccgugcgcaccaacguguaccuggccgucuucgacaagaaccucuacgacaagcugguguccagcuuccuggagaugaagagcgagaagcagguggagcagaagaucgccgagauccccaaggaggaggucaagcccuucaucaccgaguccaagccgagcguggagcagcggaagcaggacgacaagaagaucaaggcgugcguggaggaggucacgaccacccucgaggagaccaaguuccugacggagaaccugcuccuguacaucgacaucaacgggaaccugcaccccgacuccgccacccucgugagcgacaucgacaucaccuuccugaagaaggacgcccccuacaucgugggcgacgucgugcaggagggcgugcugaccgccgucgugauccccacgaagaaggccgggggcaccaccgagaugcucgcgaaggcccugcgcaaggugccgaccgacaacuacaucacgaccuaccccgggcagggccugaacggguacaccgucgaggaggccaagaccgugcucaagaagugcaaguccgccuucuacauccugcccagcaucaucuccaacgagaagcaggagauccugggcaccgugagcuggaaccuccgggagaugcuggcgcacgccgaggagacgcgcaagcugaugcccgucugcguggagaccaaggccaucguguccaccauccagcggaaguacaagggcaucaagauccaggagggggucguggacuacggcgcccgcuucuacuucuacaccagcaagacgaccguggccucccugaucaacacccucaacgaccugaacgagacccuggucacgaugccgcucggguacgugacccacggccugaaccuggaggaggcggcccgguacaugcgcagccucaaggugcccgccaccgucuccgugagcucccccgacgccgugaccgccuacaacggguaccugacgagcuccagcaagacccccgaggagcacuucaucgagaccaucucccuggcgggcagcuacaaggacuggagcuacuccggccagagcacccagcucgggaucgaguuccugaagcggggcgacaaguccgucuacuacacgagcaacccgaccaccuuccaccuggacggggaggugaucaccuucgacaaccucaagacgcugcugucccuccgcgaggugcggaccaucaaggucuucaccaccguggacaacaucaaccugcacacgcagguggucgacaugagcaugaccuacggccagcaguucggccccaccuaccuggacggggccgacgugaccaagaucaagccccacaacucccacgagggcaagacguucuacgugcucccgaacgacgacacccugcgcgucgaggccuucgaguacuaccacaccaccgaccccagcuuccuggggcgguacauguccgcccucaaccacacgaagaaguggaaguacccccaggugaacggccugaccagcaucaagugggccgacaacaacugcuaccuggcgaccgcccuccugacccugcagcagaucgagcucaaguucaaccccccggcccugcaggacgccuacuaccgcgcgcgggccggggaggccgccaacuucugcgcccugauccucgcguacugcaacaagacggugggcgagcugggcgacguccgcgagaccauguccuaccuguuccagcacgccaaccucgacagcugcaagcgggugcugaacgucgugugcaagaccugcgggcagcagcagaccacccugaagggcguggaggccgucauguacauggggacgcucuccuacgagcaguucaagaagggcgugcagauccccugcaccugcgggaagcaggccaccaaguaccuggugcagcaggagagccccuucgucaugauguccgcccccccggcgcaguacgagcugaagcacggcaccuucacgugcgccagcgaguacaccggcaacuaccagugcgggcacuacaagcacaucaccuccaaggagacccucuacugcaucgacggcgcccugcugacgaagagcagcgaguacaaggggcccaucaccgacguguucuacaaggagaacuccuacaccaccacgaucaagcccgugaccuacaagcucgacggcgucgugugcaccgagaucgaccccaagcuggacaacuacuacaagaaggacaacagcuacuucaccgagcagccgaucgaccuggugcccaaccagcccuaccccaacgccuccuucgacaacuucaaguucgucugcgacaacaucaaguucgccgacgaccucaaccagcugacgggguaccgcaagccggcgagccgggagcugaaggugaccuucuuccccgaccucaacggcgacguggucgccaucgacuacaagcacuacacccccuccuucaagaagggcgccaagcugcugcacaagcccaucguguggcacgugaacaacgccaccaacaaggcgacguacaagccgaacaccuggugcauccgcugccucuggagcaccaagcccgucgagaccuccaacagcuucgacgugcugaaguccgaggacgcccaggggauggacaaccuggccugcgaggaccucaagcccgugagcgaggaggucguggagaaccccacgauccagaaggacgugcuggagugcaacgucaagaccaccgagguggugggcgacaucauccugaagccggccaacaacucccucaagaucaccgaggaggucgggcacacggaccugauggccgcguacguggacaacagcucccugaccaucaagaagcccaacgagcucagccgcgugcugggccugaagacccucgccacccacgggcuggccgccgucaacuccgugcccugggacacgaucgccaacuacgcgaagccguuccugaacaagguggucagcaccaccaccaacaucgugacgcggugccucaaccgcgugugcaccaacuacaugcccuacuucuucacccugcugcuccagcugugcaccuucacccgguccacgaacagccgcaucaaggccuccaugcccaccaccaucgccaagaacaccgucaagagcgugggcaaguucugccuggaggccagcuucaacuaccucaagucccccaacuucagcaagcugaucaacaucaucaucugguuccugcuccuguccgugugccugggcagccucaucuacuccacggccgcgcuggggguccugaugagcaaccucggcaugccguccuacugcaccggguaccgggagggcuaccugaacagcaccaacgugaccaucgccacguacugcaccggcuccauccccugcagcgugugccuguccgggcucgacagccuggacaccuaccccucccuggagaccauccagaucacgaucagcuccuucaagugggaccucaccgccuucggccuggucgccgagugguuccuggccuacauccucuucacccgcuucuucuacgugcuggggcuggcggccaucaugcagcucuucuucagcuacuucgccgugcacuucaucuccaacagcuggcugauguggcugaucaucaaccugguccagauggcccccaucuccgcgauggugcggauguacaucuucuucgccagcuucuacuacguguggaagagcuacguccacgugguggacggcugcaacuccagcaccugcaugaugugcuacaagcgcaaccgggccacgcgcgucgagugcaccaccaucgugaacgggguccggcgcuccuucuacguguacgccaacggcggcaagggguucugcaagcuccacaacuggaacugcgugaacugcgacaccuucugcgccggcagcacguucaucuccgacgaggucgcgcgggaccugagccugcaguucaagcgcccgaucaaccccaccgaccaguccagcuacaucguggacuccgugaccgucaagaacgggagcauccaccucuacuucgacaaggccggccagaagaccuacgagcggcacucccugagccacuucgugaaccuggacaaccuccgcgccaacaacacgaaggggucccugcccaucaacgugaucgucuucgacggcaagagcaagugcgaggaguccagcgccaaguccgccagcguguacuacucccagcugaugugccagcccauccuccugcuggaccaggcgcucgugagcgacgucggcgacagcgccgagguggccgugaagauguucgacgccuacgucaacaccuucuccagcaccuucaacgugccgauggagaagcugaagacccugguggccacggcggaggccgagcucgccaagaacgucucccuggacaacgugcugagcaccuucaucuccgccgcgcggcagggguucguggacagcgacgucgagaccaaggacgugguggagugccucaagcugucccaccagagcgacaucgaggucaccggcgacuccugcaacaacuacaugcugacguacaacaagguggagaacaugaccccccgcgaccucggggccugcaucgacugcagcgcccggcacaucaacgcccagguggccaagucccacaacaucgcgcugaucuggaacgucaaggacuucaugagccuguccgagcagcuccgcaagcagauccgcagcgccgccaagaagaacaaccugcccuucaagcugaccugcgccaccacgcggcagguggugaacgucgugaccaccaagaucgcccucaagggcggguga

SEQ ID NO: 17948 - RNA, 5841 nt, Artificial Sequence
  SARS-CoV-2__MT762398.1__non-structural protein 3 (NSP3) CDS gc
auggcccccaccaaggugaccuucggcgacgacacggucaucgaggugcagggguacaagagcgugaacaucaccuucgagcuggacgagcgcaucgacaagguccucaacgagaagugcuccgccuacaccguggagcugggcaccgaggugaacgaguucgcgugcgucguggccgacgccgugaucaagacgcugcagccggucagcgagcuccugacccugcucgggaucgaccuggacgagugguccauggccaccuacuaccuguucgacgagagcggcgaguucaagcucgccucccacauguacugcagcuucuacccccccgacgaggacgaggaggagggggacugcgaggaggaggaguucgagcccuccacccaguacgaguacggcacggaggacgacuaccagggcaagccgcuggaguucggggcgaccagcgccgcccugcagcccgaggaggagcaggaggaggacuggcucgacgacgacucccagcagaccgugggccagcaggacgggagcgaggacaaccagaccacgaccauccagaccaucguggagguccagccccagcuggagauggagcugacccccguggugcagacgaucgaggucaacuccuucagcggcuaccucaagcugaccgacaacguguacaucaagaacgccgacaucguggaggaggcgaagaaggucaagccgaccgugguggucaacgccgccaacguguaccugaagcacgggggcggcguggccggggcccucaacaaggcgaccaacaacgccaugcaggucgaguccgacgacuacaucgccacgaacggcccccugaagguggggggcagcugcguccuguccggccacaaccucgccaagcacugccugcacgugguggggcccaacgucaacaagggcgaggacauccagcugcucaagagcgccuacgagaacuucaaccagcacgaggugcugcuggcgccccuccuguccgccgggaucuucggcgccgacccgauccacagccugcgggugugcgucgacaccgugcgcaccaacguguaccucgccgucuucgacaagaaccuguacgacaagcugguguccagcuuccucgagaugaagagcgagaagcagguggagcagaagaucgccgagauccccaaggaggaggucaagcccuucaucaccgaguccaagcccagcguggagcagcggaagcaggacgacaagaagaucaaggcgugcguggaggaggucacgaccacccuggaggagaccaaguuccugacggagaaccuccugcuguacaucgacaucaacgggaaccuccacccggacuccgccacccuggugagcgacaucgacaucaccuuccugaagaaggacgcccccuacaucgugggcgacgucgugcaggagggcgugcucaccgccgucgugauccccacgaagaaggccgggggcaccaccgagaugcuggcgaaggcccugcgcaaggugcccaccgacaacuacaucacgaccuacccggggcagggccucaacggguacaccgucgaggaggccaagaccgugcugaagaagugcaaguccgccuucuacauccugcccagcaucaucuccaacgagaagcaggagauccucggcaccgugagcuggaaccugcgggagaugcuggcgcacgccgaggagacgcgcaagcugaugcccgucugcguggagaccaaggccaucguguccaccauccagcggaaguacaagggcaucaagauccaggagggggucguggacuacggcgcccgcuucuacuucuacaccagcaagacgaccguggccucccucaucaacacccugaacgaccugaacgagacccucgucacgaugccccugggguacgugacccacggccugaaccucgaggaggcggcccgguacaugcgcagccugaaggugccggccaccgucuccgugagcucccccgacgccgugaccgccuacaacggguaccugacgagcuccagcaagacccccgaggagcacuucaucgagaccaucucccucgcgggcagcuacaaggacuggagcuacuccggccagagcacccagcuggggaucgaguuccugaagcggggcgacaaguccgucuacuacacgagcaaccccaccaccuuccaccucgacggggaggugaucaccuucgacaaccugaagacgcugcucucccugcgcgaggugcggaccaucaaggucuucaccaccguggacaacaucaaccugcacacgcagguggucgacaugagcaugaccuacggccagcaguucggcccgaccuaccucgacggggccgacgugaccaagaucaagccccacaacucccacgagggcaagacguucuacgugcugcccaacgacgacacccugcgcgucgaggccuucgaguacuaccacaccaccgacccgagcuuccucgggcgguacauguccgcccugaaccacacgaagaaguggaaguacccccaggugaacggccugaccagcaucaagugggccgacaacaacugcuaccucgcgaccgcccugcugacccuccagcagaucgagcugaaguucaacccccccgcccugcaggacgccuacuaccgcgcgcgggccggggaggccgccaacuucugcgcccucauccuggcguacugcaacaagacggugggcgagcugggcgacguccgcgagaccauguccuaccucuuccagcacgccaaccuggacagcugcaagcgggugcugaacgucgugugcaagaccugcgggcagcagcagaccacccucaagggcguggaggccgucauguacauggggacgcuguccuacgagcaguucaagaagggcgugcagaucccgugcaccugcgggaagcaggccaccaaguaccuggugcagcaggagagccccuucgucaugauguccgccccccccgcgcaguacgagcucaagcacggcaccuucacgugcgccagcgaguacaccggcaacuaccagugcgggcacuacaagcacaucaccuccaaggagacccuguacugcaucgacggcgcccugcucacgaagagcagcgaguacaaggggccgaucaccgacguguucuacaaggagaacuccuacaccaccacgaucaagcccgugaccuacaagcuggacggcgucgugugcaccgagaucgaccccaagcuggacaacuacuacaagaaggacaacagcuacuucaccgagcagcccaucgaccucgugccgaaccagcccuaccccaacgccuccuucgacaacuucaaguucgucugcgacaacaucaaguucgccgacgaccugaaccagcugacgggguacaagaagcccgcgagccgcgagcucaaggugaccuucuucccggaccugaacggcgacguggucgccaucgacuacaagcacuacacccccuccuucaagaagggcgccaagcugcuccacaagcccaucguguggcacgugaacaacgccaccaacaaggcgacguacaagcccaacaccuggugcauccggugccuguggagcaccaagccggucgagaccuccaacagcuucgacgugcugaaguccgaggacgcccaggggauggacaaccucgccugcgaggaccugaagcccgugagcgaggaggucguggagaaccccacgauccagaaggacgugcuggagugcaacgucaagaccaccgagguggugggcgacaucauccucaagcccgccaacaacucccugaagaucaccgaggaggucgggcacacggaccugauggccgcguacguggacaacagcucccucaccaucaagaagccgaacgagcugagccgcgugcugggccucaagacccuggccacccacgggcuggccgccgucaacuccgugcccugggacacgaucgccaacuacgcgaagcccuuccucaacaagguggucagcaccaccaccaacaucgugacgcgcugccugaaccgggugugcaccaacuacaugccguacuucuucacccugcuccugcagcugugcaccuucacccgcuccacgaacagccggaucaaggccuccaugcccaccaccaucgccaagaacaccgucaagagcgugggcaaguucugccucgaggccagcuucaacuaccugaagucccccaacuucagcaagcugaucaacaucaucaucugguuccuccugcuguccgugugccucggcagccugaucuacuccacggccgcgcuggggguccucaugagcaaccugggcaugcccuccuacugcaccggguaccgcgagggcuaccugaacagcaccaacgugaccaucgccacguacugcaccggcuccaucccgugcagcgugugccucuccgggcuggacagccuggacaccuaccccucccucgagaccauccagaucacgaucagcuccuucaagugggaccugaccgccuucggccuggucgccgagugguuccucgccuacauccuguucacccgguucuucuacgugcuggggcucgcggccaucaugcagcuguucuucagcuacuucgccgugcacuucaucuccaacagcuggcugauguggcugaucaucaaccucguccagauggcccccaucuccgcgauggugcgcauguacaucuucuucgccagcuucuacuacguguggaagagcuacguccacgugguggacggcugcaacuccagcaccugcaugaugugcuacaagcggaaccgcgccacgcgggucgagugcaccaccaucgugaacgggguccgccgguccuucuacguguacgccaacggcggcaagggguucugcaagcugcacaacuggaacugcgugaacugcgacaccuucugcgccggcagcacguucaucuccgacgaggucgcgcgcgaccugagccuccaguucaagcggcccaucaacccgaccgaccaguccagcuacaucguggacuccgugaccgucaagaacgggagcauccaccuguacuucgacaaggccggccagaagaccuacgagcgccacucccugagccacuucgugaaccucgacaaccugcgggccaacaacacgaaggggucccugcccaucaacgugaucgucuucgacggcaagagcaagugcgaggaguccagcgccaaguccgccagcguguacuacucccagcucaugugccagcccauccugcugcucgaccaggcgcuggugagcgacgucggcgacagcgccgagguggccgugaagauguucgacgccuacgucaacaccuucuccagcaccuucaacgugcccauggagaagcugaagacccucguggccacggcggaggccgagcuggccaagaacgucucccuggacaacgugcucagcaccuucaucuccgccgcgcgccagggguucguggacagcgacgucgagaccaaggacgugguggagugccugaagcugucccaccagagcgacaucgaggucaccggcgacuccugcaacaacuacaugcucacguacaacaagguggagaacaugaccccgcgggaccugggggccugcaucgacugcagcgcccgccacaucaacgcccagguggccaagucccacaacaucgcgcugaucuggaacgucaaggacuucaugagccucuccgagcagcugcggaagcagauccgcagcgccgccaagaagaacaaccugcccuucaagcucaccugcgccaccacgcgccagguggugaacgucgugaccaccaagaucgcccugaagggcggguga

SEQ ID NO: 17949 - RNA, 5841 nt, Artificial Sequence
  SARS-CoV-2__MT764179.1__non-structural protein 3 (NSP3) CDS gc
auggcccccaccaaggugaccuucggcgacgacacggucaucgaggugcagggguacaagagcgugaacaucaccuucgagcuggacgagcgcaucgacaagguccucaacgagaagugcuccgccuacaccguggagcugggcaccgaggugaacgaguucgcgugcgucguggccgacgccgugaucaagacgcugcagccggucagcgagcuccugaccccccuggggaucgaccucgacgagugguccauggccaccuacuaccuguucgacgagagcggcgaguucaagcuggccucccacauguacugcagcuucuacccccccgacgaggacgaggaggagggggacugcgaggaggaggaguucgagccguccacccaguacgaguacggcacggaggacgacuaccagggcaagccccucgaguucggggcgaccagcgccgcccugcagcuggaggaggagcaggaggaggacuggcucgacgacgacucccagcagaccgugggccagcaggacgggagcgaggacaaccagaccacgaccauccagaccaucguggagguccagccccagcuggagauggagcugacccccguggugcagacgaucgaggucaacuccuucagcggcuaccucaagcugaccgacaacguguacaucaagaacgccgacaucguggaggaggcgaagaaggucaagccgaccgugguggucaacgccgccaacguguaccugaagcacgggggcggcguggccggggcccucaacaaggcgaccaacaacgccaugcaggucgaguccgacgacuacaucgccacgaacggcccccugaagguggggggcagcugcguccuguccggccacaaccucgccaagcacugccugcacgugguggggcccaacgucaacaagggcgaggacauccagcugcucaagagcgccuacgagaacuucaaccagcacgaggugcugcuggcgccccuccuguccgccgggaucuucggcgccgacccgauccacagccugcgggugugcgucgacaccgugcgcaccaacguguaccucgccgucuucgacaagaaccuguacgacaagcugguguccagcuuccucgagaugaagagcgagaagcagguggagcagaagaucgccgagauccccaaggaggaggucaagcccuucaucaccgaguccaagcccagcguggagcagcggaagcaggacgacaagaagaucaaggcgugcguggaggaggucacgaccacccuggaggagaccaaguuccugacggagaaccuccugcuguacaucgacaucaacgggaaccuccacccggacuccgccacccuggugagcgacaucgacaucaccuuccugaagaaggacgcccccuacaucgugggcgacgucgugcaggagggcgugcucaccgccgucgugauccccacgaagaaggccgggggcaccaccgagaugcuggcgaaggcccugcgcaaggugcccaccgacaacuacaucacgaccuacccggggcagggccucaacggguacaccgucgaggaggccaagaccgugcugaagaagugcaaguccgccuucuacauccugcccagcaucaucuccaacgagaagcaggagauccucggcaccgugagcuggaaccugcgggagaugcuggcgcacgccgaggagacgcgcaagcugaugcccgucugcguggagaccaaggccaucguguccaccauccagcggaaguacaagggcaucaagauccaggagggggucguggacuacggcgcccgcuucuacuucuacaccagcaagacgaccguggccucccucaucaacacccugaacgaccugaacgagacccucgucacgaugccccugggguacgugacccacggccugaaccucgaggaggcggcccgguacaugcgcagccugaaggugccggccaccgucuccgugagcucccccgacgccgugaccgccuacaacggguaccugacgagcuccagcaagacccccgaggagcacuucaucgagaccaucucccucgcgggcagcuacaaggacuggagcuacuccggccagagcacccagcuggggaucgaguuccugaagcggggcgacaaguccgucuacuacacgagcaaccccaccaccuuccaccucgacggggaggugaucaccuucgacaaccugaagacgcugcucucccugcgcgaggugcggaccaucaaggucuucaccaccguggacaacaucaaccugcacacgcagguggucgacaugagcaugaccuacggccagcaguucggcccgaccuaccucgacggguccgacgugaccaagaucaagccccacaacagccacgagggcaagacguucuacgugcugcccaacgacgacacccugcgcgucgaggccuucgaguacuaccacaccaccgacccguccuuccucgggcgguacaugagcgcccugaaccacacgaagaaguggaaguacccccaggugaacggccugaccuccaucaagugggccgacaacaacugcuaccucgccaccgcgcugcugacccuccagcagaucgagcugaaguucaacccccccgcccugcaggacgccuacuaccgcgcccgggcgggggaggccgccaacuucugcgcccucauccuggccuacugcaacaagacggugggcgagcugggcgacguccgcgagaccaugagcuaccucuuccagcacgcgaaccuggacuccugcaagcgggugcugaacgucgugugcaagaccugcgggcagcagcagaccacccucaagggcguggaggccgucauguacauggggacgcugagcuacgagcaguucaagaagggcgugcagaucccgugcaccugcgggaagcaggccaccaaguaccuggugcagcaggagucccccuucgucaugaugagcgccccccccgcccaguacgagcucaagcacggcaccuucacgugcgcguccgaguacaccggcaacuaccagugcgggcacuacaagcacaucaccagcaaggagacccuguacugcaucgacggcgcccugcucacgaagagcuccgaguacaaggggccgaucaccgacguguucuacaaggagaacagcuacaccaccacgaucaagcccgugaccuacaagcuggacggcgucgugugcaccgagaucgaccccaagcuggacaacuacuacaagaaggacaacuccuacuucaccgagcagcccaucgaccucgugccgaaccagcccuaccccaacgccagcuucgacaacuucaaguucgucugcgacaacaucaaguucgccgacgaccugaaccagcugacgggguacaagaagcccgccucccgcgagcucaaggugaccuucuucccggaccugaacggcgacguggucgcgaucgacuacaagcacuacacccccagcuucaagaagggcgccaagcugcuccacaagcccaucguguggcacgugaacaacgccaccaacaaggccacguacaagcccaacaccuggugcauccggugccugugguccaccaagccggucgagaccagcaacuccuucgacgugcugaagagcgaggacgcgcaggggauggacaaccucgccugcgaggaccugaagcccguguccgaggaggucguggagaaccccacgauccagaaggacgugcuggagugcaacgucaagaccaccgagguggugggcgacaucauccucaagcccgccaacaacagccugaagaucaccgaggaggucgggcacacggaccugauggccgccuacguggacaacuccagccucaccaucaagaagccgaacgagcugucccgcgugcugggccucaagacccuggcgacccacgggcuggccgccgucaacagcgugcccugggacacgaucgccaacuacgccaagcccuuccucaacaagguggucuccaccaccaccaacaucgugacgcgcugccugaaccgggugugcaccaacuacaugccguacuucuucacccugcuccugcagcugugcaccuucacccgcagcacgaacucccggaucaaggcgagcaugcccaccaccaucgccaagaacaccgucaagagcgugggcaaguucugccucgaggccuccuucaacuaccugaagagccccaacuucuccaagcugaucaacaucaucaucugguuccuccugcugagcgugugccucggcucccugaucuacagcacggccgcccuggggguccucauguccaaccugggcaugcccagcuacugcaccggguaccgcgagggcuaccugaacuccaccaacgugaccaucgcgacguacugcaccggcagcaucccgugcuccgugugccucagcgggcuggacucccuggacaccuaccccagccucgagaccauccagaucacgaucuccagcuucaagugggaccugaccgccuucggccuggucgccgagugguuccucgccuacauccuguucacccgguucuucuacgugcuggggcucgccgcgaucaugcagcuguucuucuccuacuucgccgugcacuucaucagcaacuccuggcugauguggcugaucaucaaccucguccagauggcccccaucagcgccauggugcgcauguacaucuucuucgcgagcuucuacuacguguggaaguccuacguccacgugguggacggcugcaacagcuccaccugcaugaugugcuacaagcggaaccgcgccacgcgggucgagugcaccaccaucgugaacgggguccgccggagcuucuacguguacgccaacggcggcaagggguucugcaagcugcacaacuggaacugcgugaacugcgacaccuucugcgccggcuccacguucaucagcgacgaggucgcccgcgaccugucccuccaguucaagcggcccaucaacccgaccgaccagagcuccuacaucguggacagcgugaccgucaagaacggguccauccaccuguacuucgacaaggcgggccagaagaccuacgagcgccacagccugucccacuucgugaaccucgacaaccugcgggccaacaacacgaaggggagccugcccaucaacgugaucgucuucgacggcaaguccaagugcgaggagagcuccgccaagagcgccuccguguacuacagccagcucaugugccagcccauccugcugcucgaccaggcccuggugagcgacgucggcgacuccgcggagguggccgugaagauguucgacgccuacgucaacaccuucagcuccaccuucaacgugcccauggagaagcugaagacccucguggccacggccgaggcggagcuggccaagaacgucagccuggacaacgugcucuccaccuucaucagcgccgcccgccagggguucguggacuccgacgucgagaccaaggacgugguggagugccugaagcugagccaccaguccgacaucgaggucaccggcgacagcugcaacaacuacaugcucacguacaacaagguggagaacaugaccccgcgggaccugggggcgugcaucgacugcuccgcccgccacaucaacgcccagguggccaagagccacaacaucgcccugaucuggaacgucaaggacuucaugucccucagcgagcagcugcggaagcagauccgcuccgcggccaagaagaacaaccugcccuucaagcucaccugcgccaccacgcgccagguggugaacgucgugaccaccaagaucgcccugaagggcggguga

SEQ ID NO: 17950 - RNA, 5841 nt, Artificial Sequence
  SARS-CoV-2__MT755602.1__non-structural protein 3 (NSP3) CDS gc
auggcccccaccaaggugaccuucggcgacgacacggucaucgaggugcagggguacaagagcgugaacaucaccuucgagcuggacgagcgcaucgacaagguccucaacgagaagugcuccgccuacaccguggagcugggcaccgaggugaacgaguucgcgugcgucguggccgacgccgugaucaagacgcugcagccggucagcgagcuccugaccccccuggggaucgaccucgacgagugguccauggccaccuacuaccuguucgacgagagcggcgaguucaagcuggccucccacauguacugcagcuucuacccccccgacgaggacgaggaggagggggacugcgaggaggaggaguucgagccguccacccaguacgaguacggcacggaggacgacuaccagggcaagccccucgaguucggggcgaccagcgccgcccugcagcccgaggaggagcaggaggaggacuggcuggacgacgacucccagcagaccgugggccagcaggacgggagcgaggacaaccagaccacgaccauccagaccaucguggagguccagccccagcucgagauggagcugaccccgguggugcagacgaucgaggucaacuccuucagcggcuaccugaagcucaccgacaacguguacaucaagaacgccgacaucguggaggaggcgaagaaggucaagcccaccgugguggucaacgccgccaacguguaccugaagcacgggggcggcguggccggggcccugaacaaggcgaccaacaacgccaugcaggucgaguccgacgacuacaucgccacgaacggcccccucaagguggggggcagcugcguccuguccggccacaaccuggccaagcacugccuccacgugguggggcccaacgucaacaagggcgaggacauccagcugcugaagagcgccuacgagaacuucaaccagcacgaggugcuccuggcgccgcugcucuccgccgggaucuucggcgccgaccccauccacagccugcgggugugcgucgacaccgugcgcaccaacguguaccuggccgucuucgacaagaaccucuacgacaagcugguguccagcuuccuggagaugaagagcgagaagcagguggagcagaagaucgccgagauccccaaggaggaggucaagcccuucaucaccgaguccaagccgagcguggagcagcggaagcaggacgacaagaagaucaaggcgugcguggaggaggucacgaccacccucgaggagaccaaguuccugacggagaaccugcuccuguacaucgacaucaacgggaaccugcaccccgacuccgccacccucgugagcgacaucgacaucaccuuccugaagaaggacgcccccuacaucgugggcgacgucgugcaggagggcgugcugaccgccgucgugauccccacgaagaaggccgggggcaccaccgagaugcucgcgaaggcccugcgcaaggugccgaccgacaacuacaucacgaccuaccccgggcagggccugaacggguacaccgucgaggaggccaagaccgugcucaagaagugcaaguccgccuucuacauccugcccagcaucaucuccaacgagaagcaggagauccugggcaccgugagcuggaaccuccgggagaugcuggcgcacgccgaggagacgcgcaagcugaugcccgucugcguggagaccaaggccaucguguccaccauccagcggaaguacaagggcaucaagauccaggagggggucguggacuacggcgcccgcuucuacuucuacaccagcaagacgaccguggccucccugaucaacacccucaacgaccugaacgagacccuggucacgaugccgcucggguacgugacccacggccugaaccuggaggaggcggcccgguacaugcgcagccucaaggugcccgccaccgucuccgugagcucccccgacgccgugaccgccuacaacggguaccugacgagcuccagcaagacccccgaggagcacuucaucgagaccaucucccuggcgggcagcuacaaggacuggagcuacuccggccagagcacccagcucgggaucgaguuccugaagcggggcgacaaguccgucuacuacacgagcaacccgaccaccuuccaccuggacggggaggugaucaccuucgacaaccucaagacgcugcugucccuccgcgaggugcggaccaucaaggucuucaccaccguggacaacaucaaccugcacacgcagguggucgacaugagcaugaccuacggccagcaguucggccccaccuaccuggacggggccgacgugaccaagaucaagccccacaacucccacgagggcaagacguucuacgugcucccgaacgacgacacccugcgcgucgaggccuucgaguacuaccacaccaccgaccccagcuuccuggggcgguacauguccgcccucaaccacacgaagaaguggaaguacccccaggugaacggccugaccagcaucaagugggccgacaacaacugcuaccuggcgaccgcccuccugacccugcagcagaucgagcucaaguucaaccccccggcccugcaggacgccuacuaccgcgcgcgggccggggaggccgccaacuucugcgcccugauccucgcguacugcaacaagacggugggcgagcugggcgacguccgcgagaccauguccuaccuguuccagcacgccaaccucgacagcugcaagcgggugcugaacgucgugugcaagaccugcgggcagcagcagaccacccugaagggcguggaggccgucauguacauggggacgcucuccuacgagcaguucaagaagggcgugcagauccccugcaccugcgggaagcaggccaccaaguaccuggugcagcaggagagccccuucgucaugauguccgcccccccggcgcaguacgagcugaagcacggcaccuucacgugcgccagcgaguacaccggcaacuaccagugcgggcacuacaagcacaucaccuccaaggagacccucuacugcaucgacggcgcccugcugacgaagagcagcgaguacaaggggcccaucaccgacguguucuacaaggagaacuccuacaccaccacgaucaagcccgugaccuacaagcucgacggcgucgugugcaccgagaucgaccccaagcuggacaacuacuacaagaaggacaacagcuacuucaccgagcagccgaucgaccuggugcccaaccagcccuaccccaacgccuccuucgacaacuucaaguucgucugcgacaacaucaaguucgccgacgaccucaaccagcugacgggguacaagaagccggcgagccgcgagcugaaggugaccuucuuccccgaccucaacggcgacguggucgccaucgacuacaagcacuacacccccuccuucaagaagggcgccaagcugcugcacaagcccaucguguggcacgugaacaacgccaccaacaaggcgacguacaagccgaacaccuggugcauccggugccucuggagcaccaagcccgucgagaccuccaacagcuucgacgugcugaaguccgaggacgcccaggggauggacaaccuggccugcgaggaccucaagcccgugagcgaggaggucguggagaaccccacgauccagaagaacgugcuggagugcaacgucaagaccaccgagguggugggcgacaucauccugaagccggccaacaacucccucaagaucaccgaggaggucgggcacacggaccugauggccgcguacguggacaacagcucccugaccaucaagaagcccaacgagcucagccgcgugcugggccugaagacccucgccacccacgggcuggccgccgucaacuccgugcccugggacacgaucgccaacuacgcgaagccguuccugaacaagguggucagcaccaccaccaacaucgugacgcgcugccucaaccgggugugcaccaacuacaugcccuacuucuucacccugcugcuccagcugugcaccuucacccgcuccacgaacagccggaucaaggccuccaugcccaccaccaucgccaagaacaccgucaagagcgugggcaaguucugccuggaggccagcuucaacuaccucaagucccccaacuucagcaagcugaucaacaucaucaucugguuccugcuccuguccgugugccugggcagccucaucuacuccacggccgcgcuggggguccugaugagcaaccucggcaugccguccuacugcaccggguaccgcgagggcuaccugaacagcaccaacgugaccaucgccacguacugcaccggcuccauccccugcagcgugugccuguccgggcucgacagccuggacaccuaccccucccuggagaccauccagaucacgaucagcuccuucaagugggaccucaccgccuucggccuggucgccgagugguuccuggccuacauccucuucacccgguucuucuacgugcuggggcuggcggccaucaugcagcucuucuucagcuacuucgccgugcacuucaucuccaacagcuggcugauguggcugaucaucaaccugguccagauggcccccaucuccgcgauggugcgcauguacaucuucuucgccagcuucuacuacguguggaagagcuacguccacgugguggacggcugcaacuccagcaccugcaugaugugcuacaagcggaaccgcgccacgcgggucgagugcaccaccaucgugaacgggguccgccgguccuucuacguguacgccaacggcggcaagggguucugcaagcuccacaacuggaacugcgugaacugcgacaccuucugcgccggcagcacguucaucuccgacgaggucgcgcgcgaccugagccugcaguucaagcggccgaucaaccccaccgaccaguccagcuacaucguggacuccgugaccgucaagaacgggagcauccaccucuacuucgacaaggccggccagaagaccuacgagcgccacucccugagccacuucgugaaccuggacaaccuccgggccaacaacacgaaggggucccugcccaucaacgugaucgucuucgacggcaagagcaagugcgaggaguccagcgccaaguccgccagcguguacuacucccagcugaugugccagcccauccuccugcuggaccaggcgcucgugagcgacgucggcgacagcgccgagguggccgugaagauguucgacgccuacgucaacaccuucuccagcaccuucaacgugccgauggagaagcugaagacccugguggccacggcggaggccgagcucgccaagaacgucucccuggacaacgugcugagcaccuucaucuccgccgcgcgccagggguucguggacagcgacgucgagaccaaggacgugguggagugccucaagcugucccaccagagcgacaucgaggucaccggcgacuccugcaacaacuacaugcugacguacaacaagguggagaacaugaccccccgggaccucggggccugcaucgacugcagcgcccgccacaucaacgcccagguggccaagucccacaacaucgcgcugaucuggaacgucaaggacuucaugagccuguccgagcagcuccggaagcagauccgcagcgccgccaagaagaacaaccugcccuucaagcugaccugcgccaccacgcgccagguggugaacgucgugaccaccaagaucgcccucaagggcggguga

SEQ ID NO: 17951 - RNA, 5841 nt, Artificial Sequence
  SARS-CoV-2__MT755830.1__non-structural protein 3 (NSP3) CDS gc
auggcccccaccaaggugaccuucggcgacgacacggucaucgaggugcagggguacaagagcgugaacaucaccuucgagcuggacgagcgcaucgacaagguccucaacgagaagugcuccgccuacaccguggagcugggcaccgagguggacgaguucgcgugcgucguggccgacgccgugaucaagacgcugcagccggucagcgagcuccugaccccccuggggaucgaccucgacgagugguccauggccaccuacuaccuguucgacgagagcggcgaguucaagcuggccucccacauguacugcagcuucuacccccccgacgaggacgaggaggagggggacugcgaggaggaggaguucgagccguccacccaguacgaguacggcacggaggacgacuaccagggcaagccccucgaguucggggcgaccagcgccgcccugcagcccgaggaggagcaggaggaggacuggcuggacgacgacucccagcagaccgugggccagcaggacgggagcgaggacaaccagaccacgaccauccagaccaucguggagguccagccccagcucgagauggagcugaccccgguggugcagacgaucgaggucaacuccuucagcggcuaccugaagcucaccgacaacguguacaucaagaacgccgacaucguggaggaggcgaagaaggucaagcccaccgugguggucaacgccgccaacguguaccugaagcacgggggcggcguggccggggcccugaacaaggcgaccaacaacgccaugcaggucgaguccgacgacuacaucgccacgaacggcccccucaagguggggggcagcugcguccuguccggccacaaccuggccaagcacugccuccacgugguggggcccaacgucaacaagggcgaggacauccagcugcugaagagcgccuacgagaacuucaaccagcacgaggugcuccuggcgccgcugcucuccgccgggaucuucggcgccgaccccauccacagccugcgggugugcgucgacaccgugcgcaccaacguguaccuggccgucuucgacaagaaccucuacgacaagcugguguccagcuuccuggagaugaagagcgagaagcagguggagcagaagaucgccgagauccccaaggaggaggucaagcccuucaucaccgaguccaagccgagcguggagcagcggaagcaggacgacaagaagaucaaggcgugcguggaggaggucacgaccacccucgaggagaccaaguuccugacggagaaccugcuccuguacaucgacaucaacgggaaccugcaccccgacuccgccacccucgugagcgacaucgacaucaccuuccugaagaaggacgcccccuacaucgugggcgacgucgugcaggagggcgugcugaccgccgucgugauccccacgaagaaggccgggggcaccaccgagaugcucgcgaaggcccugcgcaaggugccgaccgacaacuacaucacgaccuaccccgggcagggccugaacggguacaccgucgaggaggccaagaccgugcucaagaagugcaaguccgccuucuacauccugcccagcaucaucuccaacgagaagcaggagauccugggcaccgugagcuggaaccuccgggagaugcuggcgcacgccgaggagacgcgcaagcugaugcccgucugcguggagaccaaggccaucguguccaccauccagcggaaguacaagggcaucaagauccaggagggggucguggacuacggcgcccgcuucuacuucuacaccagcaagacgaccguggccucccugaucaacacccucaacgaccugaacgagacccuggucacgaugccgcucggguacgugacccacggccugaaccuggaggaggcggcccgguacaugcgcagccucaaggugcccgccaccgucuccgugagcucccccgacgccgugaccgccuacaacggguaccugacgagcuccagcaagacccccgaggagcacuucaucgagaccaucucccuggcgggcagcuacaaggacuggagcuacuccggccagagcacccagcucgggaucgaguuccugaagcggggcgacaaguccgucuacuacacgagcaacccgaccaccuuccaccuggacggggaggugaucaccuucgacaaccucaagacgcugcugucccuccgcgaggugcggaccaucaaggucuucaccaccguggacaacaucaaccugcacacgcagguggucgacaugagcaugaccuacggccagcaguucggccccaccuaccuggacggggccgacgugaccaagaucaagccccacaacucccacgagggcaagacguucuacgugcucccgaacgacgacacccugcgcgucgaggccuucgaguacuaccacaccaccgaccccagcuuccuggggcgguacauguccgcccucaaccacacgaagaaguggaaguacccccaggugaacggccugaccagcaucaagugggccgacaacaacugcuaccuggcgaccgcccuccugacccugcagcagaucgagcucaaguucaaccccccggcccugcaggacgccuacuaccgcgcgcgggccggggaggccgccaacuucugcgcccugauccucgcguacugcaacaagacggugggcgagcugggcgacguccgcgagaccauguccuaccuguuccagcacgccaaccucgacagcugcaagcgggugcugaacgucgugugcaagaccugcgggcagcagcagaccacccugaagggcguggaggccgucauguacauggggacgcucuccuacgagcaguucaagaagggcgugcagauccccugcaccugcgggaagcaggccaccaaguaccuggugcagcaggagagccccuucgucaugauguccgcccccccggcgcaguacgagcugaagcacggcaccuucacgugcgccagcgaguacaccggcaacuaccagugcgggcacuacaagcacaucaccuccaaggagacccucuacugcaucgacggcgcccugcugacgaagagcagcgaguacaaggggcccaucaccgacguguucuacaaggagaacuccuacaccaccacgaucaagcccgugaccuacaagcucgacggcgucgugugcaccgagaucgaccccaagcuggacaacuacuacaagaaggacaacagcuacuucaccgagcagccgaucgaccuggugcccaaccagcccuaccccaacgccuccuucgacaacuucaaguucgucugcgacaacaucaaguucgccgacgaccucaaccagcugacgggguacaagaagccggcgagccgcgagcugaaggugaccuucuuccccgaccucaacggcgacguggucgccaucgacuacaagcacuacacccccuccuucaagaagggcgccaagcugcugcacaagcccaucguguggcacgugaacaacgccaccaacaaggcgacguacaagccgaacaccuggugcauccggugccucuggagcaccaagcccgucgagaccuccaacagcuucgacgugcugaaguccgaggacgcccaggggauggacaaccuggccugcgaggaccucaagcccgugagcgaggaggucguggagaaccccacgauccagaaggacgugcuggagugcaacgucaagaccaccgagguggugggcgacaucauccugaagccggccaacaacucccucaagaucaccgaggaggucgggcacacggaccugauggccgcguacguggacaacagcucccugaccaucaagaagcccaacgagcucagccgcgugcugggccugaagacccucgccacccacgggcuggccgccgucaacuccgugcccugggacacgaucgccaacuacgcgaagccguuccugaacaagguggucagcaccaccaccaacaucgugacgcgcugccucaaccgggugugcaccaacuacaugcccuacuucuucacccugcugcuccagcugugcaccuucacccgcuccacgaacagccggaucaaggccuccaugcccaccaccaucgccaagaacaccgucaagagcgugggcaaguucugccuggaggccagcuucaacuaccucaagucccccaacuucagcaagcugaucaacaucaucaucugguuccugcuccuguccgugugccugggcagccucaucuacuccacggccgcgcuggggguccugaugagcaaccucggcaugccguccuacugcaccggguaccgcgagggcuaccugaacagcaccaacgugaccaucgccacguacugcaccggcuccauccccugcagcgugugccuguccgggcucgacagccuggacaccuaccccucccuggagaccauccagaucacgaucagcuccuucaagugggaccucaccgccuucggccuggucgccgagugguuccuggccuacauccucuucacccgguucuucuacgugcuggggcuggcggccaucaugcagcucuucuucagcuacuucgccgugcacuucaucuccaacagcuggcugauguggcugaucaucaaccugguccagauggcccccaucuccgcgauggugcgcauguacaucuucuucgccagcuucuacuacguguggaagagcuacguccacgugguggacggcugcaacuccagcaccugcaugaugugcuacaagcggaaccgcgccacgcgggucgagugcaccaccaucgugaacgggguccgccgguccuucuacguguacgccaacggcggcaagggguucugcaagcuccacaacuggaacugcgugaacugcgacaccuucugcgccggcagcacguucaucuccgacgaggucgcgcgcgaccugagccugcaguucaagcggccgaucaaccccaccgaccaguccagcuacaucguggacuccgugaccgucaagaacgggagcauccaccucuacuucgacaaggccggccagaagaccuacgagcgccacucccugagccacuucgugaaccuggacaaccuccgggccaacaacacgaaggggucccugcccaucaacgugaucgucuucgacggcaagagcaagugcgaggaguccagcgccaaguccgccagcguguacuacucccagcugaugugccagcccauccuccugcuggaccaggcgcucgugagcgacgucggcgacagcgccgagguggccgugaagauguucgacgccuacgucaacaccuucuccagcaccuucaacgugccgauggagaagcugaagacccugguggccacggcggaggccgagcucgccaagaacgucucccuggacaacgugcugagcaccuucaucuccgccgcgcgccagggguucguggacagcgacgucgagaccaaggacgugguggagugccucaagcugucccaccagagcgacaucgaggucaccggcgacuccugcaacaacuacaugcugacguacaacaagguggagaacaugaccccccgggaccucggggccugcaucgacugcagcgcccgccacaucaacgcccagguggccaagucccacaacaucgcgcugaucuggaacgucaaggacuucaugagccuguccgagcagcuccggaagcagauccgcagcgccgccaagaagaacaaccugcccuucaagcugaccugcgccaccacgcgccagguggugaacgucgugaccaccaagaucgcccucaagggcggguga

SEQ ID NO: 17952 - RNA, 5841 nt, Artificial Sequence
  SARS-CoV-2__MT755834.1__non-structural protein 3 (NSP3) CDS gc
auggcccccaccaaggugaccuucggcgacgacacggucaucgaggugcagggguacaagagcgugaacaucaccuucgagcuggacgagcgcaucgacaagguccucaacgagaagugcuccgccuacaccguggagcugggcaccgaggugaacgaguucgcgugcgucguggccgacgccgugaucaagacgcugcagccggucagcgagcuccugaccccccuggggaucgaccucgacgagugguccauggccaccuacuaccuguucgacgagagcggcgaguucaagcuggccucccacauguacugcagcuucuacccccccgacgaggacgaggaggagggggacugcgaggaggaggaguucgagccguccacccaguacgaguacggcacggaggacgacuaccagggcaagccccucgaguucggggcgaccagcgccgcccugcagcccgaggaggagcaggaggaggacuggcuggacgacgacucccagcagaccgugggccagcaggacgggagcgaggacaaccagaccacgaccauccagaccaucguggagguccagccccagcucgagauggagcugaccccgguggugcagacgaucgaggucaacuccuucagcggcuaccugaagcucaccgacaacguguacaucaagaacgccgacaucguggaggaggcgaagaaggucaagcccaccgugguggucaacgccgccaacguguaccugaagcacgggggcggcguggccggggcccugaacaaggcgaccaacaacgccaugcaggucgaguccgacgacuacaucgccacgaacggcccccucaagguggggggcagcugcguccuguccggccacaaccuggccaagcacugccuccacgugguggggcccaacgucaacaagggcgaggacauccagcugcugaagagcgccuacgagaacuucaaccagcacgaggugcuccuggcgccgcugcucuccgccgggaucuucggcgccgaccccauccacagccugcgggugugcgucgacaccgugcgcaccaacguguaccuggccgucuucgacaagaaccucuacgacaagcugguguccagcuuccuggagaugaagagcgagaagcagguggagcagaagaucgccgagauccccaaggaggaggucaagcccuucaucaccgaguccaagccgagcguggagcagcggaagcaggacgacaagaagaucaaggcgugcguggaggaggucacgaccacccucgaggagaccaaguuccugacggagaaccugcuccuguacaucgacaucaacgggaaccugcaccccgacuccgccacccucgugagcgacaucgacaucaccuuccugaagaaggacgcccccuacaucgugggcgacgucgugcaggagggcgugcugaccgccgucgugauccccacgaagaaggccgggggcaccaccgagaugcucgcgaaggcccugcgcaaggugccgaccgacaacuacaucacgaccuaccccgggcagggccugaacggguacaccgucgaggaggccaagaccgugcucaagaagugcaaguccgccuucuacauccugcccagcaucaucuccaacgagaagcaggagauccugggcaccgugagcuggaaccuccgggagaugcuggcgcacgccgaggagacgcgcaagcugaugcccgucugcguggagaccaaggccaucguguccaccauccagcggaaguacaagggcaucaagauccaggucggggugguggacuacggcgcccgcuucuacuucuacaccagcaagacgaccgucgccucccugaucaacacccucaacgaccugaacgagacccuggugacgaugccgcucggguacgugacccacggccugaaccuggaggaggcggcccgguacaugcgcagccucaagguccccgccaccguguccgugagcucccccgacgccgucaccgccuacaacggguaccugacgagcuccagcaagacccccgaggagcacuucaucgagaccaucucccuggcgggcagcuacaaggacuggagcuacuccggccagagcacccagcucgggaucgaguuccugaagcggggcgacaaguccguguacuacacgagcaacccgaccaccuuccaccuggacggggaggugaucaccuucgacaaccucaagacgcugcugucccuccgcgagguccggaccaucaagguguucaccaccguggacaacaucaaccugcacacgcaggucguggacaugagcaugaccuacggccagcaguucggccccaccuaccuggacggggccgacgugaccaagaucaagccccacaacucccacgagggcaagacguucuacguccucccgaacgacgacacccugcgcguggaggccuucgaguacuaccacaccaccgaccccagcuuccuggggcgguacauguccgcccucaaccacacgaagaaguggaaguacccccaggugaacggccugaccagcaucaagugggccgacaacaacugcuaccuggcgaccgcccuccugacccugcagcagaucgagcucaaguucaaccccccggcccugcaggacgccuacuaccgcgcgcgggccggggaggccgccaacuucugcgcccugauccucgcguacugcaacaagacggucggcgagcugggcgacgugcgcgagaccauguccuaccuguuccagcacgccaaccucgacagcugcaagcggguccugaacguggugugcaagaccugcgggcagcagcagaccacccugaagggcgucgaggccgugauguacauggggacgcucuccuacgagcaguucaagaagggcgugcagauccccugcaccugcgggaagcaggccaccaaguaccugguccagcaggagagccccuucgugaugauguccgcccccccggcgcaguacgagcugaagcacggcaccuucacgugcgccagcgaguacaccggcaacuaccagugcgggcacuacaagcacaucaccuccaaggagacccucuacugcaucgacggcgcccugcugacgaagagcagcgaguacaaggggcccaucaccgacguguucuacaaggagaacuccuacaccaccacgaucaagcccgucaccuacaagcucgacggcguggugugcaccgagaucgaccccaagcuggacaacuacuacaagaaggacaacagcuacuucaccgagcagccgaucgaccugguccccaaccagcccuaccccaacgccuccuucgacaacuucaaguucgugugcgacaacaucaaguucgccgacgaccucaaccagcugacgggguacaagaagccggcgagccgcgagcugaaggugaccuucuuccccgaccucaacggcgacgucguggccaucgacuacaagcacuacacccccuccuucaagaagggcgccaagcugcugcacaagcccaucguguggcacgucaacaacgccaccaacaaggcgacguacaagccgaacaccuggugcauccggugccucuggagcaccaagcccguggagaccuccaacagcuucgacgugcugaaguccgaggacgcccaggggauggacaaccuggccugcgaggaccucaagcccgucagcgaggaggugguggagaaccccacgauccagaaggacguccuggagugcaacgugaagaccaccgagguggucggcgacaucauccugaagccggccaacaacucccucaagaucaccgaggagguggggcacacggaccugauggccgcguacguggacaacagcucccugaccaucaagaagcccaacgagcucagccgcguccugggccugaagacccucgccacccacgggcuggccgccgugaacuccgugcccugggacacgaucgccaacuacgcgaagccguuccugaacaaggucgugagcaccaccaccaacaucgugacgcgcugccucaaccgggucugcaccaacuacaugcccuacuucuucacccugcugcuccagcugugcaccuucacccgcuccacgaacagccggaucaaggccuccaugcccaccaccaucgccaagaacaccgugaagagcgugggcaaguucugccuggaggccagcuucaacuaccucaagucccccaacuucagcaagcugaucaacaucaucaucugguuccugcuccuguccgucugccugggcagccucaucuacuccacggccgcgcugggggugcugaugagcaaccucggcaugccguccuacugcaccggguaccgcgagggcuaccugaacagcaccaacgugaccaucgccacguacugcaccggcuccauccccugcagcgucugccuguccgggcucgacagccuggacaccuaccccucccuggagaccauccagaucacgaucagcuccuucaagugggaccucaccgccuucggccugguggccgagugguuccuggccuacauccucuucacccgguucuucuacgugcuggggcuggcggccaucaugcagcucuucuucagcuacuucgccguccacuucaucuccaacagcuggcugauguggcugaucaucaaccuggugcagauggcccccaucuccgcgauggugcgcauguacaucuucuucgccagcuucuacuacgucuggaagagcuacgugcacguggucgacggcugcaacuccagcaccugcaugaugugcuacaagcggaaccgcgccacgcggguggagugcaccaccaucgucaacggggugcgccgguccuucuacguguacgccaacggcggcaagggguucugcaagcuccacaacuggaacugcgucaacugcgacaccuucugcgccggcagcacguucaucuccgacgagguggcgcgcgaccugagccugcaguucaagcggccgaucaaccccaccgaccaguccagcuacaucguggacuccgucaccgugaagaacgggagcauccaccucuacuucgacaaggccggccagaagaccuacgagcgccacucccugagccacuucgugaaccuggacaaccuccgggccaacaacacgaaggggucccugcccaucaacgucaucguguucgacggcaagagcaagugcgaggaguccagcgccaaguccgccagcguguacuacucccagcugaugugccagcccauccuccugcuggaccaggcgcucgucagcgacgugggcgacagcgccgagguggccgucaagauguucgacgccuacgugaacaccuucuccagcaccuucaacgugccgauggagaagcugaagacccuggucgccacggcggaggccgagcucgccaagaacgugucccuggacaacgugcugagcaccuucaucuccgccgcgcgccagggguucgucgacagcgacguggagaccaaggacguggucgagugccucaagcugucccaccagagcgacaucgaggugaccggcgacuccugcaacaacuacaugcugacguacaacaagguggagaacaugaccccccgggaccucggggccugcaucgacugcagcgcccgccacaucaacgcccaggucgccaagucccacaacaucgcgcugaucuggaacgugaaggacuucaugagccuguccgagcagcuccggaagcagauccgcagcgccgccaagaagaacaaccugcccuucaagcugaccugcgccaccacgcgccagguggucaacguggugaccaccaagaucgcccucaagggcggguga

SEQ ID NO: 17953 - RNA, 5841 nt, Artificial Sequence
  SARS-CoV-2__MT755883.1__non-structural protein 3 (NSP3) CDS gc
auggcccccaccaaggugaccuucggcgacgacacggucaucgaggugcagggguacaagagcgugaacaucaccuucgagcuggacgagcgcaucgacaagguccucaacgagaagugcuccgccuacaccguggagcugggcaccgaggugaacgaguucgcgugcgucguggccgacgccgugaucaagacgcugcagccggucagcgagcuccugaccccccuggggaucgaccucgacgagugguccauggccaccuacuaccuguucgacgagagcggcgaguucaagcuggccucccacauguacugcagcuucuacccccccgacgaggacgaggaggagggggacugcgaggaggaggaguucgagccguccacccaguacgaguacggcacggaggacgacuaccagggcaagccccucgaguucggggcgaccagcgccgcccugcagcccgaggaggagcaggaggaggacuggcuggacgacgacucccagcagaccgugggccagcaggacgggagcgaggacaaccagaccacgaccauccagaccaucguggagguccagccccagcucgagauggagcugaccccgguggugcagacgaucgaggucaacuccuucagcggcuaccugaagcucaccgacaacguguacaucaagaacgccgacaucguggaggaggcgaagaaggucaagcccaccgugguggucaacgccgccaacguguaccugaagcacgggggcggcguggccggggcccugaacaaggcgaccaacaacgccaugcaggucgaguccgacgacuacaucgccacgaacggcccccucaagguggggggcagcugcguccuguccggccacaaccuggccaagcacugccuccacgugguggggcccaacgucaacaagggcgaggacauccagcugcugaagagcgccuacgagaacuucaaccagcacgaggugcuccuggcgccgcugcucuccgccgggaucuucggcgccgaccccauccacagccugcgggugugcgucgacaccgugcgcaccaacguguaccuggccgucuucgacaagaaccucuacgacaagcugguguccagcuuccuggagaugaagagcgagaagcagguggagcagaagaucgccgagauccccaaggaggaggucaagcccuucaucaccgaguccaagccgagcguggagcagcggaagcaggacgacaagaagaucaaggcgugcguggaggaggucacgaccacccucgaggagaccaaguuccugacggagaaccugcuccuguacaucgacaucaacgggaaccugcaccccgacuccgccacccucgugagcgacaucgacaucaccuuccugaagaaggacgcccccuacaucgugggcgacgucgugcaggagggcgugcugaccgccgucgugauccccacgaagaaggccgggggcaccaccgagaugcucgcgaaggcccugcgcaaggugccgaccgacaacuacaucacgaccuaccccgggcagggccugaacggguacaccgucgaggaggccaagaccgugcucaagaagugcaaguccgccuucuacauccugcccagcaucaucuccaacgagaagcaggagauccugggcaccgugagcuggaaccuccgggagaugcuggcgcacgccgaggagacgcgcaagcugaugcccgucugcguggagaccaaggccaucguguccaccauccagcggaaguacaagggcaucaagauccaggagggggucguggacuacggcgcccgcuucuacuucuacaccagcaagacgaccguggccucccugaucaacacccucaacgaccugaacgagacccuggucacgaugccgcucggguacgugacccacggccugaaccuggaggaggcggcccgguacaugcgcagccucaaggugcccgccaccgucuccgugagcucccccgacgccgugaccgccuacaacggguaccugacgagcuccagcaagacccccgaggagcacuucaucgagaccaucucccuggcgggcagcuacaaggacuggagcuacuccggccagagcacccagcucgggaucgaguuccugaagcggggcgacaaguccgucuacuacacgagcaacccgaccaccuuccaccuggacggggaggugaucaccuucgacaaccucaagacgcugcugucccuccgcgaggugcggaccaucaaggucuucaccaccguggacaacaucaaccugcacacgcagguggucgacaugagcaugaccuacggccagcaguucggccccaccuaccuggacggggccgacgugaccaagaucaagccccacaacucccacgagggcaagacguucuacgugcucccgaacgacgacacccugcgcgucgaggccuucgaguacuaccacaccaccgaccccagcuuccuggggcgguacauguccgcccucaaccacacgaagaaguggaaguacccccaggugaacggccugaccagcaucaagugggccgacaacaacugcuaccuggcgaccgcccuccugacccugcagcagaucgagcucaaguucaaccccccggcccugcaggacgccuacuaccgcgcgcgggccggggaggccgccaacuucugcgcccugauccucgcguacugcaacaagacggugggcgagcugggcgacguccgcgagaccauguccuaccuguuccagcacgccaaccucgacagcugcaagcgggugcugaacgucgugugcaagaccugcgggcagcagcagaccacccugaagggcguggaggccgucauguacauggggacgcucuccuacgagcaguucaagaagggcgugcagauccccugcaccugcgggaagcaggccaccaaguaccuggugcagcaggagagccccuucgucaugauguccgcccccccggcgcaguacgagcugaagcacggcaccuucacgugcgccagcgaguacaccggcaacuaccagugcgggcacuacaagcacaucaccuccaaggagacccucuacugcaucgacggcgcccugcugacgaagagcagcgaguacaaggggcccaucaccgacguguucuacaaggagaacuccuacaccaccacgaucaagcccgugaccuacaagcucgacggcgucgugugcaccgagaucgaccccaagcuggacaacuacuacaagaaggacaacagcuacuucaccgagcagccgaucgaccuggugcccaaccagcccuaccccaacgccuccuucgacaacuucaaguucgucugcgacaacaucaaguucgccgacgaccucaaccagcugacgggguacaagaagccggcgagccgcgagcugaaggugaccuucuuccccgaccucaacggcgacguggucgccaucgacuacaagcacuacacccccuccuucaagaagggcgccaagcugcugcacaagcccaucguguggcacgugaacaacgccaccaacaaggcgacguacaagccgaacaccuggugcauccggugccucuggagcaccaagcccgucgagaccuccaacagcuucgacgugcugaaguccgaggacgcccaggggauggacaaccuggccugcgaggaccucaagcccgugagcgaggaggucguggagaaccccacgauccagaaggacgugcuggagugcaacgucaagaccaccgagguggugggcgacaucauccugaagccggccaacaacucccucaagaucaccgaggaggucgggcacacggaccugauggccgcguacguggacaacagcucccugaccaucaagaagcccaacgagcucagccgcgugcugggccugaagacccucgccacccacgggcuggccgccgucaacuccgugcccugggacacgaucgccaacuacgcgaagccguuccugaacaagguggucagcaccaccaccaacaucgugacgcgcugccucaaccgggugugcaccaacuacaugcccuacuucuucacccugcugcuccagcugugcaccuucacccgcuccacgaacagccggaucaaggccuccaugcccaccaccaucgccaagaacaccgucaagagcgugggcaaguucugccuggaggccagcuucaacuaccucaagucccccaacuucagcaagcugaucaacaucaucaucugguuccugcuccuguccgugugccugggcagccucaucuacuccacggccgcgcuggggguccugaugagcaaccucggcaugccguccuacugcaccggguaccgcgagggcuaccugaacagcaccaacgugaccaucgccacguacugcaccggcuccauccccugcagcgugugccuguccgggcucgacagccuggacaccuaccccucccuggagaccauccagaucacgaucagcuccuucaagugggaccucaccgccuucggccuggucgccgagugguuccuggccuacauccucuucacccgguucuucuacgugcuggggcuggcggccaucaugcagcucuucuucagcuacuucgccgugcacuucaucuccaacagcuggcugauguggcugaucaucaaccugguccagauggcccccaucuccgcgauggugcgcauguacaucuucuucgccagcuucuacuacguguggaagagcuacguccacgugguggacggcugcaacuccagcaccugcaugaugugcuacaagcggaaccgcgccacgcgggucgagugcaccaccaucgugaacgggguccgccgguccuucuacguguacgccaacggcggcaagggguucugcaagcuccacaacuggaacugcgugaacugcgacaccuucugcgccggcagcacguucaucuccgacgaggucgcgcgcgaccugagccugcaguucaagcggccgaucaaccccaccgaccaguccagcuacaucguggacuccgugaccgucaagaacgggagcauccaccucuacuucgacaaggccggccagaagaccuacgagcgccacucccugagccacuucgugaaccuggacaaccuccgggccaacaacacgaaggggucccugcccaucaacgugaucgucuucgacggcaagagcaagugcgaggaguccagcgccaaguccgccagcguguacuacucccagcugaugugccagcccauccuccugcuggaccaggcgcucgugagcgacgucggcgacagcgccgagguggccgugcgcauguucgacgccuacgucaacaccuucuccagcaccuucaacgugccgauggagaagcugaagacccugguggccacggcggaggccgagcucgccaagaacgucucccuggacaacgugcugagcaccuucaucuccgccgcgcggcagggguucguggacagcgacgucgagaccaaggacgugguggagugccucaagcugucccaccagagcgacaucgaggucaccggcgacuccugcaacaacuacaugcugacguacaacaagguggagaacaugaccccccgcgaccucggggccugcaucgacugcagcgcccggcacaucaacgcccagguggccaagucccacaacaucgcgcugaucuggaacgucaaggacuucaugagccuguccgagcagcuccgcaagcagauccgcagcgccgccaagaagaacaaccugcccuucaagcugaccugcgccaccacgcggcagguggugaacgucgugaccaccaagaucgcccucaagggcggguga

SEQ ID NO: 17954 - RNA, 5841 nt, Artificial Sequence
  SARS-CoV-2__MT755884.1__non-structural protein 3 (NSP3) CDS gc
auggcccccaccaaggugaccuucggcgacgacacggucaucgaggugcagggguacaagagcgugaacaucaccuucgagcuggacgagcgcaucgacaagguccucaacgagaagugcuccgccuacaccguggagcugggcaccgaggugaacgaguucgcgugcgucguggccgacgccgugaucaagacgcugcagccggucagcgagcuccugaccccccuggggaucgaccucgacgagugguccauggccaccuacuaccuguucgacgagagcggcgaguucaagcuggccucccacauguacugcagcuucuacccccccgacgaggacgaggaggagggggacugcgaggaggaggaguucgagccguccacccaguacgaguacggcacggaggacgacuaccagggcaagccccucgaguucggggcgaccagcgccgcccugcagcccgaggaggagcaggaggaggacuggcuggacgacgacucccagcagaccgugggccagcaggacgggagcgaggacaaccagaccacgaccauccagaccaucguggagguccagccccagcucgagauggagcugaccccgguggugcagacgaucgaggucaacuccuucagcggcuaccugaagcucaccgacaacguguacaucaagaacgccgacaucguggaggaggcgaagaaggucaagcccaccgugguggucaacgccgccaacguguaccugaagcacgggggcggcguggccggggcccugaacaaggcgaccaacaacgccaugcaggucgaguccgacgacuacaucgccacgaacggcccccucaagguggggggcagcugcguccuguccggccacaaccuggccaagcacugccuccacgugguggggcccaacgucaacaagggcgaggacauccagcugcugaagagcgccuacgagaacuucaaccagcacgaggugcuccuggcgccgcugcucuccgccgggaucuucggcgccgaccccauccacagccugcgggugugcgucgacaccgugcgcaccaacguguaccuggccgucuucgacaagaaccucuacgacaagcugguguccagcuuccuggagaugaagagcgagaagcagguggagcagaagaucgccgagauccccaaggaggaggucaagcccuucaucaccgaguccaagccgagcguggagcagcggaagcaggacgacaagaagaucaaggcgugcguggaggaggucacgaccacccucgaggagaccaaguuccugacggagaaccugcuccuguacaucgacaucaacgggaaccugcaccccgacuccgccacccucgugagcgacaucgacaucaccuuccugaagaaggacgcccccuacaucgugggcgacgucgugcaggagggcgugcugaccgccgucgugauccccacgaagaaggccgggggcaccaccgagaugcucgcgaaggcccugcgcaaggugccgaccgacaacuacaucacgaccuaccccgggcagggccugaacggguacaccgucgaggaggccaagaccgugcucaagaagugcaaguccgccuucuacauccugcccagcaucaucuccaacgagaagcaggagauccugggcaccgugagcuggaaccuccgggagaugcuggcgcacgccgaggagacgcgcaagcugaugcccgucugcguggagaccaaggccaucguguccaccauccagcggaaguacaagggcaucaagauccaggagggggucguggacuacggcgcccgcuucuacuucuacaccagcaagacgaccguggccucccugaucaacacccucaacgaccugaacgagacccuggucacgaugccgcucggguacgugacccacggccugaaccuggaggaggcggcccgguacaugcgcagccucaaggugcccgccaccgucuccgugagcucccccgacgccgugaccgccuacaacggguaccugacgagcuccagcaagacccccgaggagcacuucaucgagaccaucucccuggcgggcagcuacaaggacuggagcuacuccggccagagcacccagcucgggaucgaguuccugaagcggggcgacaaguccgucuacuacacgagcaacccgaccaccuuccaccuggacggggaggugaucaccuucgacaaccucaagacgcugcugucccuccgcgaggugcggaccaucaaggucuucaccaccguggacaacaucaaccugcacacgcagguggucgacaugagcaugaccuacggccagcaguucggccccaccuaccuggacggggccgacgugaccaagaucaagccccacaacucccacgagggcaagacguucuacgugcucccgaacgacgacacccugcgcgucgaggccuucgaguacuaccacaccaccgaccccagcuuccuggggcgguacauguccgcccucaaccacacgaagaaguggaaguacccccaggugaacggccugaccagcaucaagugggccgggaacaacugcuaccuggcgaccgcccuccugacccugcagcagaucgagcucaaguucaaccccccggcccugcaggacgccuacuaccgcgcgcgggccggcgaggccgccaacuucugcgcccugauccucgcguacugcaacaagacggugggcgagcugggggacguccgcgagaccauguccuaccuguuccagcacgccaaccucgacagcugcaagcgggugcugaacgucgugugcaagaccugcggccagcagcagaccacccugaaggggguggaggccgucauguacaugggcacgcucuccuacgagcaguucaagaagggggugcagauccccugcaccugcggcaagcaggccaccaaguaccuggugcagcaggagagccccuucgucaugauguccgcccccccggcgcaguacgagcugaagcacggcaccuucacgugcgccagcgaguacaccgggaacuaccagugcggccacuacaagcacaucaccuccaaggagacccucuacugcaucgacggggcccugcugacgaagagcagcgaguacaagggccccaucaccgacguguucuacaaggagaacuccuacaccaccacgaucaagcccgugaccuacaagcucgacggggucgugugcaccgagaucgaccccaagcuggacaacuacuacaagaaggacaacagcuacuucaccgagcagccgaucgaccuggugcccaaccagcccuaccccaacgccuccuucgacaacuucaaguucgucugcgacaacaucaaguucgccgacgaccucaaccagcugacgggcuacaagaagccggcgagccgcgagcugaaggugaccuucuuccccgaccucaacggcgacguggucgccaucgacuacaagcacuacacccccuccuucaagaagggggccaagcugcugcacaagcccaucguguggcacgugaacaacgccaccaacaaggcgacguacaagccgaacaccuggugcauccggugccucuggagcaccaagcccgucgagaccuccaacagcuucgacgugcugaaguccgaggacgcccagggcauggacaaccuggccugcgaggaccucaagcccgugagcgaggaggucguggagaaccccacgauccagaaggacgugcuggagugcaacgucaagaccaccgagguggugggggacaucauccugaagccggccaacaacucccucaagaucaccgaggaggucggccacacggaccugauggccgcguacguggacaacagcucccugaccaucaagaagcccaacgagcucagccgcgugcuggggcugaagacccucgccacccacggccuggccgccgucaacuccgugcccugggacacgaucgccaacuacgcgaagccguuccugaacaagguggucagcaccaccaccaacaucgugacgcgcugccucaaccgggugugcaccaacuacaugcccuacuucuucacccugcugcuccagcugugcaccuucacccgcuccacgaacagccggaucaaggccuccaugcccaccaccaucgccaagaacaccgucaagagcgugggcaaguucugccuggaggccagcuucaacuaccucaagucccccaacuucagcaagcugaucaacaucaucaucugguuccugcuccuguccgugugccuggggagccucaucuacuccacggccgcgcugggcguccugaugagcaaccucgggaugccguccuacugcaccggcuaccgcgagggcuaccugaacagcaccaacgugaccaucgccacguacugcaccggguccauccccugcagcgugugccuguccggccucgacagccuggacaccuaccccucccuggagaccauccagaucacgaucagcuccuucaagugggaccucaccgccuucgggcuggucgccgagugguuccuggccuacauccucuucacccgguucuucuacgugcugggccuggcggccaucaugcagcucuucuucagcuacuucgccgugcacuucaucuccaacagcuggcugauguggcugaucaucaaccugguccagauggcccccaucuccgcgauggugcgcauguacaucuucuucgccagcuucuacuacguguggaagagcuacguccacgugguggacgggugcaacuccagcaccugcaugaugugcuacaagcggaaccgcgccacgcgggucgagugcaccaccaucgugaacggcguccgccgguccuucuacguguacgccaacggcgggaagggcuucugcaagcuccacaacuggaacugcgugaacugcgacaccuucugcgccgggagcacguucaucuccgacgaggucgcgcgcgaccugagccugcaguucaagcggccgaucaaccccaccgaccaguccagcuacaucguggacuccgugaccgucaagaacggcagcauccaccucuacuucgacaaggccgggcagaagaccuacgagcgccacucccugagccacuucgugaaccuggacaaccuccgggccaacaacacgaagggcucccugcccaucaacgugaucgucuucgacggcaagagcaagugcgaggaguccagcgccaaguccgccagcguguacuacucccagcugaugugccagcccauccuccugcuggaccaggcgcucgugagcgacgucggggacagcgccgagguggccgugaagauguucgacgccuacgucaacaccuucuccagcaccuucaacgugccgauggagaagcugaagacccugguggccacggcggaggccgagcucgccaagaacgucucccuggacaacgugcugagcaccuucaucuccgccgcgcgccagggcuucguggacagcgacgucgagaccaaggacgugguggagugccucaagcugucccaccagagcgacaucgaggucaccggggacuccugcaacaacuacaugcugacguacaacaagguggagaacaugaccccccgggaccucggcgccugcaucgacugcagcgcccgccacaucaacgcccagguggccaagucccacaacaucgcgcugaucuggaacgucaaggacuucaugagccuguccgagcagcuccggaagcagauccgcagcgccgccaagaagaacaaccugcccuucaagcugaccugcgccaccacgcgccagguggugaacgucgugaccaccaagaucgcccucaaggggggcuga

SEQ ID NO: 17955 - RNA, 5841 nt, Artificial Sequence
  SARS-CoV-2__MT755885.1__non-structural protein 3 (NSP3) CDS gc
auggcccccaccaaggugaccuucggcgacgacacggucaucgaggugcagggguacaagagcgugaacaucaccuucgagcuggacgagcgcaucgacaagguccucaacgagaagugcuccgccuacaccguggagcugggcaccgaggugaacgaguucgcgugcgucguggccgacgccgugaucaagacgcugcagccggucagcgagcuccugaccccccuggggaucgaccucgacgagugguccauggccaccuacuaccuguucgacgagagcggcgaguucaagcuggccucccacauguacugcagcuucuacccccccgacgaggacgaggaggagggggacugcgaggaggaggaguucgagccguccacccaguacgaguacggcacggaggacgacuaccagggcaagccccucgaguucggggcgaccagcgccgcccugcagcccgaggaggagcaggaggaggacuggcuggacgacgacucccagcagaccgugggccagcaggacgggagcgaggacaaccagaccacgaccauccagaccaucguggagguccagccccagcucgagauggagcugaccccgguggugcagacgaucgaggucaacuccuucagcggcuaccugaagcucaccgacaacguguacaucaagaacgccgacaucguggaggaggcgaagaaggucaagcccaccgugguggucaacgccgccaacguguaccugaagcacgggggcggcguggccggggcccugaacaaggcgaccaacaacgccaugcaggucgaguccgacgacuacaucgccacgaacggcccccucaagguggggggcagcugcguccuguccggccacaaccuggccaagcacugccuccacgugguggggcccaacgucaacaagggcgaggacauccagcugcugaagagcgccuacgagaacuucaaccagcacgaggugcuccuggcgccgcugcucuccgccgggaucuucggcgccgaccccauccacagccugcgggugugcgucgacaccgugcgcaccaacguguaccuggccgucuucgacaagaaccucuacgacaagcugguguccagcuuccuggagaugaagagcgagaagcagguggagcagaagaucgccgagauccccaaggaggaggucaagcccuucaucaccgaguccaagccgagcguggagcagcggaagcaggacgacaagaagaucaaggcgugcguggaggaggucacgaccacccucgaggagaccaaguuccugacggagaaccugcuccuguacaucgacaucaacgggaaccugcaccccgacuccgccacccucgugagcgacaucgacaucaccuuccugaagaaggacgcccccuacaucgugggcgacgucgugcaggagggcgugcugaccgccgucgugauccccacgaagaaggccgggggcaccaccgagaugcucgcgaaggcccugcgcaaggugccgaccgacaacuacaucacgaccuaccccgggcagggccugaacggguacaccgucgaggaggccaagaccgugcucaagaagugcaaguccgccuucuacauccugcccagcaucaucuccaacgagaagcaggagauccugggcaccgugagcuggaaccuccgggagaugcuggcgcacgccgaggagacgcgcaagcugaugcccgucugcguggagaccaaggccaucguguccaccauccagcggaaguacaagggcaucaagauccaggagggggucguggacuacggcgcccgcuucuacuucuacaccagcaagacgaccguggccucccugaucaacacccucaacgaccugaacgagacccuggucacgaugccgcucggguacgugacccacggccugaaccuggaggaggcggcccgguacaugcgcagccucaaggugcccgccaccgucuccgugagcucccccgacgccgugaccgccuacaacggguaccugacgagcuccagcaagacccccgaggagcacuucaucgagaccaucucccuggcgggcagcuacaaggacuggagcuacuccggccagagcacccagcucgggaucgaguuccugaagcggggcgacaaguccgucuacuacacgagcaacccgaccaccuuccaccuggacggggaggugaucaccuucgacaaccucaagacgcugcugucccuccgcgaggugcggaccaucaaggucuucaccaccguggacaacaucaaccugcacacgcagguggucgacaugagcaugaccuacggccagcaguucggccccaccuaccuggacggggccgacgugaccaagaucaagccccacaacucccacgagggcaagacguucuacgugcucccgaacgacgacacccugcgcgucgaggccuucgaguacuaccacaccaccgaccccagcuuccuggggcgguacauguccgcccucaaccacacgaagaaguggaaguacccccaggugaacggccugaccagcaucaagugggccgacaacaacugcuaccuggcgaccgcccuccugacccugcagcagaucgagcucaaguucaaccccccggcccugcaggacgccuacuaccgcgcgcgggccggggaggccgccaacuucugcgcccugauccucgcguacugcaacaagacggugggcgagcugggcgacguccgcgagaccauguccuaccuguuccagcacgccaaccucgacagcugcaagcgggugcugaacgucgugugcaagaccugcgggcagcagcagaccacccugaagggcguggaggccgucauguacauggggacgcucuccuacgagcaguucaagaagggcgugcagauccccugcaccugcgggaagcaggccaccaaguaccuggugcagcaggagagccccuucgucaugauguccgcccccccggcgcaguacgagcugaagcacggcaccuucacgugcgccagcgaguacaccggcaacuaccagugcgggcacuacaagcacaucaccuccaaggagacccucuacugcaucgacggcgcccugcugacgaagagcagcgaguacaaggggcccaucaccgacguguucuacaaggagaacuccuacaccaccacgaucaagcccgugaccuacaagcucgacggcgucgugugcaccgagaucgaccccaagcuggacaacuacuacaagaaggacaacagcuacuucaccgagcagccgaucgaccuggugcccaaccagcccuaccccaacgccuccuucgacaacuucaaguucgucugcgacaacaucaaguucgccgacgaccucaaccagcugacgggguacaagaagccggcgagccgcgagcugaaggugaccuucuuccccgaccucaacggcgacguggucgccaucgacuacaagcacuacacccccuccuucaagaagggcgccaagcugcugcacaagcccaucguguggcacgugaacaacgccaccaacaaggcgacguacaagccgaacaccuggugcauccggugccucuggagcaccaagcccgucgagaccuccaacagcuucgacgugcugaaguccgaggacgcccaggggauggacaaccuggccugcgaggaccucaagcccgugagcgaggaggucguggagaaccccacgauccagaaggacgugcuggagugcaacgucaagaccaccgagguggugggcgacaucauccugaagccggccaacaacucccucaagaucaccgaggaggucgggcacacggaccugauggccgcguacguggacaacagcucccugaccaucaagaagcccaacgagcucagccgcgugcugggccugaagacccucgccacccacgggcuggccgccgucaacuccgugcccugggacacgaucgccaacuacgcgaagccguuccugaacaagguggucagcaccaccaccaacaucgugacgcgcugccucaaccgggugugcaccaacuacaugcccuacuucuucacccugcugcuccagcugugcaccuucacccgcuccacgaacagccggaucaaggccuccaugcccaccaccaucgccaagaacaccgucaagagcgugggcaaguucugccuggaggccagcuucaacuaccucaagucccccaacuucagcaagcugaucaacaucaucaucugguuccugcuccuguccgugugccugggcagccucaucuacuccacggccgcgcuggggguccugaugagcaaccucggcaugccguccuacugcaccggguaccgcaagggcuaccugaacagcaccaacgugaccaucgccacguacugcaccggcuccauccccugcagcgugugccuguccgggcucgacagccuggacaccuaccccucccuggagaccauccagaucacgaucagcuccuucaagugggaccucaccgccuucggccuggucgccgagugguuccuggccuacauccucuucacccgguucuucuacgugcuggggcuggcggccaucaugcagcucuucuucagcuacuucgccgugcacuucaucuccaacagcuggcugauguggcugaucaucaaccugguccagauggcccccaucuccgcgauggugcgcauguacaucuucuucgccagcuucuacuacguguggaagagcuacguccacgugguggacggcugcaacuccagcaccugcaugaugugcuacaagcggaaccgcgccacgcgggucgagugcaccaccaucgugaacgggguccgccgguccuucuacguguacgccaacggcggcaagggguucugcaagcuccacaacuggaacugcgugaacugcgacaccuucugcgccggcagcacguucaucuccgacgaggucgcgcgcgaccugagccugcaguucaagcggccgaucaaccccaccgaccaguccagcuacaucguggacuccgugaccgucaagaacgggagcauccaccucuacuucgacaaggccggccagaagaccuacgagcgccacucccugagccacuucgugaaccuggacaaccuccgggccaacaacacgaaggggucccugcccaucaacgugaucgucuucgacggcaagagcaagugcgaggaguccagcgccaaguccgccagcguguacuacucccagcugaugugccagcccauccuccugcuggaccaggcgcucgugagcgacgucggcgacagcgccgagguggccgugaagauguucgacgccuacgucaacaccuucuccagcaccuucaacgugccgauggagaagcugaagacccugguggccacggcggaggccgagcucgccaagaacgucucccuggacaacgugcugagcaccuucaucuccgccgcgcgccagggguucguggacagcgacgucgagaccaaggacgugguggagugccucaagcugucccaccagagcgacaucgaggucaccggcgacuccugcaacaacuacaugcugacguacaacaagguggagaacaugaccccccgggaccucggggccugcaucgacugcagcgcccgccacaucaacgcccagguggccaagucccacaacaucgcgcugaucuggaacgucaaggacuucaugagccuguccgagcagcuccggaagcagauccgcagcgccgccaagaagaacaaccugcccuucaagcugaccugcgccaccacgcgccagguggugaacgucgugaccaccaagaucgcccucaagggcggguga

SEQ ID NO: 17956 - RNA, 5841 nt, Artificial Sequence
  SARS-CoV-2__MT755889.1__non-structural protein 3 (NSP3) CDS gc
auggcccccaccaaggugaccuucggcgacgacacggucaucgaggugcagggguacaagagcgugaacaucaccuucgagcuggacgagcgcaucgacaagguccucaacgagaagugcuccgccuacaccguggagcugggcaccgaggugaacgaguucgcgugcgucguggccgacgccgugaucaagacgcugcagccggucagcgagcuccugaccccccuggggaucgaccucgacgagugguccauggccaccuacuaccuguucgacgagagcggcgaguucaagcuggccucccacauguacugcagcuucuacccccccgacgaggacgaggaggagggggacugcgaggaggaggaguucgagccguccacccaguacgaguacggcacggaggacgacuaccagggcaagccccucgaguucggggcgaccagcgccgcccugcagcccgaggaggagcaggaggaggacuggcuggacgacgacucccagcagaccgugggccagcaggacgggagcgaggacaaccagaccacgaccauccagaccaucguggagguccagccccagcucgagauggagcugaccccgguggugcagacgaucgaggucaacuccuucagcggcuaccugaagcucaccgacaacguguacaucaagaacgccgacaucguggaggaggcgaagaaggucaagcccaccgugguggucaacgccgccaacguguaccugaagcacgggggcggcguggccggggcccugaacaaggcgaccaacaacgccaugcaggucgaguccgacgacuacaucgccacgaacggcccccucaagguggggggcagcugcguccuguccggccacaaccuggccaagcacugccuccacgugguggggcccaacgucaacaagggcgaggacauccagcugcugaagagcgccuacgagaacuucaaccagcacgaggugcuccuggcgccgcugcucuccgccgggaucuucggcgccgaccccauccacagccugcgggugugcgucgacaccgugcgcaccaacguguaccuggccgucuucgacaagaaccucuacgacaagcugguguccagcuuccuggagaugaagagcgagaagcagguggagcagaagaucgccgagauccccaaggaggaggucaagcccuucaucaccgaguccaagccgagcguggagcagcggaagcaggacgacaagaagaucaaggcgugcguggaggaggucacgaccacccucgaggagaccaaguuccugacggagaaccugcuccuguacaucgacaucaacgggaaccugcaccccgacuccgccacccucgugagcgacaucgacaucaccuuccugaagaaggacgcccccuacaucgugggcgacgucgugcaggagggcgugcugaccgccgucgugauccccacgaagaaggccgggggcaccaccgagaugcucgcgaaggcccugcgcaaggugccgaccgacaacuacaucacgaccuaccccgggcagggccugaacggguacaccgucgaggaggccaagaccgugcucaagaagugcaaguccgccuucuacauccugcccagcaucaucuccaacgagaagcaggagauccugggcaccgugagcuggaaccuccgggagaugcuggcgcacgccgaggagacgcgcaagcugaugcccgucugcguggagaccaaggccaucguguccaccauccagcggaaguacaagggcaucaagauccaggagggggucguggacuacggcgcccgcuucuacuucuacaccagcaagacgaccguggccucccugaucaacacccucaacgaccugaacgagacccuggucacgaugccgcucggguacgugacccacggccugaaccuggaggaggcggcccgguacaugcgcagccucaaggugcccgccaccgucuccgugagcucccccgacgccgugaccgccuacaacggguaccugacgagcuccagcaagacccccgaggagcacuucaucgagaccaucucccuggcgggcagcuacaaggacuggagcuacuccggccagagcacccagcucgggaucgaguuccugaagcggggcgacaaguccgucuacuacacgagcaacccgaccaccuuccaccuggacggggaggugaucaccuucgacaaccucaagacgcugcugucccuccgcgaggugcggaccaucaaggucuucaccaccguggacaacaucaaccugcacacgcagguggucgacaugagcaugaccuacggccagcaguucggccccaccuaccuggacggggccgacgugaccaagaucaagccccacaacucccacgagggcaagacguucuacgugcucccgaacgacgacacccugcgcgucgaggccuucgaguacuaccacaccaccgaccccagcuuccuggggcgguacauguccgcccucaaccacacgaagaaguggaaguacccccaggugaacggccugaccagcaucaagugggccgacaacaacugcuaccuggcgaccgcccuccugacccugcagcagaucgagcucaaguucaaccccccggcccugcaggacgccuacuaccgcgcgcgggccggggaggccgccaacuucugcgcccugauccucgcguacugcaacaagacggugggcgagcugggcgacguccgcgagaccauguccuaccuguuccagcacgccaaccucgacagcugcaagcgggugcugaacgucgugugcaagaccugcgggcagcagcagaccacccugaagggcguggaggccgucauguacauggggacgcucuccuacgagcaguucaagaagggcgugcagauccccugcaccugcgggaagcaggccaccaaguaccuggugcagcaggagagccccuucgucaugauguccgcccccccggcgcaguacgagcugaagcacggcaccuucacgugcgccagcgaguacaccggcaacuaccagugcgggcacuacaagcacaucaccuccaaggagacccucuacugcaucgacggcgcccugcugacgaagagcagcgaguacaaggggcccaucaccgacguguucuacaaggagaacuccuacaccaccacgaucaagcccgugaccuacaagcucgacggcgucgugugcaccgagaucgaccccaagcuggacaacuacuacaagaaggacaacagcuacuucaccgagcagccgaucgaccuggugcccaaccagcccuaccccaacgccuccuucgacaacuucaaguucgucugcgacaacaucaaguucgccgacgaccucaaccagcugacgggguacaagaagccggcgagccgcgagcugaaggugaccuucuuccccgaccucaacggcgacguggucgccaucgacuacaagcacuacacccccuccuucaagaagggcgccaagcugcugcacaagcccaucguguggcacgugaacaacgccaccaacaaggcgacguacaagccgaacaccuggugcauccggugccucuggagcaccaagcccgucgagaccuccaacagcuucgacgugcugaaguccgaggacgcccaggggauggacaaccuggccugcgaggaccucaagcccgugagcgaggaggucguggagaaccccacgauccagaaggacgugcuggagugcaacgucaagaccaccgagguggugggcgacaucauccugaagccggccaacaacucccucaagaucaccgaggaggucgggcacacggaccugauggccgcguacguggacaacagcucccugaccaucaagaagcccaacgagcucagccgcgugcugggccugaagacccucgccacccacgggcuggccgccgucaacuccgugcccugggacacgaucgccaacuacgcgaagccguuccugaacaagguggucagcaccaccaccaacaucgugacgcgcugccucaaccgggugugcaccaacuacaugcccuacuucuucacccugcugcuccagcugugcaccuucacccgcuccacgaacagccggaucaaggccuccaugcccaccaccaucgccaagaacaccgucaagagcgugggcaaguucugccuggaggccagcuucaacuaccucaagucccccaacuucagcaagcugaucaacaucaucaucugguuccugcuccuguccgugugccugggcagccucaucuacuccacggccgcgcuggggguccugaugagcaaccucggcaugccguccuacugcaccggguaccgcgagggcuaccugaacagcaccaacgugaccaucgccacguacugcaccggcuccauccccugcagcgugugccuguccgggcucgacagccuggacaccuaccccucccuggagaccauccagaucacgaucagcuccuucaagugggaccucaccgccuucggccuggucgccgagugguuccuggccuacauccucuucacccgguucuucuacgugcuggggcuggcggccaucaugcagcucuucuucagcuacuucgccgugcacuucaucuccaacagcuggcugauguggcugaucaucaaccugguccagaccgcccccaucuccgcgauggugcgcauguacaucuucuucgccagcuucuacuacguguggaagagcuacguccacgugguggacggcugcaacuccagcgccugcaugaugugcuacaagcggaaccgcgccacgcgggucgagugcaccaccaucgugaacgggguccgccgguccuucuacguguacgccaacggcggcaagggguucugcaagcuccacaacuggaacugcgugaacugcgacaccuucugcgcgggcagcacguucaucuccgacgaggucgcccgcgaccugagccugcaguucaagcggccgaucaaccccaccgaccaguccagcuacaucguggacuccgugaccgucaagaacgggagcauccaccucuacuucgacaaggccggccagaagaccuacgagcgccacucccugagccacuucgugaaccuggacaaccuccgggccaacaacacgaaggggucccugcccaucaacgugaucgucuucgacggcaagagcaagugcgaggaguccagcgccaaguccgcgagcguguacuacucccagcugaugugccagcccauccuccugcuggaccaggcccucgugagcgacgucggcgacagcgccgagguggccgugaagauguucgacgccuacgucaacaccuucuccagcaccuucaacgugccgauggagaagcugaagacccugguggcgacggccgaggccgagcucgccaagaacgucucccuggacaacgugcugagcaccuucaucuccgcggcccgccagggguucguggacagcgacgucgagaccaaggacgugguggagugccucaagcugucccaccagagcgacaucgaggucaccggcgacuccugcaacaacuacaugcugacguacaacaagguggagaacaugaccccccgggaccucggggccugcaucgacugcagcgcccgccacaucaacgcccagguggcgaagucccacaacaucgcccugaucuggaacgucaaggacuucaugagccuguccgagcagcuccggaagcagauccgcagcgccgccaagaagaacaaccugcccuucaagcugaccugcgccaccacgcgccagguggugaacgucgugaccaccaagaucgcgcucaagggcggguga

SEQ ID NO: 17957 - RNA, 5841 nt, Artificial Sequence
  SARS-CoV-2__MT755897.1__non-structural protein 3 (NSP3) CDS gc
auggcccccaccaaggugaccuucggcgacgacacggucaucgaggugcagggguacaagagcgugaacaucaccuucgagcuggacgagcgcaucgacaagguccucaacgagaagugcuccgccuacaccguggagcugggcaccgaggugaacgaguucgcgugcgucguggccgacgccgugaucaagacgcugcagccggucagcgagcuccugaccccccuggggaucgaccucgacgagugguccauggccaccuacuaccuguucgacgagagcggcgaguucaagcuggccucccacauguacugcagcuucuacccccccgacgaggacgaggaggagggggacugcgaggaggaggaguucgagccguccacccaguacgaguacggcacggaggacgacuaccagggcaagccccucgaguucggggcgaccagcgccgcccugcagcccgaggaggagcaggaggaggacuggcuggacgacgacucccagcagaccgugggccagcaggacgggagcgaggacaaccagaccacgaccauccagaccaucguggagguccagccccagcucgagauggagcugaccccgguggugcagacgaucgaggucaacuccuucagcggcuaccugaagcucaccgacaacguguacaucaagaacgccgacaucguggaggaggcgaagaaggucaagcccaccgugguggucaacgccgccaacguguaccugaagcacgggggcggcaucgccggggcccugaacaaggcgaccaacaacgccaugcagguggaguccgacgacuacaucgccacgaacggcccccucaaggucgggggcagcugcgugcuguccggccacaaccuggccaagcacugccuccacgucguggggcccaacgugaacaagggcgaggacauccagcugcugaagagcgccuacgagaacuucaaccagcacgagguccuccuggcgccgcugcucuccgccgggaucuucggcgccgaccccauccacagccugcgggugugcguggacaccguccgcaccaacguguaccuggccguguucgacaagaaccucuacgacaagcuggucuccagcuuccuggagaugaagagcgagaagcagguggagcagaagaucgccgagauccccaaggaggaggugaagcccuucaucaccgaguccaagccgagcgucgagcagcggaagcaggacgacaagaagaucaaggcgugcguggaggaggugacgaccacccucgaggagaccaaguuccugacggagaaccugcuccuguacaucgacaucaacgggaaccugcaccccgacuccgccacccucgucagcgacaucgacaucaccuuccugaagaaggacgcccccuacaucgugggcgacgugguccaggagggcgugcugaccgccguggucauccccacgaagaaggccgggggcaccaccgagaugcucgcgaaggcccugcgcaaggugccgaccgacaacuacaucacgaccuaccccgggcagggccugaacggguacaccguggaggaggccaagaccguccucaagaagugcaaguccgccuucuacauccugcccagcaucaucuccaacgagaagcaggagauccugggcaccgugagcuggaaccuccgggagaugcuggcgcacgccgaggagacgcgcaagcugaugcccgugugcgucgagaccaaggccaucguguccaccauccagcggaaguacaagggcaucaagauccaggaggggguggucgacuacggcgcccgcuucuacuucuacaccagcaagacgaccguggccucccugaucaacacccucaacgaccugaacgagacccuggugacgaugccgcucggguacgucacccacggccugaaccuggaggaggcggcccgguacaugcgcagccucaaggugcccgccaccguguccgucagcucccccgacgccgugaccgccuacaacggguaccugacgagcuccagcaagacccccgaggagcacuucaucgagaccaucucccuggcgggcagcuacaaggacuggagcuacuccggccagagcacccagcucgggaucgaguuccugaagcggggcgacaaguccguguacuacacgagcaacccgaccaccuuccaccuggacggggaggucaucaccuucgacaaccucaagacgcugcugucccuccgcgaggugcggaccaucaagguguucaccaccgucgacaacaucaaccugcacacgcaggugguggacaugagcaugaccuacggccagcaguucggccccaccuaccuggacggggccgacgucaccaagaucaagccccacaacucccacgagggcaagacguucuacgugcucccgaacgacgacacccugcgcguggaggccuucgaguacuaccacaccaccgaccccagcuuccuggggcgguacauguccgcccucaaccacacgaagaaguggaaguacccccaggucaacggccugaccagcaucaagugggccgacaacaacugcuaccuggcgaccgcccuccugacccugcagcagaucgagcucaaguucaaccccccggcccugcaggacgccuacuaccgcgcgcgggccggggaggccgccaacuucugcgcccugauccucgcguacugcaacaagacggugggcgagcugggcgacgugcgcgagaccauguccuaccuguuccagcacgccaaccucgacagcugcaagcggguccugaacguggucugcaagaccugcgggcagcagcagaccacccugaagggcguggaggccgugauguacauggggacgcucuccuacgagcaguucaagaagggcguccagauccccugcaccugcgggaagcaggccaccaaguaccuggugcagcaggagagccccuucgugaugauguccgcccccccggcgcaguacgagcugaagcacggcaccuucacgugcgccagcgaguacaccggcaacuaccagugcgggcacuacaagcacaucaccuccaaggagacccucuacugcaucgacggcgcccugcugacgaagagcagcgaguacaaggggcccaucaccgacgucuucuacaaggagaacuccuacaccaccacgaucaagcccgugaccuacaagcucgacggcguggucugcaccgagaucgaccccaagcuggacaacuacuacaagaaggacaacagcuacuucaccgagcagccgaucgaccuggugcccaaccagcccuaccccaacgccuccuucgacaacuucaaguucgugugcgacaacaucaaguucgccgacgaccucaaccagcugacgggguacaagaagccggcgagccgcgagcugaaggucaccuucuuccccgaccucaacggcgacgugguggccaucgacuacaagcacuacacccccuccuucaagaagggcgccaagcugcugcacaagcccaucgucuggcacgugaacaacgccaccaacaaggcgacguacaagccgaacaccuggugcauccggugccucuggagcaccaagcccguggagaccuccaacagcuucgacguccugaaguccgaggacgcccaggggauggacaaccuggccugcgaggaccucaagcccgugagcgaggagguggucgagaaccccacgauccagaaggacgugcuggagugcaacgugaagaccaccgaggucgugggcgacaucauccugaagccggccaacaacucccucaagaucaccgaggagguggggcacacggaccugauggccgcguacgucgacaacagcucccugaccaucaagaagcccaacgagcucagccgcgugcugggccugaagacccucgccacccacgggcuggccgccgugaacuccguccccugggacacgaucgccaacuacgcgaagccguuccugaacaagguggugagcaccaccaccaacaucgucacgcgcugccucaaccgggugugcaccaacuacaugcccuacuucuucacccugcugcuccagcugugcaccuucacccgcuccacgaacagccggaucaaggccuccaugcccaccaccaucgccaagaacaccgugaagagcgucggcaaguucugccuggaggccagcuucaacuaccucaagucccccaacuucagcaagcugaucaacaucaucaucugguuccugcuccuguccgugugccugggcagccucaucuacuccacggccgcgcugggggugcugaugagcaaccucggcaugccguccuacugcaccggguaccgcgagggcuaccugaacagcaccaacgucaccaucgccacguacugcaccggcuccauccccugcagcgugugccuguccgggcucgacagccuggacaccuaccccucccuggagaccauccagaucacgaucagcuccuucaagugggaccucaccgccuucggccugguggccgagugguuccuggccuacauccucuucacccgguucuucuacguccuggggcuggcggccaucaugcagcucuucuucagcuacuucgccgugcacuucaucuccaacagcuggcugauguggcugaucaucaaccuggugcagauggcccccaucuccgcgaugguccgcauguacaucuucuucgccagcuucuacuacguguggaagagcuacgugcacgucguggacggcugcaacuccagcaccugcaugaugugcuacaagcggaaccgcgccacgcggguggagugcaccaccaucgucaacggggugcgccgguccuucuacgucuacgccaacggcggcaagggguucugcaagcuccacaacuggaacugcgugaacugcgacaccuucugcgccggcagcacguucaucuccgacgagguggcgcgcgaccugagccugcaguucaagcggccgaucaaccccaccgaccaguccagcuacaucgucgacuccgugaccgugaagaacgggagcauccaccucuacuucgacaaggccggccagaagaccuacgagcgccacucccugagccacuucgucaaccuggacaaccuccgggccaacaacacgaaggggucccugcccaucaacgugaucguguucgacggcaagagcaagugcgaggaguccagcgccaaguccgccagcgucuacuacucccagcugaugugccagcccauccuccugcuggaccaggcgcucgugagcgacgugggcgacagcgccgaggucgccgugaagauguucgacgccuacgugaacaccuucuccagcaccuucaacgucccgauggagaagcugaagacccugguggccacggcggaggccgagcucgccaagaacgugucccuggacaacguccugagcaccuucaucuccgccgcgcgccagggguucguggacagcgacguggagaccaaggacgucguggagugccucaagcugucccaccagagcgacaucgaggugaccggcgacuccugcaacaacuacaugcugacguacaacaaggucgagaacaugaccccccgggaccucggggccugcaucgacugcagcgcccgccacaucaacgcccagguggccaagucccacaacaucgcgcugaucuggaacgugaaggacuucaugagccuguccgagcagcuccggaagcagauccgcagcgccgccaagaagaacaaccugcccuucaagcugaccugcgccaccacgcgccaggucgugaacguggucaccaccaagaucgcccucaagggcggguga

SEQ ID NO: 17958 - RNA, 5841 nt, Artificial Sequence
  SARS-CoV-2__MT755898.1__non-structural protein 3 (NSP3) CDS gc
auggcccccaccaaggugaccuucggcgacgacacggucaucgaggugcagggguacaagagcgugaacaucaccuucgagcuggacgagcgcaucgacaagguccucaacgagaagugcuccgccuacaccguggagcugggcaccgaggugaacgaguucgcgugcgucguggccgacgccgugaucaagacgcugcagccggucagcgagcuccugaccccccuggggaucgaccucgacgagugguccauggccaccuacuaccuguucgacgagagcggcgaguucaagcuggccucccacauguacugcagcuucuacccccccgacgaggacgaggaggagggggacugcgaggaggaggaguucgagccguccacccaguacgaguacggcacggaggacgacuaccagggcaagccccucgaguucggggcgaccagcgccgcccugcagcccgaggaggagcaggaggaggacuggcuggacgacgacucccagcagaccgugggccagcaggacgggagcgaggacaaccagaccacgaccauccagaccaucguggagguccagccccagcucgagauggagcugaccccgguggugcagacgaucgaggucaacuccuucagcggcuaccugaagcucaccgacaacguguacaucaagaacgccgacaucguggaggaggcgaagaaggucaagcccaccgugguggucaacgccgccaacguguaccugaagcacgggggcggcguggccggggcccugaacaaggcgaccaacaacgccaugcaggucgaguccgacgacuacaucgccacgaacggcccccucaagguggggggcagcugcguccuguccggccacaaccuggccaagcacugccuccacgugguggggcccaacgucaacaagggcgaggacauccagcugcugaagagcgccuacgagaacuucaaccagcacgaggugcuccuggcgccgcugcucuccgccgggaucuucggcgccgaccccauccacagccugcgggugugcgucgacaccgugcgcaccaacguguaccuggccgucuucgacaagaaccucuacgacaagcugguguccagcuuccuggagaugaagagcgagaagcagguggagcagaagaucgccgagauccccaaggaggaggucaagcccuucaucaccgaguccaagccgagcguggagcagcggaagcaggacgacaagaagaucaaggcgugcguggaggaggucacgaccacccucgaggagaccaaguuccugacggagaaccugcuccuguacaucgacaucaacgggaaccugcaccccgacuccgccacccucgugagcgacaucgacaucaccuuccugaagaaggacgcccccuacaucgugggcgacgucgugcaggagggcgugcugaccgccgucgugauccccacgaagaaggccgggggcaccaccgagaugcucgcgaaggcccugcgcaaggugccgaccgacaacuacaucacgaccuaccccgggcagggccugaacggguacaccgucgaggaggccaagaccgugcucaagaagugcaaguccgccuucuacauccugcccagcaucaucuccaacgagaagcaggagauccugggcaccgugagcuggaaccuccgggagaugcuggcgcacgccgaggagacgcgcaagcugaugcccgucugcguggagaccaaggccaucguguccaccauccagcggaaguacaagggcaucaagauccaggagggggucguggacuacggcgcccgcuucuacuucuacaccagcaagacgaccguggccucccugaucaacacccucaacgaccugaacgagacccuggucacgaugccgcucggguacgugacccacggccugaaccuggaggaggcggcccgguacaugcgcagccucaaggugcccgccaccgucuccgugagcucccccgacgccgugaccgccuacaacggguaccugacgagcuccagcaagacccccgaggagcacuucaucgagaccaucucccuggcgggcagcuacaaggacuggagcuacuccggccagagcacccagcucgggaucgaguuccugaagcggggcgacaaguccgucuacuacacgagcaacccgaccaccuuccaccuggacggggaggugaucaccuucgacaaccucaagacgcugcugucccuccgcgaggugcggaccaucaaggucuucaccaccguggacaacaucaaccugcacacgcagguggucgacaugagcaugaccuacggccagcaguucggccccaccuaccuggacggggccgacgugaccaagaucaagccccacaacucccacgagggcaagacguucuacgugcucccgaacgacgacacccugcgcgucgaggccuucgaguacuaccacaccaccgaccccagcuuccuggggcgguacauguccgcccucaaccacacgaagaaguggaaguacccccaggugaacggccugaccagcaucaagugggccgacaacaacugcuaccuggcgaccgcccuccugacccugcagcagaucgagcucaaguucaaccccccggcccugcaggacgccuacuaccgcgcgcgggccggggaggccgccaacuucugcgcccugauccucgcguacugcaacaagacggugggcgagcugggcgacguccgcgagaccauguccuaccuguuccagcacgccaaccucgacagcugcaagcgggugcugaacgucgugugcaagaccugcgggcagcagcagaccacccugaagggcguggaggccgucauguacauggggacgcucuccuacgagcaguucaagaagggcgugcagauccccugcaccugcgggaagcaggccaccaaguaccuggugcagcaggagagccccuucgucaugauguccgcccccccggugcaguacgagcugaagcacggcaccuucacgugcgcgagcgaguacaccggcaacuaccagugcgggcacuacaagcacaucaccuccaaggagacccucuacugcaucgacggcgcccugcugacgaagagcagcgaguacaaggggcccaucaccgacguguucuacaaggagaacuccuacaccaccacgaucaagcccgucaccuacaagcucgacggcguggugugcaccgagaucgaccccaagcuggacaacuacuacaagaaggacaacagcuacuucaccgagcagccgaucgaccugguccccaaccagcccuaccccaacgccuccuucgacaacuucaaguucgugugcgacaacaucaaguucgccgacgaccucaaccagcugacgggguacaagaagccggccagccgcgagcugaaggugaccuucuuccccgaccucaacggcgacgucguggcgaucgacuacaagcacuacacccccuccuucaagaagggcgccaagcugcugcacaagcccaucguguggcacgucaacaacgccaccaacaaggccacguacaagccgaacaccuggugcauccggugccucuggagcaccaagcccguggagaccuccaacagcuucgacgugcugaaguccgaggacgcgcaggggauggacaaccuggccugcgaggaccucaagcccgucagcgaggaggugguggagaaccccacgauccagaaggacguccuggagugcaacgugaagaccaccgagguggucggcgacaucauccugaagccggccaacaacucccucaagaucaccgaggagguggggcacacggaccugauggccgccuacguggacaacagcucccugaccaucaagaagcccaacgagcucagccgcguccugggccugaagacccucgcgacccacgggcuggccgccgugaacuccgugcccugggacacgaucgccaacuacgccaagccguuccugaacaaggucgugagcaccaccaccaacaucgugacgcgcugccucaaccgggucugcaccaacuacaugcccuacuucuucacccugcugcuccagcugugcaccuucacccgcuccacgaacagccggaucaaggcguccaugcccaccaccaucgccaagaacaccgugaagagcgugggcaaguucugccuggaggccagcuucaacuaccucaagucccccaacuucagcaagcugaucaacaucaucaucugguuccugcuccuguccgucugccugggcagccucaucuacuccacggccgcccugggggugcugaugagcaaccucggcaugccguccuacugcaccggguaccgcgagggcuaccugaacagcaccaacgugaccaucgcgacguacugcaccggcuccauccccugcagcgucugccuguccgggcucgacagccuggacaccuaccccucccuggagaccauccagaucacgaucagcuccuucaagugggaccucaccgccuucggccugguggccgagugguuccuggccuacauccucuucacccgguucuucuacgugcuggggcuggccgcgaucaugcagcucuucuucagcuacuucgccguccacuucaucuccaacagcuggcugauguggcugaucaucaaccuggugcagauggcccccaucuccgccauggugcgcauguacaucuucuucgcgagcuucuacuacgucuggaagagcuacgugcacguggucgacggcugcaacuccagcaccugcaugaugugcuacaagcggaaccgcgccacgcggguggagugcaccaccaucgucaacggggugcgccgguccuucuacguguacgccaacggcggcaagggguucugcaagcuccacaacuggaacugcgucaacugcgacaccuucugcgccggcagcacguucaucuccgacgagguggcccgcgaccugagccugcaguucaagcggccgaucaaccccaccgaccaguccagcuacaucguggacuccgucaccgugaagaacgggagcauccaccucuacuucgacaaggcgggccagaagaccuacgagcgccacucccugagccacuucgugaaccuggacaaccuccgggccaacaacacgaaggggucccugcccaucaacgucaucguguucgacggcaagagcaagugcgaggaguccagcgccaaguccgccagcguguacuacucccagcugaugugccagcccauccuccugcuggaccaggcccucgucagcgacgugggcgacagcgcggagguggccgucaagauguucgacgccuacgugaacaccuucuccagcaccuucaacgugccgauggagaagcugaagacccuggucgccacggccgaggcggagcucgccaagaacgugucccuggacaacgugcugagcaccuucaucuccgccgcccgccagggguucgucgacagcgacguggagaccaaggacguggucgagugccucaagcugucccaccagagcgacaucgaggugaccggcgacuccugcaacaacuacaugcugacguacaacaagguggagaacaugaccccccgggaccucggggcgugcaucgacugcagcgcccgccacaucaacgcccaggucgccaagucccacaacaucgcccugaucuggaacgugaaggacuucaugagccuguccgagcagcuccggaagcagauccgcagcgcggccaagaagaacaaccugcccuucaagcugaccugcgccaccacgcgccagguggucaacguggugaccaccaagaucgcccucaagggcggguga

SEQ ID NO: 17959 - RNA, 5841 nt, Artificial Sequence
  SARS-CoV-2__MT755916.1__non-structural protein 3 (NSP3) CDS gc
auggcccccaccaaggugaccuucggcgacgacacggucaucgaggugcagggguacaagagcgugaacaucaccuucgagcuggacgagcgcaucgacaagguccucaacgagaagugcuccgccuacaccguggagcugggcaccgaggugaacgaguucgcgugcgucguggccgacgccgugaucaagacgcugcagccggucagcgagcuccugaccccccuggggaucgaccucgacgagugguccauggccaccuacuaccuguucgacgagagcggcgaguucaagcuggccucccacauguacugcagcuucuacccccccgacgaggacgaggaggagggggacugcgaggaggaggaguucgagccguccacccaguacgaguacggcacggaggacgacuaccagggcaagccccucgaguucggggcgaccagcgccgcccugcagcccgaggaggagcaggaggaggacuggcuggacgacgacucccagcagaccgugggccagcaggacgggagcgaggacaaccagaccacgaccauccagaccaucguggagguccagccccagcucgagauggagcugaccccgguggugcagacgaucgaggucaacuccuucagcggcuaccugaagcucaccgacaacguguacaucaagaacgccgacaucguggaggaggcgaagaaggucaagcccaccgugguggucaacgccgccaacguguaccugaagcacgggggcggcguggccggggcccugaacaaggcgaccaacaacgccaugcaggucgaguccgacgacuacaucgccacgaacggcccccucaagguggggggcagcugcguccuguccggccacaaccuggccaagcacugccuccacgugguggggcccaacgucaacaagggcgaggacauccagcugcugaagagcgccuacgagaacuucaaccagcacgaggugcuccuggcgccgcugcucuccgccgggaucuucggcgccgaccccauccacagccugcgggugugcgucgacaccgugcgcaccaacguguaccuggccgucuucgacaagaaccucuacgacaagcugguguccagcuuccuggagaugaagagcgagaagcagguggagcagaagaucgccgagauccccaaggaggaggucaagcccuucaucaccgaguccaagccgagcguggagcagcggaagcaggacgacaagaagaucaaggcgugcguggaggaggucacgaccacccucgaggagaccaaguuccugacggagaaccugcuccuguacaucgacaucaacgggaaccugcaccccgacuccgccacccucgugagcgacaucgacaucaccuuccugaagaaggacgcccccuacaucgugggcgacgucgugcaggagggcgugcugaccgccgucgugauccccacgaagaaggccgggggcaccaccgagaugcucgcgaaggcccugcgcaaggugccgaccgacaacuacaucacgaccuaccccgggcagggccugaacggguacaccgucgaggaggccaagaccgugcucaagaagugcaaguccgccuucuacauccugcccagcaucaucuccaacgagaagcaggagauccugggcaccgugagcuggaaccuccgggagaugcuggcgcacgccgaggagacgcgcaagcugaugcccgucugcguggagaccaaggccaucguguccaccauccagcggaaguacaagggcaucaagauccaggagggggucguggacuacggcgcccgcuucuacuucuacaccagcaagacgaccguggccucccugaucaacacccucaacgaccugaacgagacccuggucacgaugccgcucggguacgugacccacggccugaaccuggaggaggcggcccgguacaugcgcagccucaaggugcccgccaccgucuccgugagcucccccgacgccgugaccgccuacaacggguaccugacgagcuccagcaagacccccgaggagcacuucaucgagaccaucucccuggcgggcagcuacaaggacuggagcuacuccggccagagcacccagcucgggaucgaguuccugaagcggggcgacaaguccgucuacuacacgagcaacccgaccaccuuccaccuggacggggaggugaucaccuucgacaaccucaagacgcugcugucccuccgcgaggugcggaccaucaaggucuucaccaccguggacaacaucaaccugcacacgcagguggucgacaugagcaugaccuacggccagcaguucggccccaccuaccuggacggggccgacgugaccaagaucaagccccacaacucccacgagggcaagacguucuacgugcucccgaacgacgacacccugcgcgucgaggccuucgaguacuaccacaccaccgaccccagcuuccuggggcgguacauguccgcccucaaccacacgaagaaguggaaguacccccaggugaacggccugaccagcaucaagugggccgacaacaacugcuaccuggcgaccgcccuccugacccugcagcagaucgagcuccgcuucaaccccccggcccugcaggacgccuacuaccgggcgcgcgccggggaggccgccaacuucugcgcccugauccucgcguacugcaacaagacggugggcgagcugggcgacguccgggagaccauguccuaccuguuccagcacgccaaccucgacagcugcaagcgcgugcugaacgucgugugcaagaccugcgggcagcagcagaccacccugaagggcguggaggccgucauguacauggggacgcucuccuacgagcaguucaagaagggcgugcagauccccugcaccugcgggaagcaggccaccaaguaccuggugcagcaggagagccccuucgucaugauguccgcccccccggcgcaguacgagcugaagcacggcaccuucacgugcgccagcgaguacaccggcaacuaccagugcgggcacuacaagcacaucaccuccaaggagacccucuacugcaucgacggcgcccugcugacgaagagcagcgaguacaaggggcccaucaccgacguguucuacaaggagaacuccuacaccaccacgaucaagcccgugaccuacaagcucgacggcgucgugugcaccgagaucgaccccaagcuggacaacuacuacaagaaggacaacagcuacuucaccgagcagccgaucgaccuggugcccaaccagcccuaccccaacgccuccuucgacaacuucaaguucgucugcgacaacaucaaguucgccgacgaccucaaccagcugacgggguacaagaagccggcgagccgggagcugaaggugaccuucuuccccgaccucaacggcgacguggucgccaucgacuacaagcacuacacccccuccuucaagaagggcgccaagcugcugcacaagcccaucguguggcacgugaacaacgccaccaacaaggcgacguacaagccgaacaccuggugcauccgcugccucuggagcaccaagcccgucgagaccuccaacagcuucgacgugcugaaguccgaggacgcccaggggauggacaaccuggccugcgaggaccucaagcccgugagcgaggaggucguggagaaccccacgauccagaaggacgugcuggagugcaacgucaagaccaccgagguggugggcgacaucauccugaagccggccaacaacucccucaagaucaccgaggaggucgggcacacggaccugauggccgcguacguggacaacagcucccugaccaucaagaagcccaacgagcucagccgcgugcugggccugaagacccucgccacccacgggcuggccgccgucaacuccgugcccugggacacgaucgccaacuacgcgaagccguuccugaacaagguggucagcaccaccaccaacaucgugacgcggugccucaaccgcgugugcaccaacuacaugcccuacuucuucacccugcugcuccagcugugcaccuucacccgguccacgaacagccgcaucaaggccuccaugcccaccaccaucgccaagaacaccgucaagagcgugggcaaguucugccuggaggccagcuucaacuaccucaagucccccaacuucagcaagcugaucaacaucaucaucugguuccugcuccuguccgugugccugggcagccucaucuacuccacggccgcgcuggggguccugaugagcaaccucggcaugccguccuacugcaccggguaccgggagggcuaccugaacagcaccaacgugaccaucgccacguacugcaccggcuccauccccugcagcgugugccuguccgggcucgacagccuggacaccuaccccucccuggagaccauccagaucacgaucagcuccuucaagugggaccucaccgccuucggccuggucgccgagugguuccuggccuacauccucuucacccgcuucuucuacgugcuggggcuggcggccaucaugcagcucuucuucagcuacuucgccgugcacuucaucuccaacagcuggcugauguggcugaucaucaaccugguccagauggcccccaucuccgcgauggugcggauguacaucuucuucgccagcuucuacuacguguggaagagcuacguccacgugguggacggcugcaacuccagcaccugcaugaugugcuacaagcgcaaccgggccacgcgcgucgagugcaccaccaucgugaacgggguccggcgcuccuucuacguguacgccaacggcggcaagggguucugcaagcuccacaacuggaacugcgugaacugcgacaccuucugcgccggcagcacguucaucuccgacgaggucgcgcgggaccugagccugcaguucaagcgcccgaucaaccccaccgaccaguccagcuacaucguggacuccgugaccgucaagaacgggagcauccaccucuacuucgacaaggccggccagaagaccuacgagcggcacucccugagccacuucgugaaccuggacaaccuccgcgccaacaacacgaaggggucccugcccaucaacgugaucgucuucgacggcaagagcaagugcgaggaguccagcgccaaguccgccagcguguacuacucccagcugaugugccagcccauccuccugcuggaccaggcgcucgugagcgacgucggcgacagcgccgagguggccgugaagauguucgacgccuacgucaacaccuucuccagcaccuucaacgugccgauggagaagcugaagacccugguggccacggcggaggccgagcucgccaagaacgucucccuggacaacgugcugagcaccuucaucuccgccgcgcggcagggguucguggacagcgacgucgagaccaaggacgugguggagugccucaagcugucccaccagagcgacaucgaggucaccggcgacuccugcaacaacuacaugcugacguacaacaagguggagaacaugaccccccgcgaccucggggccugcaucgacugcagcgcccggcacaucaacgcccacguggccaagucccacaacaucgcgcugaucuggaacgucaaggacuucaugagccuguccgagcagcuccgcaagcagauccgcagcgccgccaagaagaacaaccugcccuucaagcugaccugcgccaccacgcggcagguggugaacgucgugaccaccaagaucgcccucaagggcggguga

SEQ ID NO: 17960 - RNA, 5841 nt, Artificial Sequence
  SARS-CoV-2__MT757029.1__non-structural protein 3 (NSP3) CDS gc
auggcccccaccaaggugaccuucggcgacgacacggucaucgaggugcagggguacaagagcgugaacaucaccuucgagcuggacgagcgcaucgacaagguccucaacgagaagugcuccgccuacaccguggagcugggcaccgaggugaacgaguucgcgugcgucguggccgacgccgugaucaagacgcugcagccggucagcgagcuccugaccccccuggggaucgaccucgacgagugguccauggccaccuacuaccuguucgacgagagcggcgaguucaagcuggccucccacauguacugcagcuucuacccccccgacgaggacgaggaggagggggacugcgaggaggaggaguucgagccguccacccaguacgaguacggcacggaggacgacuaccagggcaagccccucgaguucggggcgaccagcgccgcccugcagcuggaggaggagcaggaggaggacuggcucgacgacgacucccagcagaccgugggccagcaggacgggagcgaggacaaccagaccacgaccauccagaccaucguggagguccagccccagcuggagauggagcugacccccguggugcagacgaucgaggucaacuccuucagcggcuaccucaagcugaccgacaacguguacaucaagaacgccgacaucguggaggaggcgaagaaggucaagccgaccgugguggucaacgccgccaacguguaccugaagcacgggggcggcguggccggggcccucaacaaggcgaccaacaacgccaugcaggucgaguccgacgacuacaucgccacgaacggcccccugaagguggggggcagcugcguccuguccggccacaaccucgccaagcacugccugcacgugguggggcccaacgucaacaagggcgaggacauccagcugcucaagagcgccuacgagaacuucaaccagcacgaggugcugcuggcgccccuccuguccgccgggaucuucggcgccgacccgauccacagccugcgggugugcgucgacaccgugcgcaccaacguguaccucgccgucuucgacaagaaccuguacgacaagcugguguccagcuuccucgagaugaagagcgagaagcagguggagcagaagaucgccgagauccccaaggaggaggucaagcccuucaucaccgaguccaagcccagcguggagcagcggaagcaggacgacaagaagaucaaggcgugcguggaggaggucacgaccacccuggaggagaccaaguuccugacggagaaccuccugcuguacaucgacaucaacgggaaccuccacccggacuccgccacccuggugagcgacaucgacaucaccuuccugaagaaggacgcccccuacaucgugggcgacgucgugcaggagggcgugcucaccgccgucgugauccccacgaagaaggccgggggcaccaccgagaugcuggcgaaggcccugcgcaaggugcccaccgacaacuacaucacgaccuacccggggcagggccucaacggguacaccgucgaggaggccaagaccgugcugaagaagugcaaguccgccuucuacauccugcccagcaucaucuccaacgagaagcaggagauccucggcaccgugagcuggaaccugcgggagaugcuggcgcacgccgaggagacgcgcaagcugaugcccgucugcguggagaccaaggccaucguguccaccauccagcggaaguacaagggcaucaagauccaggagggggucguggacuacggcgcccgcuucuacuucuacaccagcaagacgaccguggccucccucaucaacacccugaacgaccugaacgagacccucgucacgaugccccugggguacgugacccacggccugaaccucgaggaggcggcccgguacaugcgcagccugaaggugccggccaccgucuccgugagcucccccgacgccgugaccgccuacaacggguaccugacgagcuccagcaagacccccgaggagcacuucaucgagaccaucucccucgcgggcagcuacaaggacuggagcuacuccggccagagcacccagcuggggaucgaguuccugaagcggggcgacaaguccgucuacuacacgagcaaccccaccaccuuccaccucgacggggaggugaucaccuucgacaaccugaagacgcugcucucccugcgcgaggugcggaccaucaaggucuucaccaccguggacaacaucaaccugcacacgcagguggucgacaugagcaugaccuacggccagcaguucggccucaccuaccuggacggggccgacgugaccaagaucaagccgcacaacucccacgagggcaagacguucuacgugcugcccaacgacgacacccuccgcgucgaggccuucgaguacuaccacaccaccgaccccagcuuccuggggcgguacauguccgcccugaaccacacgaagaaguggaaguacccgcaggugaacggccucaccagcaucaagugggccgacaacaacugcuaccuggcgaccgcccugcucacccugcagcagaucgagcugaaguucaacccccccgcccuccaggacgccuacuaccgcgcgcgggccggggaggccgccaacuucugcgcccugauccuggcguacugcaacaagacggugggcgagcucggcgacguccgcgagaccauguccuaccuguuccagcacgccaaccuggacagcugcaagcgggugcucaacgucgugugcaagaccugcgggcagcagcagaccacccugaagggcguggaggccgucauguacauggggacgcuguccuacgagcaguucaagaagggcgugcagauccccugcaccugcgggaagcaggccaccaaguaccucgugcagcaggagagcccguucgucaugauguccgccccccccgcgcaguacgagcugaagcacggcaccuucacgugcgccagcgaguacaccggcaacuaccagugcgggcacuacaagcacaucaccuccaaggagacccuguacugcaucgacggcgcccuccugacgaagagcagcgaguacaaggggcccaucaccgacguguucuacaaggagaacuccuacaccaccacgaucaagccggugaccuacaagcuggacggcgucgugugcaccgagaucgaccccaagcucgacaacuacuacaagaaggacaacagcuacuucaccgagcagcccaucgaccuggugcccaaccagccguaccccaacgccuccuucgacaacuucaaguucgucugcgacaacaucaaguucgccgacgaccugaaccagcucacgggguacaagaagcccgcgagccgcgagcugaaggugaccuucuuccccgaccugaacggcgacguggucgccaucgacuacaagcacuacaccccguccuucaagaagggcgccaagcuccugcacaagcccaucguguggcacgugaacaacgccaccaacaaggcgacguacaagcccaacaccuggugcauccggugccuguggagcaccaagcccgucgagaccuccaacagcuucgacgugcucaaguccgaggacgcccaggggauggacaaccuggccugcgaggaccugaagccggugagcgaggaggucguggagaaccccacgauccagaaggacgugcucgagugcaacgucaagaccaccgagguggugggcgacaucauccugaagcccgccaacaacucccugaagaucaccgaggaggucgggcacacggaccucauggccgcguacguggacaacagcucccugaccaucaagaagcccaacgagcugagccgcgugcucggccugaagacccuggccacccacgggcucgccgccgucaacuccgugccgugggacacgaucgccaacuacgcgaagcccuuccugaacaagguggucagcaccaccaccaacaucgugacgcgcugccugaaccgggugugcaccaacuacaugcccuacuucuucacccuccugcugcagcucugcaccuucacccgcuccacgaacagccggaucaaggccuccaugccgaccaccaucgccaagaacaccgucaagagcgugggcaaguucugccuggaggccagcuucaacuaccugaagucccccaacuucagcaagcucaucaacaucaucaucugguuccugcugcucuccgugugccugggcagccugaucuacuccacggccgcgcucgggguccugaugagcaaccugggcaugcccuccuacugcaccggguaccgcgagggcuaccucaacagcaccaacgugaccaucgccacguacugcaccggcuccauccccugcagcgugugccuguccgggcuggacagccucgacaccuacccgucccuggagaccauccagaucacgaucagcuccuucaagugggaccugaccgccuucggccucgucgccgagugguuccuggccuacauccuguucacccgguucuucuacgugcucgggcuggcggccaucaugcagcuguucuucagcuacuucgccgugcacuucaucuccaacagcuggcugauguggcucaucaucaaccugguccagauggcccccaucuccgcgauggugcgcauguacaucuucuucgccagcuucuacuacguguggaagagcuacguccacgugguggacggcugcaacuccagcaccugcaugaugugcuacaagcggaaccgcgccacgcgggucgagugcaccaccaucgugaacgggguccgccgguccuucuacguguacgccaacggcggcaagggguucugcaagcugcacaacuggaacugcgugaacugcgacaccuucugcgccggcagcacguucaucuccgacgaggucgcgcgcgaccucagccugcaguucaagcggcccaucaaccccaccgaccaguccagcuacaucguggacuccgugaccgucaagaacgggagcauccaccuguacuucgacaaggccggccagaagaccuacgagcgccacucccucagccacuucgugaaccuggacaaccugcgggccaacaacacgaaggggucccucccgaucaacgugaucgucuucgacggcaagagcaagugcgaggaguccagcgccaaguccgccagcguguacuacucccagcugaugugccagcccauccugcuccuggaccaggcgcuggugagcgacgucggcgacagcgccgagguggccgugaagauguucgacgccuacgucaacaccuucuccagcaccuucaacgugcccauggagaagcucaagacccugguggccacggcggaggccgagcuggccaagaacgucucccucgacaacgugcugagcaccuucaucuccgccgcgcgccagggguucguggacagcgacgucgagaccaaggacgugguggagugccugaagcucucccaccagagcgacaucgaggucaccggcgacuccugcaacaacuacaugcugacguacaacaagguggagaacaugaccccccgggaccugggggccugcaucgacugcagcgcccgccacaucaacgcccagguggccaagucccacaacaucgcgcucaucuggaacgucaaggacuucaugagccuguccgagcagcugcggaagcagauccgcagcgccgccaagaagaacaaccucccguucaagcugaccugcgccaccacgcgccagguggugaacgucgugaccaccaagaucgcccugaagggcggguga

SEQ ID NO: 17961 - RNA, 5841 nt, Artificial Sequence
  SARS-CoV-2__MT757047.1__non-structural protein 3 (NSP3) CDS gc
auggcccccaccaaggugaccuucggcgacgacacggucaucgaggugcagggguacaagagcgugaacaucaccuucgagcuggacgagcgcaucgacaagguccucaacgagaagugcuccgccuacaccguggagcugggcaccgaggugaacgaguucgcgugcgucguggccgacgccgugaucaagacgcugcagccggucagcgagcuccugaccccccuggggaucgaccucgacgagugguccauggccaccuacuaccuguucgacgagagcggcgaguucaagcuggccucccacauguacugcagcuucuacccccccgacgaggacgaggaggagggggacugcgaggaggaggaguucgagccguccacccaguacgaguacggcacggaggacgacuaccagggcaagccccucgaguucggggcgaccagcgccgcccugcagcuggaggaggagcaggaggaggacuggcucgacgacgacucccagcagaccgugggccagcaggacgggagcgaggacaaccagaccacgaccauccagaccaucguggagguccagccccagcuggagauggagcugacccccguggugcagacgaucgaggucaacuccuucagcggcuaccucaagcugaccgacaacguguacaucaagaacgccgacaucguggaggaggcgaagaaggucaagccgaccgugguggucaacgccgccaacguguaccugaagcacgggggcggcguggccggggcccucaacaaggcgaccaacaacgccaugcaggucgaguccgacgacuacaucgccacgaacggcccccugaagguggggggcagcugcguccuguccggccacaaccucgccaagcacugccugcacgugguggggcccaacgucaacaagggcgaggacauccagcugcucaagagcgccuacgagaacuucaaccagcacgaggugcugcuggcgccccuccuguccgccgggaucuucggcgccgacccgauccacagccugcgggugugcgucgacaccgugcgcaccaacguguaccucgccgucuucgacaagaaccuguacgacaagcugguguccagcuuccucgagaugaagagcgagaagcagguggagcagaagaucgccgagauccccaaggaggaggucaagcccuucaucaccgaguccaagcccagcguggagcagcggaagcaggacgacaagaagaucaaggcgugcguggaggaggucacgaccacccuggaggagaccaaguuccugacggagaaccuccugcuguacaucgacaucaacgggaaccuccacccggacuccgccacccuggugagcgacaucgacaucaccuuccugaagaaggacgcccccuacaucgugggcgacgucgugcaggagggcgugcucaccgccgucgugauccccacgaagaaggccgggggcaccaccgagaugcuggcgaaggcccugcgcaaggugcccaccgacaacuacaucacgaccuacccggggcagggccucaacggguacaccgucgaggaggccaagaccgugcugaagaagugcaaguccgccuucuacauccugcccagcaucaucuccaacgagaagcaggagauccucggcaccgugagcuggaaccugcgggagaugcuggcgcacgccgaggagacgcgcaagcugaugcccgucugcguggagaccaaggccaucguguccaccauccagcggaaguacaagggcaucaagauccaggagggggucguggacuacggcgcccgcuucuacuucuacaccagcaagacgaccguggccucccucaucaacacccugaacgaccugaacgagacccucgucacgaugccccugggguacgugacccacggccugaaccucgaggaggcggcccgguacaugcgcagccugaaggugccggccaccgucuccgugagcucccccgacgccgugaccgccuacaacggguaccugacgagcuccagcaagacccccgaggagcacuucaucgagaccaucucccucgcgggcagcuacaaggacuggagcuacuccggccagagcacccagcuggggaucgaguuccugaagcggggcgacaaguccgucuacuacacgagcaaccccaccaccuuccaccucgacggggaggugaucaccuucgacaaccugaagacgcugcucucccugcgcgaggugcggaccaucaaggucuucaccaccguggacaacaucaaccugcacacgcagguggucgacaugagcaugaccuacggccagcaguucggcccgaccuaccucgacggggccgacgugaccaagaucaagccccacaacucccacgagggcaagacguucuacgugcugcccaacgacgacacccugcgcgucgaggccuucgaguacuaccacgccaccgacccgagcuuccucgggcgguacauguccgcccugaaccacaccaagaaguggaaguacccccaggugaacggccugacgagcaucaagugggcggacaacaacugcuaccucgccaccgcccugcugacccuccagcagaucgagcugaaguucaacccccccgcccugcaggacgcguacuaccgcgcccgggccggggaggccgccaacuucugcgcgcucauccuggccuacugcaacaagaccgugggcgagcugggcgacguccgcgagacgauguccuaccucuuccagcacgccaaccuggacagcugcaagcgggugcugaacgucgugugcaagaccugcgggcagcagcagaccacccucaagggcguggaggccgucauguacauggggacccuguccuacgagcaguucaagaagggcgugcagaucccgugcacgugcgggaagcaggccaccaaguaccuggugcagcaggagagccccuucgucaugauguccgcgccccccgcccaguacgagcucaagcacggcaccuucaccugcgccagcgaguacacgggcaacuaccagugcgggcacuacaagcacaucaccuccaaggagacccuguacugcaucgacggcgcccugcucaccaagagcagcgaguacaaggggccgaucacggacguguucuacaaggagaacuccuacaccaccaccaucaagcccgugacguacaagcuggacggcgucgugugcaccgagaucgaccccaagcuggacaacuacuacaagaaggacaacagcuacuucaccgagcagcccaucgaccucgugccgaaccagcccuaccccaacgccuccuucgacaacuucaaguucgucugcgacaacaucaaguucgcggacgaccugaaccagcugaccggguacaagaagcccgccagccgcgagcucaaggugacguucuucccggaccugaacggcgacguggucgccaucgacuacaagcacuacacccccuccuucaagaagggcgccaagcugcuccacaagcccaucguguggcacgugaacaacgcgaccaacaaggccaccuacaagcccaacacguggugcauccggugccuguggagcaccaagccggucgagaccuccaacagcuucgacgugcugaaguccgaggacgcccaggggauggacaaccucgccugcgaggaccugaagcccgugagcgaggaggucguggagaaccccaccauccagaaggacgugcuggagugcaacgucaagacgaccgagguggugggcgacaucauccucaagcccgccaacaacucccugaagaucaccgaggaggucgggcacaccgaccugauggcggccuacguggacaacagcucccucacgaucaagaagccgaacgagcugagccgcgugcugggccucaagacccuggccacccacgggcuggccgccgucaacuccgugcccugggacaccaucgcgaacuacgccaagcccuuccucaacaagguggucagcacgaccaccaacaucgugacccgcugccugaaccgggugugcacgaacuacaugccguacuucuucacccugcuccugcagcugugcaccuucacccgcuccaccaacagccggaucaaggccuccaugcccacgaccaucgccaagaacaccgucaagagcgugggcaaguucugccucgaggccagcuucaacuaccugaagucccccaacuucagcaagcugaucaacaucaucaucugguuccuccugcuguccgugugccucggcagccugaucuacuccaccgcggcccuggggguccucaugagcaaccugggcaugcccuccuacugcacgggguaccgcgagggcuaccugaacagcaccaacgugaccaucgccaccuacugcacgggcuccaucccgugcagcgugugccucuccgggcuggacagccuggacaccuaccccucccucgagaccauccagaucaccaucagcuccuucaagugggaccugacggccuucggccuggucgccgagugguuccucgcguacauccuguucacccgguucuucuacgugcuggggcucgccgccaucaugcagcuguucuucagcuacuucgccgugcacuucaucuccaacagcuggcugauguggcugaucaucaaccucguccagauggcgcccaucuccgccauggugcgcauguacaucuucuucgccagcuucuacuacguguggaagagcuacguccacgugguggacggcugcaacuccagcaccugcaugaugugcuacaagcggaaccgcgccacccgggucgagugcacgaccaucgugaacgggguccgccgguccuucuacguguacgccaacggcggcaagggguucugcaagcugcacaacuggaacugcgugaacugcgacaccuucugcgcgggcagcaccuucaucuccgacgaggucgcccgcgaccugagccuccaguucaagcggcccaucaacccgacggaccaguccagcuacaucguggacuccgugaccgucaagaacgggagcauccaccuguacuucgacaaggccggccagaagaccuacgagcgccacucccugagccacuucgugaaccucgacaaccugcgggccaacaacaccaaggggucccugcccaucaacgugaucgucuucgacggcaagagcaagugcgaggaguccagcgccaaguccgcgagcguguacuacucccagcucaugugccagcccauccugcugcucgaccaggcccuggugagcgacgucggcgacagcgccgagguggccgugaagauguucgacgccuacgucaacacguucuccagcaccuucaacgugcccauggagaagcugaagacccucguggcgaccgccgaggccgagcuggccaagaacgucucccuggacaacgugcucagcacguucaucuccgcggcccgccagggguucguggacagcgacgucgagaccaaggacgugguggagugccugaagcugucccaccagagcgacaucgaggucaccggcgacuccugcaacaacuacaugcucaccuacaacaagguggagaacaugacgccgcgggaccugggggccugcaucgacugcagcgcccgccacaucaacgcccagguggcgaagucccacaacaucgcccugaucuggaacgucaaggacuucaugagccucuccgagcagcugcggaagcagauccgcagcgccgccaagaagaacaaccugcccuucaagcucaccugcgccaccacccgccagguggugaacgucgugacgaccaagaucgcgcugaagggcggguga

SEQ ID NO: 17962 - RNA, 5841 nt, Artificial Sequence
  SARS-CoV-2__MT757076.1__non-structural protein 3 (NSP3) CDS gc
auggcccccaccaaggugaccuucggcgacgacacggucaucgaggugcagggguacaagagcgugaacaucaccuucgagcuggacgagcgcaucgacaagguccucaacgagaagugcuccgccuacaccguggagcugggcaccgaggugaacgaguucgcgugcgucguggccgacgccgugaucaagacgcugcagccggucagcgagcuccugaccccccuggggaucgaccucgacgagugguccauggccaccuacuaccuguucgacgagagcggcgaguucaagcuggccucccacauguacugcagcuucuacccccccgacgaggacgaggaggagggggacugcgaggaggaggaguucgagccguccacccaguacgaguacggcacggaggacgacuaccagggcaagccccucgaguucggggcgaccagcgccgcccugcagcccgaggaggagcaggaggaggacuggcuggacgacgacucccagcagaccgugggccagcaggacgggagcgaggacaaccagaccacgaccauccagaccaucguggagguccagccccagcucgagauggagcugaccccgguggugcagacgaucgaggucaacuccuucagcggcuaccugaagcucaccgacaacguguacaucaagaacgccgacaucguggaggaggcgaagaaggucaagcccaccgugguggucaacgccgccaacguguaccugaagcacgggggcggcguggccggggcccugaacaaggcgaccaacaacgccaugcaggucgaguccgacgacuacaucgccacgaacggcccccucaagguggggggcagcugcguccuguccggccacaaccuggccaagcacugccuccacgugguggggcccaacgucaacaagggcgaggacauccagcugcugaagagcgccuacgagaacuucaaccagcacgaggugcuccuggcgccgcugcucuccgccgggaucuucggcgccgaccccauccacagccugcgggugugcgucgacaccgugcgcaccaacguguaccuggccgucuucgacaagaaccucuacgacaagcugguguccagcuuccuggagaugaagagcgagaagcagguggagcagaagaucgccgagauccccaaggaggaggucaagcccuucaucaccgaguccaagccgagcguggagcagcggaagcaggacgacaagaagaucaaggcgugcguggaggaggucacgaccacccucgaggagaccaaguuccugacggagaaccugcuccuguacaucgacaucaacgggaaccugcaccccgacuccgccacccucgugagcgacaucgacaucaccuuccugaagaaggacgcccccuacaucgugggcgacgucgugcaggagggcgugcugaccgccgucgugauccccacgaagaaggccgggggcaccaccgagaugcucgcgaaggcccugcgcaaggugccgaccgacaacuacaucacgaccuaccccgggcagggccugaacggguacaccgucgaggaggccaagaccgugcucaagaagugcaaguccgccuucuacauccugcccagcaucaucuccaacgagaagcaggagauccugggcaccgugagcuggaaccuccgggagaugcuggcgcacgccgaggagacgcgcaagcugaugcccgucugcguggagaccaaggccaucguguccaccauccagcggaaguacaagggcaucaagauccaggagggggucguggacuacggcgcccgcuucuacuucuacaccagcaagacgaccguggccucccugaucaacacccucaacgaccugaacgagacccuggucacgaugccgcucggguacgugacccacggccugaaccuggaggaggcggcccgguacaugcgcagccucaaggugcccgccaccgucuccgugagcucccccgacgccgugaccgccuacaacggguaccugacgagcuccagcaagacccccgaggagcacuucaucgagaccaucucccuggcgggcagcuacaaggacuggagcuacuccggccagagcacccagcucgggaucgaguuccugaagcggggcgacaaguccgucuacuacacgagcaacccgaccaccuuccaccuggacggggaggugaucaccuucgacaaccucaagacgcugcugucccuccgcgaggugcggaccaucaaggucuucaccaccguggacaacaucaaccugcacacgcagguggucgacaugagcaugaccuacggccagcaguucggccccaccuaccuggacggggccgacgugaccaagaucaagccccacaacucccacgagggcaagacguucuacgugcucccgaacgacgacacccugcgcgucgaggccuucgaguacuaccacaccaccgaccccagcuuccuggggcgguacauguccgcccucaaccacacgaagaaguggaaguacccccaggugaacggccugaccagcaucaagugggccgacaacaacugcuaccuggcgaccgcccuccugacccugcagcagaucgagcucaaguucaaccccccggcccugcaggacgccuacuaccgcgcgcgggccggggaggccgccaacuucugcgcccugauccucgcguacugcaacaagacggugggcgagcugggcgacguccgcgagaccauguccuaccuguuccagcacgccaaccucgacagcugcaagcgggugcugaacgucgugugcaagaccugcgggcagcagcagaccacccugaagggcguggaggccgucauguacauggggacgcucuccuacgagcaguucaagaagggcgugcagauccccugcaccugcgggaagcaggccaccaaguaccuggugcagcaggagagccccuucgucaugauguccgcccccccggcgcaguacgagcugaagcacggcaccuucacgugcgccagcgaguacaccggcaacuaccagugcgggcacuacaagcacaucaccuccaaggagacccucuacugcaucgacggcgcccugcugacgaagagcagcgaguacaaggggcccaucaccgacguguucuacaaggagaacuccuacaccaccacgaucaagcccgugaccuacaagcucgacggcgucgugugcaccgagaucgaccccaagcuggacaacuacuacaagaaggacaacagcuacuucaccgagcagccgaucgaccuggugcccaaccagcccuaccccaacgccuccuucgacaacuucaaguucgucugcgacaacaucaaguucgccgacgaccucaaccagcugacgggguacaagaagccggcgagccgcgagcugaaggugaccuucuuccccgaccucaacggcgacguggucgccaucgacuacaagcacuacacccccuccuucaagaagggcgccaagcugcugcacaagcccaucguguggcacgugaacaacgccaccaacaaggcgacguacaagccgaacaccuggugcauccggugccucuggagcaccaagcccgucgagaccuccaacagcuucgacgugcugaaguccgaggacgcccaggggauggacaaccuggccugcgaggaccucaagcccgugagcgaggaggucguggagaaccccacgauccagaaggacgugcuggagugcaacgucaagaccaccgagguggugggcgacaucauccugaagccggccaacaacucccucaagaucaccgaggaggucgggcacacggaccugauggccgcguacguggacaacagcucccugaccaucaagaagcccaacgagcucagccgcgugcugggccugaagacccucgccacccacgggcuggccgccgucaacuccgugcccugggacacgaucgccaacuacgcgaagccguuccugaacaagguggucagcaccaccaccaacaucgugacgcgcugccucaaccgggugugcaccaacuacaugcccuacuucuucacccugcugcuccagcugugcaccuucacccgcuccacgaacagccggaucaaggccuccaugcccaccaccaucgccaagaacaccgucaagagcgugggcaaguucugccuggaggccagcuucaacuaccucaagucccccaacuucagcaagcugaucaacaucaucaucugguuccugcuccuguccgugugccugggcagccucaucuacuccacggccgcgcuggggguccugaugagcaaccucggcaugccguccuacugcaccggguaccgcgagggcuaccugaacagcaccaacgugaccaucgccacguacugcaccggcuccauccccugcagcgugugccuguccgggcucgacagccuggacaccuaccccucccuggagaccauccagaucacgaucagcuccuucaagugggaccucaccgccuucggccuggucgccgagugguuccuggccuacauccucuucacccgguucuucuacgugcuggggcuggcggccaucaugcagcucuucuucagcuacuucgccgugcacuucaucuccaacagcuggcugauguggcugaucaucaaccugguccagauggcccccaucuccgcgauggugcgcauguacaucuucuucgccagcuucuacuacguguggaagagcuacguccacgugguggacggcugcaacuccagcaccugcaugaugugcuacaagcggaaccgcgccacgcgggucgagugcaccaccaucgugaacgggguccgccgguccuucuacguguacgccaacggcggcaagggguucugcaagcuccacaacuggaacugcgugaacugcgacaccuucugcgccggcagcacguucaucuccgacgaggucgcgcgcgaccugagccugcaguucaagcggccgaucaaccccaccgaccaguccagcuacaucguggacuccgugaccgucaagaacgggagcauccaccucuacuucgacaaggccggccagaagaccuacgagcgccacucccugagccacuucgugaaccuggacaaccuccgggccaacaacacgaaggggucccugcccaucaacgugaucgucuucgacggcaagagcaagugcgaggaguccagcgccaaguccgccagcguguacuacucccagcugaugugccagcccauccuccugcuggaccaggcgcucgugagcgacgucggcgacagcgccgagguggccgugaagauguucgacgccuacgucaacaccuucuccagcaccuucaacgugccgauggagaagcugaagacccugguggccacggcggaggccgagcucgccaagaacgucucccuggacaacgugcugagcaccuucaucuccgccgcgcgccagggguucguggacagcgacgucgagaccaaggacgugguggagugccucaagcugucccaccagagcgacaucgaggucaccggcgacuccugcaacaacuacaugcugacguacaacaagguggagaacauggccccccgggaccucggggccugcaucgacugcagcgcccgccacaucaacgcccagguggcgaagucccacaacaucgcccugaucuggaacgucaaggacuucaugagccuguccgagcagcuccggaagcagauccgcagcgccgccaagaagaacaaccugcccuucaagcugaccugcgccaccacccgccagguggugaacgucgugacgaccaagaucgcgcucaagggcggguga

SEQ ID NO: 17963 - RNA, 5841 nt, Artificial Sequence
  SARS-CoV-2__MT757085.1__non-structural protein 3 (NSP3) CDS gc
auggcccccaccaaggugaccuucggcgacgacacggucaucgaggugcagggguacaagagcgugaacaucaccuucgagcuggacgagcgcaucgacaagguccucaacgagaagugcuccgccuacaccguggagcugggcaccgaggugaacgaguucgcgugcgucguggccgacgccgugaucaagacgcugcagccggucagcgagcuccugaccccccuggggaucgaccucgacgagugguccauggccaccuacuaccuguucgacgagagcggcgaguucaagcuggccucccacauguacugcagcuucuacccccccgacgaggacgaggaggagggggacugcgaggaggaggaguucgagccguccacccaguacgaguacggcacggaggacgacuaccagggcaagccccucgaguucggggcgaccagcgccgcccugcagcccgaggaggagcaggaggaggacuggcuggacgacgacucccagcagaccgugggccagcaggacgggagcgaggacaaccagaccacgaccauccagaccaucguggagguccagccccagcucgagauggagcugaccccgguggugcagacgaucgaggucaacuccuucagcggcuaccugaagcucaccgacaacguguacaucaagaacgccgacaucguggaggaggcgaagaaggucaagcccaccgugguggucaacgccgccaacguguaccugaagcacgggggcggcguggccggggcccugaacaaggcgaccaacaacgccaugcaggucgaguccgacgacuacaucgccacgaacggcccccucaagguggggggcagcugcguccuguccggccacaaccuggccaagcacugccuccacgugguggggcccaacgucaacaagggcgaggacauccagcugcugaagagcgccuacgagaacuucaaccagcacgaggugcuccuggcgccgcugcucuccgccgggaucuucggcgccgaccccauccacagccugcgggugugcgucgacaccgugcgcaccaacguguaccuggccgucuucgacaagaaccucuacgacaagcugguguccagcuuccuggagaugaagagcgagaagcagguggagcagaagaucgccgagauccccaaggaggaggucaagcccuucaucaccgaguccaagccgagcguggagcagcggaagcaggacgacaagaagaucaaggcgugcguggaggaggucacgaccacccucgaggagaccaaguuccugacggagaaccugcuccuguacaucgacaucaacgggaaccugcaccccgacuccgccacccucgugagcgacaucgacaucaccuuccugaagaaggacgcccccuacaucgugggcgacgucgugcaggagggcgugcugaccgccgucgugauccccacgaagaaggccgggggcaccaccgagaugcucgcgaaggcccugcgcaaggugccgaccgacaacuacaucacgaccuaccccgggcagggccugaacggguacaccgucgaggaggccaagaccgugcucaagaagugcaaguccgccuucuacauccugcccagcaucaucuccaacgagaagcaggagauccugggcaccgugagcuggaaccuccgggagaugcuggcgcacgccgaggagacgcgcaagcugaugcccgucugcguggagaccaaggccaucguguccaccauccagcggaaguacaagggcaucaagauccaggagggggucguggacuacggcgcccgcuucuacuucuacaccagcaagaucacgguggccucccugaucaacacccucaacgaccugaacgagacccuggucaccaugccgcucggguacgugacgcacggccugaaccuggaggaggcggcccgguacaugcgcagccucaaggugcccgccaccgucuccgugagcucccccgacgccgugaccgccuacaacggguaccugaccagcuccagcaagacgcccgaggagcacuucaucgagaccaucucccuggcgggcagcuacaaggacuggagcuacuccggccagagcacccagcucgggaucgaguuccugaagcggggcgacaaguccgucuacuacaccagcaacccgacgaccuuccaccuggacggggaggugaucaccuucgacaaccucaagacccugcugucccuccgcgaggugcggacgaucaaggucuucaccaccguggacaacaucaaccugcacacccagguggucgacaugagcaugacguacggccagcaguucggccccaccuaccuggacggggccgacgugaccaagaucaagccccacaacucccacgagggcaagaccuucuacgugcucccgaacgacgacacgcugcgcgucgaggccuucgaguacuaccacaccaccgaccccagcuuccuggggcgguacauguccgcccucaaccacaccaagaaguggaaguacccccaggugaacggccugacgagcaucaagugggccgacaacaacugcuaccuggcgaccgcccuccugacccugcagcagaucgagcucaaguucaaccccccggcccugcaggacgccuacuaccgcgcgcgggccggggaggccgccaacuucugcgcccugauccucgcguacugcaacaagaccgugggcgagcugggcgacguccgcgagacgauguccuaccuguuccagcacgccaaccucgacagcugcaagcgggugcugaacgucgugugcaagaccugcgggcagcagcagaccacccugaagggcguggaggccgucauguacauggggacccucuccuacgagcaguucaagaagggcgugcagauccccugcacgugcgggaagcaggccaccaaguaccuggugcagcaggagagccccuucgucaugauguccgcccccccggcgcaguacgagcugaagcacggcaccuucaccugcgccagcgaguacacgggcaacuaccagugcgggcacuacaagcacaucaccuccaaggagacccucuacugcaucgacggcgcccugcugaccaagagcagcgaguacaaggggcccaucacggacguguucuacaaggagaacuccuacaccaccaccaucaagcccgugacguacaagcucgacggcgucgugugcaccgagaucgaccccaagcuggacaacuacuacaagaaggacaacagcuacuucaccgagcagccgaucgaccuggugcccaaccagcccuaccccaacgccuccuucgacaacuucaaguucgucugcgacaacaucaaguucgccgacgaccucaaccagcugaccggguacaagaagccggcgagccgcgagcugaaggugacguucuuccccgaccucaacggcgacguggucgccaucgacuacaagcacuacacccccuccuucaagaagggcgccaagcugcugcacaagcccaucguguggcacgugaacaacgccaccaacaaggcgaccuacaagccgaacacguggugcauccggugccucuggagcaccaagcccgucgagaccuccaacagcuucgacgugcugaaguccgaggacgcccaggggauggacaaccuggccugcgaggaccucaagcccgugagcgaggaggucguggagaaccccaccauccagaaggacgugcuggagugcaacgucaagacgaccgagguggugggcgacaucauccugaagccggccaacaacucccucaagaucaccgaggaggucgggcacaccgaccugauggccgcguacguggacaacagcucccugacgaucaagaagcccaacgagcucagccgcgugcugggccugaagacccucgccacccacgggcuggccgccgucaacuccgugcccugggacaccaucgccaacuacgcgaagccguuccugaacaagguggucagcacgaccaccaacaucgugacccgcugccucaaccgggugugcacgaacuacaugcccuacuucuucacccugcugcuccagcugugcaccuucacccgcuccaccaacagccggaucaaggccuccaugcccacgaccaucgccaagaacaccgucaagagcgugggcaaguucugccuggaggccagcuucaacuaccucaagucccccaacuucagcaagcugaucaacaucaucaucugguuccugcuccuguccgugugccugggcagccucaucuacuccaccgccgcgcuggggguccugaugagcaaccucggcaugccguccuacugcacgggguaccgcgagggcuaccugaacagcaccaacgugaccaucgccaccuacugcacgggcuccauccccugcagcgugugccuguccgggcucgacagccuggacaccuaccccucccuggagaccauccagaucaccaucagcuccuucaagugggaccucacggccuucggccuggucgccgagugguuccuggccuacauccucuucacccgguucuucuacgugcuggggcuggcggccaucaugcagcucuucuucagcuacuucgccgugcacuucaucuccaacagcuggcugauguggcugaucaucaaccugguccagauggcccccaucuccgcgauggugcgcauguacaucuucuucgccagcuucuacuacguguggaagagcuacguccacgugguggacggcugcaacuccagcaccugcaugaugugcuacaagcggaaccgcgccacccgggucgagugcacgaccaucgugaacgggguccgccgguccuucuacguguacgccaacggcggcaagggguucugcaagcuccacaacuggaacugcgugaacugcgacaccuucugcgccggcagcaccuucaucuccgacgaggucgcgcgcgaccugagccugcaguucaagcggccgaucaaccccacggaccaguccagcuacaucguggacuccgugaccgucaagaacgggagcauccaccucuacuucgacaaggccggccagaagaccuacgagcgccacucccugagccacuucgugaaccuggacaaccuccgggccaacaacaccaaggggucccugcccaucaacgugaucgucuucgacggcaagagcaagugcgaggaguccagcgccaaguccgccagcguguacuacucccagcugaugugccagcccauccuccugcuggaccaggcgcucgugagcgacgucggcgacagcgccgagguggccgugaagauguucgacgccuacgucaacacguucuccagcaccuucaacgugccgauggagaagcugaagacccugguggccaccgcggaggccgagcucgccaagaacgucucccuggacaacgugcugagcacguucaucuccgccgcgcgccagggguucguggacagcgacgucgagaccaaggacgugguggagugccucaagcugucccaccagagcgacaucgaggucaccggcgacuccugcaacaacuacaugcugaccuacaacaagguggagaacaugacgccccgggaccucggggccugcaucgacugcagcgcccgccacaucaacgcccagguggccaagucccacaacaucgcgcugaucuggaacgucaaggacuucaugagccuguccgagcagcuccggaagcagauccgcagcgccgccaagaagaacaaccugcccuucaagcugaccugcgccaccacccgccagguggugaacgucgugacgaccaagaucgcccucaagggcggguga

SEQ ID NO: 17964 - RNA, 5841 nt, Artificial Sequence
  SARS-CoV-2__MT757105.1__non-structural protein 3 (NSP3) CDS gc
auggcccccaccaaggugaccuucggcgacgacacggucaucgaggugcagggguacaagagcgugaacaucaccuucgagcuggacgagcgcaucgacaagguccucaacgagaagugcuccgccuacaccguggagcugggcaccgaggugaacgaguucgcgugcgucguggccgacgccgugaucaagacgcugcagccggucagcgagcuccugaccccccuggggaucgaccucgacgagugguccauggccaccuacuaccuguucgacgagagcggcgaguucaagcuggccucccacauguacugcagcuucuacccccccgacgaggacgaggaggagggggacugcgaggaggaggaguucgagccguccacccaguacgaguacggcacggaggacgacuaccagggcaagccccucgaguucggggcgaccagcgccgcccugcagcccgaggaggagcaggaggaggacuggcuggacgacgacucccagcagaccgugggccagcaggacgggagcgaggacaaccagaccacgaccauccagaccaucguggagguccagccccagcucgagauggagcugaccccgguggugcagacgaucgaggucaacuccuucagcggcuaccugaagcucaccgacaacguguacaucaagaacgccgacaucguggaggaggcgaagaaggucaagcccaccgugguggucaacgccgccaacguguaccugaagcacgggggcggcguggccggggcccugaacaaggcgaccaacaacgccaugcaggucgaguccgacgacuacaucgccacgaacggcccccucaagguggggggcagcugcguccuguccggccacaaccuggccaagcacugccuccacgugguggggcccaacgucaacaagggcgaggacauccagcugcugaagagcgccuacgagaacuucaaccagcacgaggugcuccuggcgccgcugcucuccgccgggaucuucggcgccgaccccauccacagccugcgggugugcgucgacaccgugcgcaccaacguguaccuggccgucuucgacaagaaccucuacgacaagcugguguccagcuuccuggagaugaagagcgagaagcagguggagcagaagaucgccgagauccccaaggaggaggucaagcccuucaucaccgaguccaagccgagcguggagcagcggaagcaggacgacaagaagaucaaggcgugcguggaggaggucacgaccacccucgaggagaccaaguuccugacggagaaccugcuccuguacaucgacaucaacgggaaccugcaccccgacuccgccacccucgugagcgacaucgacaucaccuuccugaagaaggacgcccccuacaucgugggcgacgucgugcaggagggcgugcugaccgccgucgugauccccacgaagaaggccgggggcaccaccgagaugcucgcgaaggcccugcgcaaggugccgaccgacaacuacaucacgaccuaccccgggcagggccugaacggguacaccgucgaggaggccaagaccgugcucaagaagugcaaguccgccuucuacauccugcccagcaucaucuccaacgagaagcaggagauccugggcaccgugagcuggucccuccgggagaugcuggcgcacgccgaggagacgcgcaagcugaugcccgucugcguggagaccaaggccaucgugagcaccauccagcggaaguacaagggcaucaagauccaggagggggucguggacuacggcgcccgcuucuacuucuacaccuccaagacgaccguggccagccugaucaacacccucaacgaccugaacgagacccuggucacgaugccgcucggguacgugacccacggccugaaccuggaggaggcggcccgguacaugcgcucccucaaggugcccgccaccgucagcguguccagccccgacgccgugaccgccuacaacggguaccugacguccagcuccaagacccccgaggagcacuucaucgagaccaucagccuggcgggcagcuacaaggacugguccuacagcggccaguccacccagcucgggaucgaguuccugaagcggggcgacaagagcgucuacuacacguccaacccgaccaccuuccaccuggacggggaggugaucaccuucgacaaccucaagacgcugcugagccuccgcgaggugcggaccaucaaggucuucaccaccguggacaacaucaaccugcacacgcagguggucgacauguccaugaccuacggccagcaguucggccccaccuaccuggacggggccgacgugaccaagaucaagccccacaacagccacgagggcaagacguucuacgugcucccgaacgacgacacccugcgcgucgaggccuucgaguacuaccacaccaccgaccccuccuuccuggggcgguacaugagcgcccucaaccacacgaagaaguggaaguacccccaggugaacggccugaccuccaucaagugggccgacaacaacugcuaccuggcgaccgcccuccugacccugcagcagaucgagcucaaguucaaccccccggcccugcaggacgccuacuaccgcgcgcgggccggggaggccgccaacuucugcgcccugauccucgcguacugcaacaagacggugggcgagcugggcgacguccgcgagaccaugagcuaccuguuccagcacgccaaccucgacuccugcaagcgggugcugaacgucgugugcaagaccugcgggcagcagcagaccacccugaagggcguggaggccgucauguacauggggacgcucagcuacgagcaguucaagaagggcgugcagauccccugcaccugcgggaagcaggccaccaaguaccuggugcagcaggagucccccuucgucaugaugagcgcccccccggcgcaguacgagcugaagcacggcaccuucacgugcgccuccgaguacaccggcaacuaccagugcgggcacuacaagcacaucaccagcaaggagacccucuacugcaucgacggcgcccugcugacgaagagcuccgaguacaaggggcccaucaccgacguguucuacaaggagaacagcuacaccaccacgaucaagcccgugaccuacaagcucgacggcgucgugugcaccgagaucgaccccaagcuggacaacuacuacaagaaggacaacuccuacuucaccgagcagccgaucgaccuggugcccaaccagcccuaccccaacgccagcuucgacaacuucaaguucgucugcgacaacaucaaguucgccgacgaccucaaccagcugacgggguacaagaagccggcgucccgcgagcugaaggugaccuucuuccccgaccucaacggcgacguggucgccaucgacuacaagcacuacacccccagcuucaagaagggcgccaagcugcugcacaagcccaucguguggcacgugaacaacgccaccaacaaggcgacguacaagccgaacaccuggugcauccggugccucugguccaccaagcccgucgagaccagcaacuccuucgacgugcugaagagcgaggacgcccaggggauggacaaccuggccugcgaggaccucaagcccguguccgaggaggucguggagaaccccacgauccagaaggacgugcuggagugcaacgucaagaccaccgagguggugggcgacaucauccugaagccggccaacaacagccucaagaucaccgaggaggucgggcacacggaccugauggccgcguacguggacaacuccagccugaccaucaagaagcccaacgagcucucccgcgugcugggccugaagacccucgccacccacgggcuggccgccgucaacagcgugcccugggacacgaucgccaacuacgcgaagccguuccugaacaagguggucuccaccaccaccaacaucgugacgcgcugccucaaccgggugugcaccaacuacaugcccuacuucuucacccugcugcuccagcugugcaccuucacccgcagcacgaacucccggaucaaggccagcaugcccaccaccaucgccaagaacaccgucaagagcgugggcaaguucugccuggaggccuccuucaacuaccucaagagccccaacuucuccaagcugaucaacaucaucaucugguuccugcuccugagcgugugccugggcucccucaucuacagcacggccgcgcuggggguccugauguccaaccucggcaugccgagcuacugcaccggguaccgcgagggcuaccugaacuccaccaacgugaccaucgccacguacugcaccggcagcauccccugcuccgugugccugagcgggcucgacucccuggacaccuaccccagccuggagaccauccagaucacgaucuccagcuucaagugggaccucaccgccuucggccuggucgccgagugguuccuggccuacauccucuucacccgguucuucuacgugcuggggcuggcggccaucaugcagcucuucuucuccuacuucgccgugcacuucaucagcaacuccuggcugauguggcugaucaucaaccugguccagauggcccccaucagcgcgauggugcgcauguacaucuucuucgccagcuucuacuacguguggaaguccuacguccacgugguggacggcugcaacagcuccaccugcaugaugugcuacaagcggaaccgcgccacgcgggucgagugcaccaccaucgugaacgggguccgccggagcuucuacguguacgccaacggcggcaagggguucugcaagcuccacaacuggaacugcgugaacugcgacaccuucugcgccggcuccacguucaucagcgacgaggucgcgcgcgaccugucccugcaguucaagcggccgaucaaccccaccgaccagagcuccuacaucguggacagcgugaccgucaagaacggguccauccaccucuacuucgacaaggccggccagaagaccuacgagcgccacagccugucccacuucgugaaccuggacaaccuccgggccaacaacacgaaggggagccugcccaucaacgugaucgucuucgacggcaaguccaagugcgaggagagcuccgccaagagcgccuccguguacuacagccagcugaugugccagcccauccuccugcuggaccaggcgcucgugagcgacgucggcgacuccgccgagguggccgugaagauguucgacgccuacgucaacaccuucagcuccaccuucaacgugccgauggagaagcugaagacccugguggccacggcggaggccgagcucgccaagaacgucagccuggacaacgugcuguccaccuucaucagcgccgcgcgccagggguucguggacuccgacgucgagaccaaggacgugguggagugccucaagcugagccaccaguccgacaucgaggucaccggcgacagcugcaacaacuacaugcugacguacaacaagguggagaacaugaccccccgggaccucggggccugcaucgacugcuccgcccgccacaucaacgcccagguggccaagagccacaacaucgcgcugaucuggaacgucaaggacuucaugucccugagcgagcagcuccggaagcagauccgcuccgccgccaagaagaacaaccugcccuucaagcugaccugcgccaccacgcgccagguggugaacgucgugaccaccaagaucgcccucaagggcggguga

SEQ ID NO: 17965 - RNA, 5841 nt, Artificial Sequence
  SARS-CoV-2__MT745584.1__non-structural protein 3 (NSP3) CDS gc
auggcccccaccaaggugaccuucggcgacgacacggucaucgaggugcagggguacaagagcgugaacaucaccuucgagcuggacgagcgcaucgacaagguccucaacgagaagugcuccgccuacaccguggagcugggcaccgaggugaacgaguucgcgugcgucguggccgacgccgugaucaagacgcugcagccggucagcgagcuccugaucccccuggggaucgaccucgacgagugguccauggccaccuacuaccuguucgacgagagcggcgaguucaagcuggccucccacauguacugcagcuucuacccccccgacgaggacgaggaggagggggacugcgaggaggaggaguucgagccguccacccaguacgaguacggcaccgaggacgacuaccagggcaagccccucgaguucggggcgacgagcgccgcccugcagcccgaggaggagcaggaggaggacuggcuggacgacgacucccagcagaccgugggccagcaggacgggagcgaggacaaccagaccaccacgauccagaccaucguggagguccagccccagcucgagauggagcugaccccgguggugcagaccaucgaggucaacuccuucagcggcuaccugaagcucacggacaacguguacaucaagaacgccgacaucguggaggaggcgaagaaggucaagcccaccgugguggucaacgccgccaacguguaccugaagcacgggggcggcguggccggggcccugaacaaggcgaccaacaacgccaugcaggucgaguccgacgacuacaucgccaccaacggcccccucaagguggggggcagcugcguccuguccggccacaaccuggccaagcacugccuccacgugguggggcccaacgucaacaagggcgaggacauccagcugcugaagagcgccuacgagaacuucaaccagcacgaggugcuccuggcgccgcugcucuccgccgggaucuucggcgccgaccccauccacagccugcgggugugcgucgacacggugcgcaccaacguguaccuggccgucuucgacaagaaccucuacgacaagcugguguccagcuuccuggagaugaagagcgagaagcagguggagcagaagaucgccgagauccccaaggaggaggucaagcccuucaucaccgaguccaagccgagcguggagcagcggaagcaggacgacaagaagaucaaggcgugcguggaggaggucaccacgacccucgaggagaccaaguuccugaccgagaaccugcuccuguacaucgacaucaacgggaaccugcaccccgacuccgccacgcucgugagcgacaucgacaucaccuuccugaagaaggacgcccccuacaucgugggcgacgucgugcaggagggcgugcugaccgccgucgugauccccaccaagaaggccgggggcacgaccgagaugcucgcgaaggcccugcgcaaggugccgaccgacaacuacaucaccacguaccccgggcagggccugaacggguacaccgucgaggaggccaagaccgugcucaagaagugcaaguccgccuucuacauccugcccagcaucaucuccaacgagaagcaggagauccugggcaccgugagcuggaaccuccgggagaugcuggcgcacgccgaggagacccgcaagcugaugcccgucugcguggagacgaaggccaucguguccaccauccagcggaaguacaagggcaucaagauccaggagggggucguggacuacggcgcccgcuucuacuucuacaccagcaagaccacgguggccucccugaucaacacccucaacgaccugaacgagacccuggucaccaugccgcucggguacgugacgcacggccugaaccuggaggaggcggcccgguacaugcgcagccucaaggugcccgccaccgucuccgugagcucccccgacgccgugaccgccuacaacggguaccugaccagcuccagcaagacgcccgaggagcacuucaucgagaccaucucccuggcgggcagcuacaaggacuggagcuacuccggccagagcacccagcucgggaucgaguuccugaagcggggcgacaaguccgucuacuacaccagcaacccgacgaccuuccaccuggacggggaggugaucaccuucgacaaccucaagacccugcugucccuccgcgaggugcggacgaucaaggucuucaccaccguggacaacaucaaccugcacacccagguggucgacaugagcaugacguacggccagcaguucggccccaccuaccuggacggggccgacgugaccaagaucaagccccacaacucccacgagggcaagaccuucuacgugcucccgaacgacgacacgcugcgcgucgaggccuucgaguacuaccacaccaccgaccccagcuuccuggggcgguacauguccgcccucaaccacaccaagaaguggaaguacccccaggugaacggccugacgagcaucaagugggccgacaacaacugcuaccuggcgaccgcccuccugacccugcagcagaucgagcucaaguucaaccccccggcccugcaggacgccuacuaccgcgcgcgggccggggaggccgccaacuucugcgcccugauccucgcguacugcaacaagaccgugggcgagcugggcgacguccgcgagacgauguccuaccuguuccagcacgccaaccucgacagcugcaagcgggugcugaacgucgugugcaagaccugcgggcagcagcagaccacccugaagggcguggaggccgucauguacauggggacccucuccuacgagcaguucaagaagggcgugcagauccccugcacgugcgggaagcaggccaccaaguaccuggugcagcaggagagccccuucgucaugauguccgcccccccggcgcaguacgagcugaagcacggcaccuucaccugcgccagcgaguacacgggcaacuaccagugcgggcacuacaagcacaucaccuccaaggagacccucuacugcaucgacggcgcccugcugaccaagagcagcgaguacaaggggcccaucacggacguguucuacaaggagaacuccuacaccaccaccaucaagcccgugacguacaagcucgacggcgucgugugcaccgagaucgaccccaagcuggacaacuacuacaagaaggacaacagcuacuucaccgagcagccgaucgaccuggugcccaaccagcccuaccccaacgccuccuucgacaacuucaaguucgucugcgacaacaucaaguucgccgacgaccucaaccagcugaccggguacaagaagccggcgagccgcgagcugaaggugacguucuuccccgaccucaacggcgacguggucgccaucgacuacaagcacuacacccccuccuucaagaagggcgccaagcugcugcacaagcccaucguguggcacgugaacaacgccaccaacaaggcgaccuacaagccgaacacguggugcauccggugccucuggagcaccaagcccgucgagaccuccaacagcuucgacgugcugaaguccgaggacgcccaggggauggacaaccuggccugcgaggaccucaagcccgugagcgaggaggucguggagaaccccaccauccagaaggacgugcuggagugcaacgucaagacgaccgagguggugggcgacaucauccugaagccggccaacaacucccucaagaucaccgaggaggucgggcacaccgaccugauggccgcguacguggacaacagcucccugacgaucaagaagcccaacgagcucagccgcgugcugggccugaagacccucgccacccacgggcuggccgccgucaacuccgugcccugggacaccaucgccaacuacgcgaagccguuccugaacaagguggucagcacgaccaccaacaucgugacccgcugccucaaccgggugugcacgaacuacaugcccuacuucuucacccugcugcuccagcugugcaccuucacccgcuccaccaacagccggaucaaggccuccaugcccacgaccaucgccaagaacaccgucaagagcgugggcaaguucugccuggaggccagcuucaacuaccucaagucccccaacuucagcaagcugaucaacaucaucaucugguuccugcuccuguccgugugccugggcagccucaucuacuccaccgccgcgcuggggguccugaugagcaaccucggcaugccguccuacugcacgggguaccgcgagggcuaccugaacagcaccaacgugaccaucgccaccuacugcacgggcuccauccccugcagcgugugccuguccgggcucgacagccuggacaccuaccccucccuggagaccauccagaucaccaucagcuccuucaagugggaccucacggccuucggccuggucgccgagugguuccuggccuacauccucuucacccgguucuucuacgugcuggggcuggcggccaucaugcagcucuucuucagcuacuucgccgugcacuucaucuccaacagcuggcugauguggcugaucaucaaccugguccagauggcccccaucuccgcgauggugcgcauguacaucuucuucgccagcuucuacuacguguggaagagcuacguccacgugguggacggcugcaacuccagcaccugcaugaugugcuacaagcggaaccgcgccacccgggucgagugcacgaccaucgugaacgggguccgccgguccuucuacguguacgccaacggcggcaagggguucugcaagcuccacaacuggaacugcgugaacugcgacaccuucugcgccggcagcaccuucaucuccgacgaggucgcgcgcgaccugagccugcaguucaagcggccgaucaaccccacggaccaguccagcuacaucguggacuccgugaccgucaagaacgggagcauccaccucuacuucgacaaggccggccagaagaccuacgagcgccacucccugagccacuucgugaaccuggacaaccuccgggccaacaacaccaaggggucccugcccaucaacgugaucgucuucgacggcaagagcaagugcgaggaguccagcgccaaguccgccagcguguacuacucccagcugaugugccagcccauccuccugcuggaccaggcgcucgugagcgacgucggcgacagcgccgagguggccgugaagauguucgacgccuacgucaacacguucuccagcaccuucaacgugccgauggagaagcugaagacccugguggccaccgcggaggccgagcucgccaagaacgucucccuggacaacgugcugagcacguucaucuccgccgcgcgccagggguucguggacagcgacgucgagaccaaggacgugguggagugccucaagcugucccaccagagcgacaucgaggucaccggcgacuccugcaacaacuacaugcugaccuacaacaagguggagaacaugacgccccgggaccucggggccugcaucgacugcagcgcccgccacaucaacgcccacguggccaagucccacaacaucgcgcugaucuggaacgucaaggacuucaugagccuguccgagcagcuccggaagcagauccgcagcgccgccaagaagaacaaccugcccuucaagcugaccugcgccaccacccgccagguggugaacgucgugacgaccaagaucgcccucaagggcggguga

SEQ ID NO: 17966 - RNA, 5841 nt, Artificial Sequence
  SARS-CoV-2__MT745648.1__non-structural protein 3 (NSP3) CDS gc
auggcccccaccaaggugaccuucggcgacgacacggucaucgaggugcagggguacaagagcgugaacaucaccuucgagcuggacgagcgcaucgacaagguccucaacgagaagugcuccgccuacaccguggagcugggcaccgaggugaacgaguucgcgugcgucguggccgacgccgugaucaagacgcugcagccggucagcgagcuccugaccccccuggggaucgaccucgacgagugguccauggccaccuacuaccuguucgacgagagcggcgaguucaagcuggccucccacauguacugcagcuucuacccccccgacgaggacgaggaggagggggacugcgaggaggaggaguucgagccguccacccaguacgaguacggcacggaggacgacuaccagggcaagccccucgaguucggggcgaccagcgccgcccugcagcccgaggaggagcaggaggaggacuggcuggacgacgacucccagcagaccgugggccagcaggacgggagcgaggacaaccagaccacgaccauccagaccaucguggagguccagccccagcucgagauggagcugaccccgguggugcagacgaucgaggucaacuccuucagcggcuaccugaagcucaccgacaacguguacaucaagaacgccgacaucguggaggaggcgaagaaggucaagcccaccgugguggucaacgccgccaacguguaccugaagcacgggggcggcguggccggggcccugaacaaggcgaccaacaacgccaugcaggucgaguccgacgacuacaucgccacgaacggcccccucaagguggggggcagcugcguccuguccggccacaaccuggccaagcacugccuccacgugguggggcccaacgucaacaagggcgaggacauccagcugcugaagagcgccuacgagaacuucaaccagcacgaggugcuccuggcgccgcugcucuccgccgggaucuucggcgccgaccccauccacagccugcgggugugcgucgacaccgugcgcaccaacguguaccuggccgucuucgacaagaaccucuacgacaagcugguguccagcuuccuggagaugaagagcgagaagcagguggagcagaagaucgccgagauccccaaggaggaggucaagcccuucaucaccgaguccaagccgagcguggagcagcggaagcaggacgacaacaagaucaaggcgugcguggaggaggucacgaccacccucgaggagaucaaguuccugaccgagaaccugcuccuguacaucgacaucaacgggaaccugcaccccgacuccgccacgcucgugagcgacaucgacaucaccuuccugaagaaggacgcccccuacaucgugggcgacgucgugcaggagggcgugcugaccgccgucgugauccccaccaagaaggccgggggcacgaccgagaugcucgcgaaggcccugcgcaaggugccgaccgacaacuacaucaccacguaccccgggcagggccugaacggguacaccgucgaggaggccaagaccgugcucaagaagugcaaguccgccuucuacauccugcccagcaucaucuccaacgagaagcaggagauccugggcaccgugagcuggaaccuccgggagaugcuggcgcacgccgaggagacccgcaagcugaugcccgucugcguggagacgaaggccaucguguccaccauccagcggaaguacaagggcaucaagauccaggagggggucguggacuacggcgcccgcuucuacuucuacaccagcaagaccacgguggccucccugaucaacacccucaacgaccugaacgagacccuggucaccaugccgcucggguacgugacgcacggccugaaccuggaggaggcggcccgguacaugcgcagccucaaggugcccgccaccgucuccgugagcucccccgacgccgugaccgccuacaacggguaccugaccagcuccagcaagacgcccgaggagcacuucaucgagaccaucucccuggcgggcagcuacaaggacuggagcuacuccggccagagcacccagcucgggaucgaguuccugaagcggggcgacaaguccgucuacuacaccagcaacccgacgaccuuccaccuggacggggaggugaucaccuucgacaaccucaagacccugcugucccuccgcgaggugcggacgaucaaggucuucaccaccguggacaacaucaaccugcacacccagguggucgacaugagcaugacguacggccagcaguucggccccaccuaccuggacggggccgacgugaccaagaucaagccccacaacucccacgagggcaagaccuucuacgugcucccgaacgacgacacgcugcgcgucgaggccuucgaguacuaccacaccaccgaccccagcuuccuggggcgguacauguccgcccucaaccacaccaagaaguggaaguacccccaggugaacggccugacgagcaucaagugggccgacaacaacugcuaccuggcgaccgcccuccugacccugcagcagaucgagcucaaguucaaccccccggcccugcaggacgccuacuaccgcgcgcgggccggggaggccgccaacuucugcgcccugauccucgcguacugcaacaagaccgugggcgagcugggcgacguccgcgagacgauguccuaccuguuccagcacgccaaccucgacagcugcaagcgggugcugaacgucgugugcaagaccugcgggcagcagcagaccacccugaagggcguggaggccgucauguacauggggacccucuccuacgagcaguucaagaagggcgugcagauccccugcacgugcgggaagcaggccaccaaguaccuggugcagcaggagagccccuucgucaugauguccgcccccccggcgcaguacgagcugaagcacggcaccuucaccugcgccagcgaguacacgggcaacuaccagugcgggcacuacaagcacaucaccuccaaggagacccucuacugcaucgacggcgcccugcugaccaagagcagcgaguacaaggggcccaucacggacguguucuacaaggagaacuccuacaccaccaccaucaagcccgugacguacaagcucgacggcgucgugugcaccgagaucgaccccaagcuggacaacuacuacaagaaggacaacagcuacuucaccgagcagccgaucgaccuggugcccaaccagcccuaccccaacgccuccuucgacaacuucaaguucgucugcgacaacaucaaguucgccgacgaccucaaccagcugaccggguacaagaagccggcgagccgcgagcugaaggugacguucuuccccgaccucaacggcgacguggucgccaucgacuacaagcacuacacccccuccuucaagaagggcgccaagcugcugcacaagcccaucguguggcacgugaacaacgccaccaacaaggcgaccuacaagccgaacacguggugcauccggugccucuggagcaccaagcccgucgagaccuccaacagcuucgacgugcugaaguccgaggacgcccaggggauggacaaccuggccugcgaggaccucaagcccgugagcgaggaggucguggagaaccccaccauccagaaggacgugcuggagugcaacgucaagacgaccgagguggugggcgacaucauccugaagccggccaacaacucccucaagaucaccgaggaggucgggcacaccgaccugauggccgcguacguggacaacagcucccugacgaucaagaagcccaacgagcucagccgcgugcugggccugaagacccucgccacccacgggcuggccgccgucaacuccgugcccugggacaccaucgccaacuacgcgaagccguuccugaacaagguggucagcacgaccaccaacaucgugacccgcugccucaaccgggugugcacgaacuacaugcccuacuucuucacccugcugcuccagcugugcaccuucacccgcuccaccaacagccggaucaaggccuccaugcccacgaccaucgccaagaacaccgucaagagcgugggcaaguucugccuggaggccagcuucaacuaccucaagucccccaacuucagcaagcugaucaacaucaucaucugguuccugcuccuguccgugugccugggcagccucaucuacuccaccgccgcgcuggggguccugaugagcaaccucggcaugccguccuacugcacgggguaccgcgagggcuaccugaacagcaccaacgugaccaucgccaccuacugcacgggcuccauccccugcagcgugugccuguccgggcucgacagccuggacaccuaccccucccuggagaccauccagaucaccaucagcuccuucaagugggaccucacggccuucggccuggucgccgagugguuccuggccuacauccucuucacccgguucuucuacgugcuggggcuggcggccaucaugcagcucuucuucagcuacuucgccgugcacuucaucuccaacagcuggcugauguggcugaucaucaaccugguccagauggcccccaucuccgcgauggugcgcauguacaucuucuucgccagcuucuacuacguguggaagagcuacguccacgugguggacggcugcaacuccagcaccugcaugaugugcuacaagcggaaccgcgccacccgggucgagugcacgaccaucgugaacgggguccgccgguccuucuacguguacgccaacggcggcaagggguucugcaagcuccacaacuggaacugcgugaacugcgacaccuucugcgccggcagcaccuucaucuccgacgaggucgcgcgcgaccugagccugcaguucaagcggccgaucaaccccacggaccaguccagcuacaucguggacuccgugaccgucaagaacgggagcauccaccucuacuucgacaaggccggccagaagaccuacgagcgccacucccugagccacuucgugaaccuggacaaccuccgggccaacaacaccaaggggucccugcccaucaacgugaucgucuucgacggcaagagcaagugcgaggaguccagcgccaaguccgccagcguguacuacucccagcugaugugccagcccauccuccugcuggaccaggcgcucgugagcgacgucggcgacagcgccgagguggccgugaagauguucgacgccuacgucaacacguucuccagcaccuucaacgugccgauggagaagcugaagacccugguggccaccgcggaggccgagcucgccaagaacgucucccuggacaacgugcugagcacguucaucuccgccgcgcgccagggguucguggacagcgacgucgagaccaaggacgugguggagugccucaagcugucccaccagagcgacaucgaggucaccggcgacuccugcaacaacuacaugcugaccuacaacaagguggagaacaugacgccccgggaccucggggccugcaucgacugcagcgcccgccacaucaacgcccagguggccaagucccacaacaucgcgcugaucuggaacgucaaggacuucaugagccuguccgagcagcuccggaagcagauccgcagcgccgccaagaagaacaaccugcccuucaagcugaccugcgccaccacccgccagguggugaacgucgugacgaccaagaucgcccucaagggcggguga

SEQ ID NO: 17967 - RNA, 5841 nt, Artificial Sequence
  SARS-CoV-2__MT745658.1__non-structural protein 3 (NSP3) CDS gc
auggcccccaccaaggugaccuucggcgacgacacggucaucgaggugcagggguacaagagcgugaacaucaccuucgagcuggacgagcgcaucgacaagguccucaacgagaagugcuccgccuacaccguggagcugggcaccgaggugaacgaguucgcgugcgucguggccgacgccgugaucaagacgcugcagccggucagcgagcuccugaccccccuggggaucgaccucgacgagugguccauggccaccuacuaccuguucgacgagagcggcgaguucaagcuggccucccacauguacugcagcuucuacccccccgacgaggacgaggaggagggggacugcgaggaggaggaguucgagccguccacccaguacgaguacggcacggaggacgacuaccagggcaagccccucgaguucggggcgaccagcgccgcccugcagcccgaggaggagcaggaggaggacuggcuggacgacgacucccagcagaccgugggccagcaggacgggagcgacgacaaccagaccacgaccauccagaccaucguggagguccagccccagcucgagauggagcugaccccgguggugcagacgaucgaggucaacuccuucagcggcuaccugaagcucaccgacaacguguacaucaagaacgccgacaucguggaggaggcgaagaaggucaagcccaccgugguggucaacgccgccaacguguaccugaagcacgggggcggcguggccggggcccugaacaaggcgaccaacaacgccaugcaggucgaguccgacgacuacaucgccacgaacggcccccucaagguggggggcagcugcguccuguccggccacaaccuggccaagcacugccuccacgugguggggcccaacgucaacaagggcgaggacauccagcugcugaagagcgccuacgagaacuucaaccagcacgaggugcuccuggcgccgcugcucuccgccgggaucuucggcgccgaccccauccacagccugcgggugugcgucgacaccgugcgcaccaacguguaccuggccgucuucgacaagaaccucuacgacaagcugguguccagcuuccuggagaugaagagcgagaagcagguggagcagaagaucgccgagauccccaaggaggaggucaagcccuucaucaccgaguccaagccgagcguggagcagcggaagcaggacgacaagaagaucaaggcgugcguggaggaggucacgaccacccucgaggagaccaaguuccugacggagaaccugcuccuguacaucgacaucaacgggaaccugcaccccgacuccgccacccucgugagcgacaucgacaucaccuuccugaagaaggacgcccccuacaucgugggcgacgucgugcaggagggcgugcugaccgccgucgugauccccacgaagaaggccgggggcaccaccgagaugcucgcgaaggcccugcgcaaggugccgaccgacaacuacaucacgaccuaccccgggcagggccugaacggguacaccgucgaggaggccaagaccgugcucaagaagugcaaguccgccuucuacauccugcccagcaucaucuccaacgagaagcaggagauccugggcaccgugagcuggaaccuccgggagaugcuggcgcacgccgaggagacgcgcaagcugaugcccgucugcguggagaccaaggccaucguguccaccauccagcggaaguacaagggcaucaagauccaggagggggucguggacuacggcgcccgcuucuacuucuacaccagcaagacgaccguggccucccugaucaacacccucaacgaccugaacgagacccuggucacgaugccgcucggguacgugacccacggccugaaccuggaggaggcggcccgguacaugcgcagccucaaggugcccgccaccgucuccgugagcucccccgacgccgugaccgccuacaacggguaccugacgagcuccagcaagacccccgaggagcacuucaucgagaccaucucccuggcgggcagcuacaaggacuggagcuacuccggccagagcacccagcucgggaucgaguuccugaagcggggcgacaaguccgucuacuacacgagcaacccgaccaccuuccaccuggacggggaggugaucaccuucgacaaccucaagacgcugcugucccuccgcgaggugcggaccaucaaggucuucaccaccguggacaacaucaaccugcacacgcagguggucgacaugagcaugaccuacggccagcaguucggccccaccuaccuggacggggccgacgugaccaagaucaagccccacaacucccacgagggcaagacguucuacgugcucccgaacgacgacacccugcgcgucgaggccuucgaguacuaccacaccaccgaccccagcuuccuggggcgguacauguccgcccucaaccacacgaagaaguggaaguacccccaggugaacggccugaccagcaucaagugggccgacaacaacugcuaccuggcgaccgugcuccugacccugcagcagaucgagcucaaguucaaccccccggcccugcaggacgccuacuaccgcgcccgggcgggggaggccgccaacuucugcgcccugauccucgccuacugcaacaagacggucggcgagcugggcgacgugcgcgagaccauguccuaccuguuccagcacgcgaaccucgacagcugcaagcggguccugaacguggugugcaagaccugcgggcagcagcagaccacccugaagggcgucgaggccgugauguacauggggacgcucuccuacgagcaguucaagaagggcgugcagauccccugcaccugcgggaagcaggccaccaaguaccugguccagcaggagagccccuucgugaugauguccgcccccccggcccaguacgagcugaagcacggcaccuucacgugcgcgagcgaguacaccggcaacuaccagugcgggcacuacaagcacaucaccuccaaggagacccucuacugcaucgacggcgcccugcugacgaagagcagcgaguacaaggggcccaucaccgacguguucuacaaggagaacuccuacaccaccacgaucaagcccgucaccuacaagcucgacggcguggugugcaccgagaucgaccccaagcuggacaacuacuacaagaaggacaacagcuacuucaccgagcagccgaucgaccugguccccaaccagcccuaccccaacgccuccuucgacaacuucaaguucgugugcgacaacaucaaguucgccgacgaccucaaccagcugacgggguacaagaagccggccagccgcgagcugaaggugaccuucuuccccgaccucaacggcgacgucguggcgaucgacuacaagcacuacacccccuccuucaagaagggcgccaagcugcugcacaagcccaucguguggcacgucaacaacgccaccaacaaggccacguacaagccgaacaccuggugcauccggugccucuggagcaccaagcccguggagaccuccaacagcuucgacgugcugaaguccgaggacgcgcaggggauggacaaccuggccugcgaggaccucaagcccgucagcgaggaggugguggagaaccccacgauccagaaggacguccuggagugcaacgugaagaccaccgagguggucggcgacaucauccugaagccggccaacaacucccucaagaucaccgaggagguggggcacacggaccugauggccgccuacguggacaacagcucccugaccaucaagaagcccaacgagcucagccgcguccugggccugaagacccucgcgacccacgggcuggccgccgugaacuccgugcccugggacacgaucgccaacuacgccaagccguuccugaacaaggucgugagcaccaccaccaacaucgugacgcgcugccucaaccgggucugcaccaacuacaugcccuacuucuucacccugcugcuccagcugugcaccuucacccgcuccacgaacagccggaucaaggcguccaugcccaccaccaucgccaagaacaccgugaagagcgugggcaaguucugccuggaggccagcuucaacuaccucaagucccccaacuucagcaagcugaucaacaucaucaucugguuccugcuccuguccgucugccugggcagccucaucuacuccacggccgcccugggggugcugaugagcaaccucggcaugccguccuacugcaccggguaccgcgagggcuaccugaacagcaccaacgugaccaucgcgacguacugcaccggcuccauccccugcagcgucugccuguccgggcucgacagccuggacaccuaccccucccuggagaccauccagaucacgaucagcuccuucaagugggaccucaccgccuucggccugguggccgagugguuccuggccuacauccucuucacccgguucuucuacgugcuggggcuggccgcgaucaugcagcucuucuucagcuacuucgccguccacuucaucuccaacagcuggcugauguggcugaucaucaaccuggugcagauggcccccaucuccgccauggugcgcauguacaucuucuucgcgagcuucuacuacgucuggaagagcuacgugcacguggucgacggcugcaacuccagcaccugcaugaugugcuacaagcggaaccgcgccacgcggguggagugcaccaccaucgucaacggggugcgccgguccuucuacguguacgccaacggcggcaagggguucugcaagcuccacaacuggaacugcgucaacugcgacaccuucugcgccggcagcacguucaucuccgacgagguggcccgcgaccugagccugcaguucaagcggccgaucaaccccaccgaccaguccagcuacaucguggacuccgucaccgugaagaacgggagcauccaccucuacuucgacaaggcgggccagaagaccuacgagcgccacucccugagccacuucgugaaccuggacaaccuccgggccaacaacacgaaggggucccugcccaucaacgucaucguguucgacggcaagagcaagugcgaggaguccagcgccaaguccgccagcguguacuacucccagcugaugugccagcccauccuccugcuggaccaggcccucgucagcgacgugggcgacagcgcggagguggccgucaagauguucgacgccuacgugaacaccuucuccagcaccuucaacgugccgauggagaagcugaagacccuggucgccacggccgaggcggagcucgccaagaacgugucccuggacaacgugcugagcaccuucaucuccgccgcccgccagggguucgucgacagcgacguggagaccaaggacguggucgagugccucaagcugucccaccagagcgacaucgaggugaccggcgacuccugcaacaacuacaugcugacguacaacaagguggagaacaugaccccccgggaccucggggcgugcaucgacugcagcgcccgccacaucaacgcccaggucgccaagucccacaacaucgcccugaucuggaacgugaaggacuucaugagccuguccgagcagcuccggaagcagauccgcagcgcggccaagaagaacaaccugcccuucaagcugaccugcgccaccacgcgccagguggucaacguggugaccaccaagaucgcccucaagggcggguga

SEQ ID NO: 17968 - RNA, 5841 nt, Artificial Sequence
  SARS-CoV-2__MT745659.1__non-structural protein 3 (NSP3) CDS gc
auggcccccaccaaggugaccuucggcgacgacacggucaucgaggugcagggguacaagagcgugaacaucaccuucgagcuggacgagcgcaucgacaagguccucaacgagaagugcuccgccuacaccguggagcugggcaccgaggugaacgaguucgcgugcgucguggccgacgccgugaucaagacgcugcagccggucagcgagcuccugaccccccuggggaucgaccucgacgagugguccauggccaccuacuaccuguucgacgagagcggcgaguucaagcuggccucccacauguacugcagcuucuacccccccgacgaggacgaggaggagggggacugcgaggaggaggaguucgagccguccacccaguacgaguacggcacggaggacgacuaccagggcaagccccucgaguucggggcgaccagcgccgcccugcagcccgaggaggagcaggaggaggacuggcuggacgacgacucccagcagaccgugggccagcaggacgggagcgaggacaaccagaccacgaccauccagaccaucguggagguccagccccagcucgagauggagcugaccccgguggugcagacgaucgaggucaacuccuucagcggcuaccugaagcucaccgacaacguguacaucaagaacgccgacaucguggaggaggcgaagaaggucaagcccaccgugguggucaacgccgccaacguguaccugaagcacgggggcggcguggccggggcccugaacaaggcgaccaacaacgccaugcaggucgaguccgacgacuacaucgccacgaacggcccccucaagguggggggcagcugcguccuguccggccacaaccuggccaagcacugccuccacgugguggggcccaacgucaacaagggcgaggacauccagcugcugaagagcgccuacgagaacuucaaccagcacgaggugcuccuggcgccgcugcucuccgccgggaucuucggcgccgaccccauccacagccugcgggugugcgucgacaccgugcgcaccaacguguaccuggccgucuucgacaagaaccucuacgacaagcugguguccagcuuccuggagaugaagagcgagaagcagguggagcagaagaucgccgagauccccaaggaggaggucaagcccuucaucaccgaguccaagccgagcguggagcagcggaagcaggacgacaagaagaucaaggcgugcguggaggaggucacgaccacccucgaggagaucaaguuccugaccgagaaccugcuccuguacaucgacaucaacgggaaccugcaccccgacuccgccacgcucgugagcgacaucgacaucaccuuccugaagaaggacgcccccuacaucgugggcgacgucgugcaggagggcgugcugaccgccgucgugauccccaccaagaaggccgggggcacgaccgagaugcucgugaaggcgcugcgcaaggucccgaccgacaacuacaucaccacguaccccgggcagggccugaacggguacaccguggaggaggccaagaccgugcucaagaagugcaaguccgccuucuacauccugcccagcaucaucuccaacgagaagcaggagauccugggcaccgucagcuggaaccuccgggagaugcuggcccacgcggaggagacccgcaagcugaugcccgugugcguggagacgaaggccaucgucuccaccauccagcggaaguacaagggcaucaagauccaggagggggugguggacuacggcgcccgcuucuacuucuacaccagcaagaccacggucgccucccugaucaacacccucaacgaccugaacgagacccuggugaccaugccgcucggguacgugacgcacggccugaaccuggaggaggccgcgcgguacaugcgcagccucaagguccccgccaccguguccgugagcucccccgacgccgucaccgccuacaacggguaccugaccagcuccagcaagacgcccgaggagcacuucaucgagaccaucucccuggccggcagcuacaaggacuggagcuacuccggccagagcacccagcucgggaucgaguuccugaagcggggcgacaaguccguguacuacaccagcaacccgacgaccuuccaccuggacggggaggugaucaccuucgacaaccucaagacccugcugucccuccgcgagguccggacgaucaagguguucaccaccguggacaacaucaaccugcacacccaggucguggacaugagcaugacguacggccagcaguucggccccaccuaccuggacggggcggacgugaccaagaucaagccccacaacucccacgagggcaagaccuucuacguccucccgaacgacgacacgcugcgcguggaggccuucgaguacuaccacaccaccgaccccagcuuccuggggcgguacauguccgcccucaaccacaccaagaaguggaaguacccccaggugaacggccugacgagcaucaagugggccgacaacaacugcuaccuggccaccgcgcuccugacccugcagcagaucgagcucaaguucaaccccccggcccugcaggacgccuacuaccgcgcccgggcgggggaggccgccaacuucugcgcccugauccucgccuacugcaacaagaccgucggcgagcugggcgacgugcgcgagacgauguccuaccuguuccagcacgcgaaccucgacagcugcaagcggguccugaacguggugugcaagaccugcgggcagcagcagaccacccugaagggcgucgaggccgugauguacauggggacccucuccuacgagcaguucaagaagggcgugcagauccccugcacgugcgggaagcaggccaccaaguaccugguccagcaggagagccccuucgugaugauguccgcccccccggcccaguacgagcugaagcacggcaccuucaccugcgcgagcgaguacacgggcaacuaccagugcgggcacuacaagcacaucaccuccaaggagacccucuacugcaucgacggcgcccugcugaccaagagcagcgaguacaaggggcccaucacggacguguucuacaaggagaacuccuacaccaccaccaucaagcccgucacguacaagcucgacggcguggugugcaccgagaucgaccccaagcuggacaacuacuacaagaaggacaacagcuacuucaccgagcagccgaucgaccugguccccaaccagcccuaccccaacgccuccuucgacaacuucaaguucgugugcgacaacaucaaguucgccgacgaccucaaccagcugaccggguacaagaagccggccagccgcgagcugaaggugacguucuuccccgaccucaacggcgacgucguggcgaucgacuacaagcacuacacccccuccuucaagaagggcgccaagcugcugcacaagcccaucguguggcacgucaacaacgccaccaacaaggccaccuacaagccgaacacguggugcauccggugccucuggagcaccaagcccguggagaccuccaacagcuucgacgugcugaaguccgaggacgcgcaggggauggacaaccuggccugcgaggaccucaagcccgucagcgaggaggugguggagaaccccaccauccagaaggacguccuggagugcaacgugaagacgaccgagguggucggcgacaucauccugaagccggccaacaacucccucaagaucaccgaggagguggggcacaccgaccugauggccgccuacguggacaacagcucccugacgaucaagaagcccaacgagcucagccgcguccugggccugaagacccucgcgacccacgggcuggccgccgugaacuccgugcccugggacaccaucgccaacuacgccaagccguuccugaacaaggucgugagcacgaccaccaacaucgugacccgcugccucaaccgggucugcacgaacuacaugcccuacuucuucacccugcugcuccagcugugcaccuucacccgcuccaccaacagccggaucaaggcguccaugcccacgaccaucgccaagaacaccgugaagagcgugggcaaguucugccuggaggccagcuucaacuaccucaagucccccaacuucagcaagcugaucaacaucaucaucugguuccugcuccuguccgucugccugggcagccucaucuacuccaccgccgcccugggggugcugaugagcaaccucggcaugccguccuacugcacgggguaccgcgagggcuaccugaacagcaccaacgugaccaucgcgaccuacugcacgggcuccauccccugcagcgucugccuguccgggcucgacagccuggacaccuaccccucccuggagaccauccagaucaccaucagcuccuucaagugggaccucacggccuucggccugguggccgagugguuccuggccuacauccucuucacccgguucuucuacgugcuggggcuggccgcgaucaugcagcucuucuucagcuacuucgccguccacuucaucuccaacagcuggcugauguggcugaucaucaaccuggugcagauggcccccaucuccgccauggugcgcauguacaucuucuucgcgagcuucuacuacgucuggaagagcuacgugcacguggucgacggcugcaacuccagcaccugcaugaugugcuacaagcggaaccgcgccacccggguggagugcacgaccaucgucaacggggugcgccgguccuucuacguguacgccaacggcggcaagggguucugcaagcuccacaacuggaacugcgucaacugcgacaccuucugcgccggcagcaccuucaucuccgacgagguggcccgcgaccugagccugcaguucaagcggccgaucaaccccacggaccaguccagcuacaucguggacuccgucaccgugaagaacgggagcauccaccucuacuucgacaaggcgggccagaagaccuacgagcgccacucccugagccacuucgugaaccuggacaaccuccgggccaacaacaccaaggggucccugcccaucaacgucaucguguucgacggcaagagcaagugcgaggaguccagcgccaaguccgccagcguguacuacucccagcugaugugccagcccauccuccugcuggaccaggcccucgucagcgacgugggcgacagcgcggagguggccgucaagauguucgacgccuacgugaacacguucuccagcaccuucaacgugccgauggagaagcugaagacccuggucgccaccgccgaggcggagcucgccaagaacgugucccuggacaacgugcugagcacguucaucuccgccgcccgccagggguucgucgacagcgacguggagaccaaggacguggucgagugccucaagcugucccaccagagcgacaucgaggugaccggcgacuccugcaacaacuacaugcugaccuacaacaagguggagaacaugacgccccgggaccucggggcgugcaucgacugcagcgcccgccacaucaacgcccaggucgccaagucccacaacaucgcccugaucuggaacgugaaggacuucaugagccuguccgagcagcuccggaagcagauccgcagcgcggccaagaagaacaaccugcccuucaagcugaccugcgccaccacccgccagguggucaacguggugacgaccaagaucgcccucaagggcggguga

SEQ ID NO: 17969 - RNA, 5841 nt, Artificial Sequence
  SARS-CoV-2__MT745676.1__non-structural protein 3 (NSP3) CDS gc
auggcccccaccaaggugaccuucggcgacgacacggucaucgaggugcagggguacaagagcgugaacaucaccuucgagcuggacgagcgcaucgacaagguccucaacgagaagugcuccgccuacaccguggagcugggcaccgaggugaacgaguucgcgugcgucguggccgacgccgugaucaagacgcugcagccggucagcgagcuccugaccccccuggggaucgaccucgacgagugguccauggccaccuacuaccuguucgacgagagcggcgaguucaagcuggccucccacauguacugcagcuucuacccccccgacgaggacgaggaggagggggacugcgaggaggaggaguucgagccguccacccaguacgaguacggcacggaggacgacuaccagggcaagccccucgaguucggggcgaccagcgccgcccugcagcccgaggaggagcaggaggaggacuggcuggacgacgacucccagcagaccgugggccagcaggacgggagcgaggacaaccagaccacgaccauccagaccaucguggagguccagccccagcucgagauggagcugaccccgguggugcagacgaucgaggucaacuccuucagcggcuaccugaagcucaccgacaacguguacaucaagaacgccgacaucguggaggaggcgaagaaggucaagcccaccgugguggucaacgccgccaacguguaccugaagcacgggggcggcguggccggggcccugaacaaggcgaccaacaacgccaugcaggucgaguccgacgacuacaucgccacgaacggcccccucaagguggggggcagcugcguccuguccggccacaaccuggccaagcacugccuccacgugguggggcccaacgucaacaagggcgaggacauccagcugcugaagagcgccuacgagaacuucaaccagcacgaggugcuccuggcgccgcugcucuccgccgggaucuucggcgccgaccccauccacagccugcgggugugcgucgacaccgugcgcaccaacguguaccuggccgucuucgacaagaaccucuacgacaagcugguguccagcuuccuggagaugaagagcgagaagcagguggagcagaagaucgccgagauccccaaggaggaggucaagcccuucaucaccgaguccaagccgagcguggagcagcggaagcaggacgacaagaagaucaaggcgugcguggaggaggucacgaccacccucgaggagaccaaguuccugacggagaaccugcuccuguacaucgacaucaacgggaaccugcaccccgacuccgccacccucgugagcgacaucgacaucaccuuccugaagaaggacgcccccuacaucgugggcgacgucgugcaggagggcgugcugaccgccgucgugauccccacgaagaaggccgggggcaccaccgagaugcucgcgaaggcccugcgcaaggugccgaccgacaacuacaucacgaccuaccccgggcagggccugaacggguacaccgucgaggaggccaagaccgugcucaagaagugcaaguccgccuucuacauccugcccagcaucaucuccaacgagaagcaggagauccugggcaccgugagcuggaaccuccgggagaugcuggcgcacgccgaggagacgcgcaagcugaugcccgucugcguggagaccaaggccaucguguccaccauccagcggaaguacaagggcaucaagauccaggagggggucguggacuacggcgcccgcuucuacuucuacaccagcaagacgaccguggccucccugaucaacacccucaacgaccugaacgagacccuggucacgaugccgcucggguacgugacccacggccugaaccuggaggaggcggcccgguacaugcgcagccucaaggugcccgccaccgucuccgugagcucccccgacgccgugaccgccuacaacggguaccugacgagcuccagcaagacccccgaggagcacuucaucgagaccaucucccuggcgggcagcuacaaggacuggagcuacuccggccagagcacccagcucgggaucgaguuccugaagcggggcgacaaguccgucuacuacacgagcaacccgaccaccuuccaccuggacggggaggugaucaccuucgacaaccucaagacgcugcugucccuccgcgaggugcggaccaucaaggucuucaccaccguggacaacaucaaccugcacacgcagguggucgacaugagcaugaccuacggccagcaguucggccccaccuaccuggacggggccgacgugaccaagaucaagccccacaacucccacgagggcaagacguucuacgugcucccgaacgacgacacccugcgcgucgaggccuucgaguacuaccacaccaccgaccccagcuuccuggggcgguacauguccgcccucaaccacacgaagaaguggaaguacccccaggugaacggccugaccagcaucaagugggccgacaacaacugcuaccuggcgaccgcccuccugacccugcagcagaucgagcucaaguucaaccccccggcccugcaggacgccuacuaccgcgcgcgggccggggaggccgccaacuucugcgcccugauccucgcguacugcaacaagacggugggcgagcugggcgacguccgcgagaccauguccuaccuguuccagcacgccaaccucgacagcugcaagcgggugcugaacgucgugugcaagaccugcgggcagcagcagaccacccugaagggcguggaggccgucauguacauggggacgcucuccuacgagcaguucaagaagggcgugcagauccccugcaccugcgggaagcaggccaccaaguaccuggugcagcaggagagccccuucgucaugauguccgcccccccggcgcaguacgagcugaagcacggcaccuucacgugcgccagcgaguacaccggcaacuaccagugcgggcacuacaagcacaucaccuccaaggagacccucuacugcaucgacggcgcccugcugacgaagagcagcgaguacaaggggcccaucaccgacguguucuacaaggagaacuccuacaccaccacgaucaagcccgugaccuacaagcucgacggcgucgugugcaccgagaucgaccccaagcuggacaacuacuacaagaaggacaacagcuacuucaccgagcagccgaucgaccuggugcccaaccagcccuaccccaacgccuccuucgacaacuucaaguucgucugcgacaacaucaaguucgccgacgaccucaaccagcugacgggguacaagaagccggcgagccgcgagcugaaggugaccuucuuccccgaccucaacggcgacguggucgccaucgacuacaagcacuacacccccuccuucaagaagggcgccaagcugcugcacaagcccaucguguggcacgugaacaacgccaccaacaaggcgacguacaagccgaacaccuggugcauccggugccucuggagcaagaagcccgucgagaccuccaacagcuucgacgugcugaaguccgaggacgcccaggggauggacaaccuggccugcgaggaccucaagcccgugagcgaggaggucguggagaaccccaccauccagaaggacgugcuggagugcaacgucaagacgaccgagguggugggcgacaucauccugaagccggccaacaacucccucaagaucaccgaggaggucgggcacaccgaccugauggccgcguacguggacaacagcucccugacgaucaagaagcccaacgagcucagccgcgugcugggccugaagacccucgccacccacgggcuggccgccgucaacuccgugcccugggacaccaucgccaacuacgcgaagccguuccugaacaagguggucagcacgaccaccaacaucgugacccgcugccucaaccgggugugcacgaacuacaugcccuacuucuucacccugcugcuccagcugugcaccuucacccgcuccaccaacagccggaucaaggccuccaugcccacgaccaucgccaagaacaccgucaagagcgugggcaaguucugccuggaggccagcuucaacuaccucaagucccccaacuucagcaagcugaucaacaucaucaucugguuccugcuccuguccgugugccugggcagccucaucuacuccaccgccgcgcuggggguccugaugagcaaccucggcaugccguccuacugcacgggguaccgcgagggcuaccugaacagcaccaacgugaccaucgccaccuacugcacgggcuccauccccugcagcgugugccuguccgggcucgacagccuggacaccuaccccucccuggagaccauccagaucaccaucagcuccuucaagugggaccucacggccuucggccuggucgccgagugguuccuggccuacauccucuucacccgguucuucuacgugcuggggcuggcggccaucaugcagcucuucuucagcuacuucgccgugcacuucaucuccaacagcuggcugauguggcugaucaucaaccugguccagauggcccccaucuccgcgauggugcgcauguacaucuucuucgccagcuucuacuacguguggaagagcuacguccacgugguggacggcugcaacuccagcaccugcaugaugugcuacaagcggaaccgcgccacccgggucgagugcacgaccaucgugaacgggguccgccgguccuucuacguguacgccaacggcggcaagggguucugcaagcuccacaacuggaacugcgugaacugcgacaccuucugcgccggcagcaccuucaucuccgacgaggucgcgcgcgaccugagccugcaguucaagcggccgaucaaccccacggaccaguccagcuacaucguggacuccgugaccgucaagaacgggagcauccaccucuacuucgacaaggccggccagaagaccuacgagcgccacucccugagccacuucgugaaccuggacaaccuccgggccaacaacaccaaggggucccugcccaucaacgugaucgucuucgacggcaagagcaagugcgaggaguccagcgccaaguccgccagcguguacuacucccagcugaugugccagcccauccuccugcuggaccaggcgcucgugagcgacgucggcgacagcgccgagguggccgugaagauguucgacgccuacgucaacacguucuccagcaccuucaacgugccgauggagaagcugaagacccugguggccaccgcggaggccgagcucgccaagaacgucucccuggacaacgugcugagcacguucaucuccgccgcgcgccagggguucguggacagcgacgucgagaccaaggacgugguggagugccucaagcugucccaccagagcgacaucgaggucaccggcgacuccugcaacaacuacauccugaccuacaacaagguggagaacaugacgccccgggaccucggggccugcaucgacugcagcgcccgccacaucaacgcccagguggccaagucccacaacaucgcgcugaucuggaacgucaaggacuucaugagccuguccgagcagcuccggaagcagauccgcagcgccgccaagaagaacaaccugcccuucaagcugaccugcgccaccacccgccagguggugaacgucgugacgaccaagaucgcccucaagggcggguga

SEQ ID NO: 17970 - RNA, 5841 nt, Artificial Sequence
  SARS-CoV-2__MT745677.1__non-structural protein 3 (NSP3) CDS gc
auggcccccaccaaggugaccuucggcgacgacacggucaucgaggugcagggguacaagagcgugaacaucaccuucgagcuggacgagcgcaucgacaagguccucaacgagaagugcuccgccuacaccguggagcugggcaccgaggugaacgaguucgcgugcgucguggccgacgccgugaucaagacgcugcagccggucagcgagcuccugaccccccuggggaucgaccucgacgagugguccauggccaccuacuaccuguucgacgagagcggcgaguucaagcuggccucccacauguacugcagcuucuacccccccgacgaggacgaggaggagggggacugcgaggaggaggaguucgagccguccacccaguacgaguacggcacggaggacgacuaccagggcaagccccucgaguucggggcgaccagcgccgcccugcagcccgaggaggagcaggaggaggacuggcuggacgacgacucccagcagaccgugggccagcaggacgggagcgaggacaaccagaccacgaccauccagaccaucguggagguccagccccagcucgagauggagcugaccccgguggugcagacgaucgaggucaacuccuucagcggcuaccugaagcucaccgacaacguguacaucaagaacgccgacaucguggaggaggcgaagaaggucaagcccaccgugguggucaacgccgccaacguguaccugaagcacgggggcggcguggccggggcccugaacaaggcgaccaacaacgccaugcaggucgaguccgacgacuacaucgccacgaacggcccccucaagguggggggcagcugcguccuguccggccacaaccuggccaagcacugccuccacgugguggggcccaacgucaacaagggcgaggacauccagcugcugaagagcgccuacgagaacuucaaccagcacgaggugcuccuggcgccgcugcucuccgccgggaucuucggcgccgaccccauccacagccugcgggugugcgucgacaccgugcgcaccaacguguaccuggccgucuucgacaagaaccucuacgacaagcugguguccagcuuccuggagaugaagagcgagaagcagguggagcagaagaucgccgagauccccaaggaggaggucaagcccuucaucaccgaguccaagccgagcguggagcagcggaagcaggacgacaagaagaucaaggcgugcguggaggaggucacgaccacccucgaggagaccaaguuccugacggagaaccugcuccuguacaucgacaucaacgggaaccugcaccccgacuccgccacccucgugagcgacaucgacaucaccuuccugaagaaggacgcccccuacaucgugggcgacgucgugcaggagggcgugcugaccgccgucgugauccccacgaagaaggccgggggcaccaccgagaugcucgcgaaggcccugcgcaaggugccgaccgacaacuacaucacgaccuaccccgggcagggccugaacggguacaccgucgaggaggccaagaccgugcucaagaagugcaaguccgccuucuacauccugcccagcaucaucuccaacgagaagcaggagauccugggcaccgugagcuggaaccuccgggagaugcuggcgcacgccgaggagacgcgcaagcugaugcccgucugcguggagaccaaggccaucguguccaccauccagcggaaguacaagggcaucaagauccaggagggggucguggacuacggcgcccgcuucuacuucuacaccagcaagacgaccguggccucccugaucaacacccucaacgaccugaacgagacccuggucacgaugccgcucggguacgugacccacggccugaaccuggaggaggcggcccgguacaugcgcagccucaaggugcccgccaccgucuccgugagcucccccgacgccgugaccgccuacaacggguaccugacgagcuccagcaagacccccgaggagcacuucaucgagaccaucucccuggcgggcagcuacaaggacuggagcuacuccggccagagcacccagcucgggaucgaguuccugaagcggggcgacaaguccgucuacuacacgagcaacccgaccaccuuccaccuggacggggaggugaucaccuucgacaaccucaagacgcugcugucccuccgcgaggugcggaucaucaaggucuucaccaccguggacaacaucaaccugcacacccagguggucgacaugagcaugacguacggccagcaguucggccccaccuaccuggacggggccgacgugaccaagaucaagccccacaacucccacgagggcaagaccuucuacgugcucccgaacgacgacacgcugcgcgucgaggccuucgaguacuaccacaccaccgaccccagcuuccuggggcgguacauguccgcccucaaccacaccaagaaguggaaguacccccaggugaacggccugacgagcaucaagugggccgacaacaacugcuaccuggcgaccgcccuccugacccugcagcagaucgagcucaaguucaaccccccggcccugcaggacgccuacuaccgcgcgcgggccggggaggccgccaacuucugcgcccugauccucgcguacugcaacaagaccgugggcgagcugggcgacguccgcgagacgauguccuaccuguuccagcacgccaaccucgacagcugcaagcgggugcugaacgucgugugcaagaccugcgggcagcagcagaccacccugaagggcguggaggccgucauguacauggggacccucuccuacgagcaguucaagaagggcgugcagauccccugcacgugcgggaagcaggccaccaaguaccuggugcagcaggagagccccuucgucaugauguccgcccccccggcgcaguacgagcugaagcacggcaccuucaccugcgccagcgaguacacgggcaacuaccagugcgggcacuacaagcacaucaccuccaaggagacccucuacugcaucgacggcgcccugcugaccaagagcagcgaguacaaggggcccaucacggacguguucuacaaggagaacuccuacaccaccaccaucaagcccgugacguacaagcucgacggcgucgugugcaccgagaucgaccccaagcuggacaacuacuacaagaaggacaacagcuacuucaccgagcagccgaucgaccuggugcccaaccagcccuaccccaacgccuccuucgacaacuucaaguucgucugcgacaacaucaaguucgccgacgaccucaaccagcugaccggguacaagaagccggcgagccgcgagcugaaggugacguucuuccccgaccucaacggcgacguggucgccaucgacuacaagcacuacacccccuccuucaagaagggcgccaagcugcugcacaagcccaucguguggcacgugaacaacgccaccaacaaggcgaccuacaagccgaacacguggugcauccggugccucuggagcaccaagcccgucgagaccuccaacagcuucgacgugcugaaguccgaggacgcccaggggauggacaaccuggccugcgaggaccucaagcccgugagcgaggaggucguggagaaccccaccauccagaaggacgugcuggagugcaacgucaagacgaccgagguggugggcgacaucauccugaagccggccaacaacucccucaagaucaccgaggaggucgggcacaccgaccugauggccgcguacguggacaacagcucccugacgaucaagaagcccaacgagcucagccgcgugcugggccugaagacccucgccacccacgggcuggccgccgucaacuccgugcccugggacaccaucgccaacuacgcgaagccguuccugaacaagguggucagcacgaccaccaacaucgugacccgcugccucaaccgggugugcacgaacuacaugcccuacuucuucacccugcugcuccagcugugcaccuucacccgcuccaccaacagccggaucaaggccuccaugcccacgaccaucgccaagaacaccgucaagagcgugggcaaguucugccuggaggccagcuucaacuaccucaagucccccaacuucagcaagcugaucaacaucaucaucugguuccugcuccuguccgugugccugggcagccucaucuacuccaccgccgcgcuggggguccugaugagcaaccucggcaugccguccuacugcacgggguaccgcgagggcuaccugaacagcaccaacgugaccaucgccaccuacugcacgggcuccauccccugcagcgugugccuguccgggcucgacagccuggacaccuaccccucccuggagaccauccagaucaccaucagcuccuucaagugggaccucacggccuucggccuggucgccgagugguuccuggccuacauccucuucacccgguucuucuacgugcuggggcuggcggccaucaugcagcucuucuucagcuacuucgccgugcacuucaucuccaacagcuggcugauguggcugaucaucaaccugguccagauggcccccaucuccgcgauggugcgcauguacaucuucuucgccagcuucuacuacguguggaagagcuacguccacgugguggacggcugcaacuccagcaccugcaugaugugcuacaagcggaaccgcgccacccgggucgagugcacgaccaucgugaacgggguccgccgguccuucuacguguacgccaacggcggcaagggguucugcaagcuccacaacuggaacugcgugaacugcgacaccuucugcgccggcagcaccuucaucuccgacgaggucgcgcgcgaccugagccugcaguucaagcggccgaucaaccccacggaccaguccagcuacaucguggacuccgugaccgucaagaacgggagcauccaccucuacuucgacaaggccggccagaagaccuacgagcgccacucccugagccacuucgugaaccuggacaaccuccgggccaacaacaccaaggggucccugcccaucaacgugaucgucuucgacggcaagagcaagugcgaggaguccagcgccaaguccgccagcguguacuacucccagcugaugugccagcccauccuccugcuggaccaggcgcucgugagcgacgucggcgacagcgccgagguggccgugaagauguucgacgccuacgucaacacguucuccagcaccuucgacgugccgauggagaagcugaagacccugguggccaccgcggaggccgagcucgccaagaacgucucccuggacaacgugcugagcacguucaucuccgccgcgcgccagggguucguggacagcgacgucgagaccaaggacgugguggagugccucaagcugucccaccagagcgacaucgaggucaccggcgacuccugcaacaacuacaugcugaccuacaacaagguggagaacaugacgccccgggaccucggggccugcaucgacugcagcgcccgccacaucaacgcccagguggccaagucccacaacaucgcgcugaucuggaacgucaaggacuucaugagccuguccgagcagcuccggaagcagauccgcagcgccgccaagaagaacaaccugcccuucaagcugaccugcgccaccacccgccagguggugaacgucgugacgaccaagaucgcccucaagggcggguga

SEQ ID NO: 17971 - RNA, 5841 nt, Artificial Sequence
  SARS-CoV-2__MT745688.1__non-structural protein 3 (NSP3) CDS gc
auggcccccaccaaggugaccuucggcgacgacacggucaucgaggugcagggguacaagagcgugaacaucaccuucgagcuggacgagcgcaucgacaagguccucaacgagaagugcuccgccuacaccguggagcugggcaccgaggugaacgaguucgcgugcgucguggccgacgccgugaucaagacgcugcagccggucagcgagcuccugaccccccuggggaucgaccucgacgagugguccauggccaccuacuaccuguucgacgagagcggcgaguucaagcuggccucccacauguacugcagcuucuacccccccgacgaggacgaggaggagggggacugcgaggaggaggaguucgagccguccacccaguacgaguacggcacggaggacgacuaccagggcaagccccucgaguucggggcgaccagcgccgcccugcagcccgaggaggagcaggaggaggacuggcuggacgacgacucccagcagaccgugggccagcaggacgggagcgacgacaaccagaccacgaccauccagaccaucguggagguccagccccagcucgagauggagcugaccccgguggugcagacgaucgaggucaacuccuucagcggcuaccugaagcucaccgacaacguguacaucaagaacgccgacaucguggaggaggcgaagaaggucaagcccaccgugguggucaacgccgccaacguguaccugaagcacgggggcggcguggccggggcccugaacaaggcgaccaacaacgccaugcaggucgaguccgacgacuacaucgccacgaacggcccccucaagguggggggcagcugcguccuguccggccacaaccuggccaagcacugccuccacgugguggggcccaacgucaacaagggcgaggacauccagcugcugaagagcgccuacgagaacuucaaccagcacgaggugcuccuggcgccgcugcucuccgccgggaucuucugcgccgaccccauccacagccugcgggugugcgucgacaccgugcgcaccaacguguaccuggccgucuucgacaagaaccucuacgacaagcugguguccagcuuccuggagaugaagagcgagaagcagguggagcagaagaucgccgagauccccaaggaggaggucaagcccuucaucaccgaguccaagccgagcguggagcagcggaagcaggacgacaagaagaucaaggcgugcguggaggaggucacgaccacccucgaggagaccaaguuccugacggagaaccugcuccuguacaucgacaucaacggcaaccugcaccccgacuccgccacccucgugagcgacaucgacaucaccuuccugaagaaggacgcccccuacaucgugggggacgucgugcaggagggcgugcugaccgccgucgugauccccacgaagaaggccggcgggaccaccgagaugcucgcgaaggcccugcgcaaggugccgaccgacaacuacaucacgaccuaccccggccaggggcugaacggcuacaccgucgaggaggccaagaccgugcucaagaagugcaaguccgccuucuacauccugcccagcaucaucuccaacgagaagcaggagauccuggggaccgugagcuggaaccuccgggagaugcuggcgcacgccgaggagacgcgcaagcugaugcccgucugcguggagaccaaggccaucguguccaccauccagcggaaguacaagggcaucaagauccaggagggcgucguggacuacggggcccgcuucuacuucuacaccagcaagacgaccguggccucccugaucaacacccucaacgaccugaacgagacccuggucacgaugccgcucggcuacgugacccacgggcugaaccuggaggaggcggcccgguacaugcgcagccucaaggugcccgccaccgucuccgugagcucccccgacgccgugaccgccuacaacggcuaccugacgagcuccagcaagacccccgaggagcacuucaucgagaccaucucccuggcggggagcuacaaggacuggagcuacuccggccagagcacccagcucggcaucgaguuccugaagcggggggacaaguccgucuacuacacgagcaacccgaccaccuuccaccuggacggcgaggugaucaccuucgacaaccucaagacgcugcugucccuccgcgaggugcggaccaucaaggucuucaccaccguggacaacaucaaccugcacacgcagguggucgacaugagcaugaccuacgggcagcaguucggccccaccuaccuggacggcgccgacgugaccaagaucaagccccacaacucccacgaggggaagacguucuacgugcucccgaacgacgacacccugcgcgucgaggccuucgaguacuaccacaccaccgaccccagcuuccugggccgguacauguccgcccucaaccacacgaagaaguggaaguacccccaggugaacgggcugaccagcaucaagugggccgacaacaacugcuaccuggcgaccgugcuccugacccugcagcagaucgagcucaaguucaaccccccggcccugcaggacgccuacuaccgcgcccgggcgggcgaggccgccaacuucugcgcccugauccucgccuacugcaacaagacggucggggagcugggcgacgugcgcgagaccauguccuaccuguuccagcacgcgaaccucgacagcugcaagcggguccugaacguggugugcaagaccugcggccagcagcagaccacccugaagggggucgaggccgugauguacaugggcacgcucuccuacgagcaguucaagaagggggugcagauccccugcaccugcggcaagcaggccaccaaguaccugguccagcaggagagccccuucgugaugauguccgcccccccggcccaguacgagcugaagcacgggaccuucacgugcgcgagcgaguacaccggcaacuaccagugcggccacuacaagcacaucaccuccaaggagacccucuacugcaucgacggggcccugcugacgaagagcagcgaguacaagggccccaucaccgacguguucuacaaggagaacuccuacaccaccacgaucaagcccgucaccuacaagcucgacgggguggugugcaccgagaucgaccccaagcuggacaacuacuacaagaaggacaacagcuacuucaccgagcagccgaucgaccugguccccaaccagcccuaccccaacgccuccuucgacaacuucaaguucgugugcgacaacaucaaguucgccgacgaccucaaccagcugacgggcuacaagaagccggccagccgcgagcugaaggugaccuucuuccccgaccucaacggggacgucguggcgaucgacuacaagcacuacacccccuccuucaagaagggcgccaagcugcugcacaagcccaucguguggcacgucaacaacgccaccaacaaggccacguacaagccgaacaccuggugcauccggugccucuggagcaccaagcccguggagaccuccaacagcuucgacgugcugaaguccgaggacgcgcagggcauggacaaccuggccugcgaggaccucaagcccgucagcgaggaggugguggagaaccccacgauccagaaggacguccuggagugcaacgugaagaccaccgagguggucggggacaucauccugaagccggccaacaacucccucaagaucaccgaggaggugggccacacggaccugauggccgccuacguggacaacagcucccugaccaucaagaagcccaacgagcucagccgcguccuggggcugaagacccucgcgacccacggccuggccgccgugaacuccgugcccugggacacgaucgccaacuacgccaagccguuccugaacaaggucgugagcaccaccaccaacaucgugacgcgcugccucaaccgggucugcaccaacuacaugcccuacuucuucacccugcugcuccagcugugcaccuucacccgcuccacgaacagccggaucaaggcguccaugcccaccaccaucgccaagaacaccgugaagagcguggggaaguucugccuggaggccagcuucaacuaccucaagucccccaacuucagcaagcugaucaacaucaucaucugguuccugcuccuguccgucugccugggcagccucaucuacuccacggccgcccugggcgugcugaugagcaaccucgggaugccguccuacugcaccggcuaccgcgagggguaccugaacagcaccaacgugaccaucgcgacguacugcaccggcuccauccccugcagcgucugccuguccggccucgacagccuggacaccuaccccucccuggagaccauccagaucacgaucagcuccuucaagugggaccucaccgccuucgggcugguggccgagugguuccuggccuacauccucuucacccgguucuucuacgugcugggccuggccgcgaucaugcagcucuucuucagcuacuucgccguccacuucaucuccaacagcuggcugauguggcugaucaucaaccuggugcagauggcccccaucuccgccauggugcgcauguacaucuucuucgcgagcuucuacuacgucuggaagagcuacgugcacguggucgacgggugcaacuccagcaccugcaugaugugcuacaagcggaaccgcgccacgcggguggagugcaccaccaucgucaacggcgugcgccgguccuucuacguguacgccaacgggggcaagggcuucugcaagcuccacaacuggaacugcgucaacugcgacaccuucugcgccgggagcacguucaucuccgacgagguggcccgcgaccugagccugcaguucaagcggccgaucaaccccaccgaccaguccagcuacaucguggacuccgucaccgugaagaacggcagcauccaccucuacuucgacaaggcggggcagaagaccuacgagcgccacucccugagccacuucgugaaccuggacaaccuccgggccaacaacacgaagggcucccugcccaucaacgucaucguguucgacgggaagagcaagugcgaggaguccagcgccaaguccgccagcguguacuacucccagcugaugugccagcccauccuccugcuggaccaggcccucgucagcgacgugggcgacagcgcggagguggccgucaagauguucgacgccuacgugaacaccuucuccagcaccuucaacgugccgauggagaagcugaagacccuggucgccacggccgaggcggagcucgccaagaacgugucccuggacaacgugcugagcaccuucaucuccgccgcccgccagggcuucgucgacagcgacguggagaccaaggacguggucgagugccucaagcugucccaccagagcgacaucgaggugaccggggacuccugcaacaacuacaugcugacguacaacaagguggagaacaugaccccccgggaccucggcgcgugcaucgacugcagcgcccgccacaucaacgcccaggucgccaagucccacaacaucgcccugaucuggaacgugaaggacuucaugagccuguccgagcagcuccggaagcagauccgcagcgcggccaagaagaacaaccugcccuucaagcugaccugcgccaccacgcgccagguggucaacguggugaccaccaagaucgcccucaaggggggcuga

SEQ ID NO: 17972 - RNA, 5841 nt, Artificial Sequence
  SARS-CoV-2__MT745694.1__non-structural protein 3 (NSP3) CDS gc
auggcccccaccaaggugaccuucggcgacgacacggucaucgaggugcagggguacaagagcgugaacaucaccuucgagcuggacgagcgcaucgacaagguccucaacgagaagugcuccgccuacaccguggagcugggcaccgaggugaacgaguucgcgugcgucguggccgacgccgugaucaagacgcugcagccggucagcgagcuccugaccccccuggggaucgaccucgacgagugguccauggccaccuacuaccuguucgacgagagcggcgaguucaagcuggccucccacauguacugcagcuucuacccccccgacgaggacgaggaggagggggacugcgaggaggaggaguucgagccguccacccaguacgaguacggcacggaggacgacuaccagggcaagccccucgaguucggggcgaccagcgccgcccugcagcccgaggaggagcaggaggaggacuggcuggacgacgacucccagcagaccgugggccagcaggacgggagcgaggacaaccagaccacgaccauccagaccaucguggagguccagccccagcucgagauggagcugaccccgguggugcagacgaucgaggucaacuccuucagcggcuaccugaagcucaccgacaacguguacaucaagaacgccgacaucguggaggaggcgaagaaggucaagcccaccgugguggucaacgccgccaacguguaccugaagcacgggggcggcguggccggggcccugaacaaggcgaccaacaacgccaugcaggucgaguccgacgacuacaucgccacgaacggcccccucaagguggggggcagcugcguccuguccggccacaaccuggccaagcacugccuccacgugguggggcccaacgucaacaagggcgaggacauccagcugcugaagagcgccuacgagaacuucaaccagcacgaggugcuccuggcgccgcugcucuccgccgggaucuucggcgccgaccccauccacagccugcgggugugcgucgacaccgugcgcaccaacguguaccuggccgucuucgacaagaaccucuacgacaagcugguguccagcuuccuggagaugaagagcgagaagcagguggagcagaagaucgccgagauccccaaggaggaggucaagcccuucaucaccgaguccaagccgagcguggagcagcggaagcaggacgacaagaagaucaaggcgugcguggaggaggucacgaccacccucgaggagaccaaguuccugacggagaaccugcuccuguacaucgacaucaacgggaaccugcaccccgacuccgccacccucgugagcgacaucgacaucaccuuccugaagaaggacgcccccuacaucgugggcgacgucgugcaggagggcgugcugaccgccgucgugauccccacgaagaaggccgggggcaccaccgagaugcucgcgaaggcccugcgcaaggugccgaccgacaacuacaucacgaccuaccccgggcagggccugaacggguacaccgucgaggaggccaagaccgugcucaagaagugcaaguccgccuucuacauccugcccagcaucaucuccaacgagaagcaggagauccugggcaccgugagcuggaaccuccgggagaugcuggcgcacgccgaggagacgcgcaagcugaugcccgucugcguggagaccaaggccaucguguccaccauccagcggaaguacaagggcaucaagauccaggagggggucguggacuacggcgcccgcuucuacuucuacaccagcaagacgaccguggccucccugaucaacacccucaacgaccugaacgagacccuggucacgaugccgcucggguacgugacccacggccugaaccuggaggaggcggcccgguacaugcgcagccucaaggugcccgccaccgucuccgugagcucccccgacgccgugaccgccuacaacggguaccugacgagcuccagcaagacccccgaggagcacuucaucgagaccaucucccuggcgggcagcuacaaggacuggagcuacuccggccagagcacccagcucgggaucgaguuccugaagcggggcgacaaguccgucuacuacacgagcaacccgaccaccuuccaccuggacggggaggugaucaccuucgacaaccucaagacgcugcugucccuccgcgaggugcggaccaucaaggucuucaccaccguggacaacaucaaccugcacacgcagguggucgacaugagcaugaccuacggccagcaguucggccccaccuaccuggacggggccgacgugaccaagaucaagccccacaacucccacgagggcaagacguucuacgugcucccgaacgacgacacccugcgcgucgaggccuucgaguacuaccacaccaccgaccccagcuuccuggggcgguacauguccgcccucaaccacacgaagaaguggaaguacccccaggugaacggccugaccagcaucaagugggccgacaacaacugcuaccuggcgaccgcccuccugacccugcagcagaucgagcucaaguucaaccccccggcccugcaggacgccuacuaccgcgcgcgggccggggaggccgccaacuucugcgcccugauccucgcguacugcaacaagacggugggcgagcugggcgacguccgcgagaccauguccuaccuguuccagcacgccaaccucgacagcugcaagcgggugcugaacgucgugugcaagaccugcgggcagcagcagaccacccugaagggcguggaggccgucauguacauggggacgcucuccuacgagcaguucaagaagggcgugcagauccccugcaccugcgggaagcaggccaccaaguaccuggugcagcaggagagccccuucgucaugauguccgcccccccggcgcaguacgagcugaagcacggcaccuucacgugcgccagcgaguacaccggcaacuaccagugcgggcacuacaagcacaucaccuccaaggagacccucuacugcaucgacggcgcccugcugacgaagagcagcgaguacaaggggcccaucaccgacguguucuacaaggagaacuccuacaccaccacgaucaagcccgugaccuacaagcucgacggcgucgugugcaccgagaucgaccccaagcuggacaacuacuacaagaaggacaacagcuacuucaccgagcagccgaucgaccuggugcccaaccagcccuaccccaacgccuccuucgacaacuucaaguucgucugcgacaacaucaaguucgccgacgaccucaaccagcugacgggguacaagaagccggcgagccgcgagcugaaggugaccuucuuccccgaccucaacggcgacguggucgccaucgacuacaagcacuacacccccuccuucaagaagggcgccaagcugcugcacaagcccaucguguggcacgugaacaacgccaccaacaaggcgacguacaagccgaacaccuggugcauccggugccucuggagcaccaagcccgucgagaccuccaacagcuucgacgugcugaaguccgaggacgcccaggggauggacaaccuggccugcgaggaccucaagcccgugagcgaggaggucguggagaaccccacgauccagaaggacgugcuggagugcaacgucaagaccaccgagguggugggcgacaucauccugaagccggccaacaacucccucaagaucaccgaggaggucgggcacacggaccugauggccgcguacguggacaacagcucccugaccaucaagaagcccaacgagcucagccgcgugcugggccugaagacccucgccacccacgggcuggccgccgucaacuccgugcccugggacacgaucgccaacuacgcgaagccguuccugaacaagguggucagcaccaccaccaacaucgugacgcgcugccucaaccgggugugcaccaacuacaugcccuacuucuucacccugcugcuccagcugugcaccuucacccgcuccacgaacagccggaucaaggucuccaugcccaccaccaucgccaagaacaccgugaagagcgugggcaaguucugccuggaggccagcuucaacuaccucaagucccccaacuucagcaagcugaucaacaucaucaucugguuccugcuccuguccgucugccugggcagccucaucuacuccacggccgcccugggggugcugaugagcaaccucggcaugccguccuacugcaccggguaccgcgagggcuaccugaacagcaccaacgugaccaucgcgacguacugcaccggcuccauccccugcagcgucugccuguccgggcucgacagccuggacaccuaccccucccuggagaccauccagaucacgaucagcuccuucaagugggaccucaccgccuucggccugguggccgagugguuccuggccuacauccucuucacccgguucuucuacgugcuggggcuggccgcgaucaugcagcucuucuucagcuacuucgccguccacuucaucuccaacagcuggcugauguggcugaucaucaaccuggugcagauggcccccaucuccgccauggugcgcauguacaucuucuucgcgagcuucuacuacgucuggaagagcuacgugcacguggucgacggcugcaacuccagcaccugcaugaugugcuacaagcggaaccgcgccacgcggguggagugcaccaccaucgucaacggggugcgccgguccuucuacguguacgccaacggcggcaagggguucugcaagcuccacaacuggaacugcgucaacugcgacaccuucugcgccggcagcacguucaucuccgacgagguggcccgcgaccugagccugcaguucaagcggccgaucaaccccaccgaccaguccagcuacaucguggacuccgucaccgugaagaacgggagcauccaccucuacuucgacaaggcgggccagaagaccuacgagcgccacucccugagccacuucgugaaccuggacaaccuccgggccaacaacacgaaggggucccugcccaucaacgucaucguguucgacggcaagagcaagugcgaggaguccagcgccaaguccgccagcguguacuacucccagcugaugugccagcccauccuccugcuggaccaggcccucgucagcgacgugggcgacagcgcggagguggccgucaagauguucgacgccuacgugaacaccuucuccagcaccuucaacgugccgauggagaagcugaagacccuggucgccacggccgaggcggagcucgccaagaacgugucccuggacaacgugcugagcaccuucaucuccgccgcccgccagggguucgucgacagcgacguggagaccaaggacguggucgagugccucaagcugucccaccagagcgacaucgaggugaccggcgacuccugcaacaacuacaugcugacguacaacaagguggagaacaugaccccccgggaccucggggcgugcaucgacugcagcgcccgccacaucaacgcccaggucgccaagucccacaacaucgcccugaucuggaacgugaaggacuucaugagccuguccgagcagcuccggaagcagauccgcagcgcggccaagaagaacaaccugcccuucaagcugaccugcgccaccacgcgccagguggucaacguggugaccaccaagaucgcccucaagggcggguga

SEQ ID NO: 17973 - RNA, 5841 nt, Artificial Sequence
  SARS-CoV-2__MT745711.1__non-structural protein 3 (NSP3) CDS gc
auggcccccaccaaggugaccuucggcgacgacacggucaucgaggugcagggguacaagagcgugaacaucaccuucgagcuggacgagcgcaucgacaagguccucaacgagaagugcuccgccuacaccguggagcugggcaccgaggugaacgaguucgcgugcgucguggccgacgccgugaucaagacgcugcagccggucagcgagcuccugaccccccuggggaucgaccucgacgagugguccauggccaccuacuaccuguucgacgagagcggcgaguucaagcuggccucccacauguacugcagcuucuacccccccgacgaggacgaggaggagggggacugcgaggaggaggaguucgagccguccacccaguacgaguacggcacggaggacgacuaccagggcaagccccucgaguucggggcgaccagcgccgcccugcagcccgaggaggagcaggaggaggacuggcuggacgacgacucccagcagaccgugggccagcaggacgggagcgaggacaaccagaccacgaccauccagaccaucguggagguccagccccagcucgagauggagcugaccccgguggugcagacgaucgaggucaacuccuucagcggcuaccugaagcucaccgacaacguguacaucaagaacgccgacaucguggaggaggcgaagaaggucaagcccaccgugguggucaacgccgccaacguguaccugaagcacgggggcggcguggccggggcccugaacaaggcgaccaacaacgccaugcaggucgaguccgacgacuacaucgccacgaacggcccccucaagguggggggcagcugcguccuguccggccacaaccuggccaagcacugccuccacgugguggggcccaacgucaacaagggcgaggacauccagcugcugaagagcgccuacgagaacuucaaccagcacgaggugcuccuggcgccgcugcucuccgccgggaucuucggcgccgaccccauccacagccugcgggugugcgucgacaccgugcgcaccaacguguaccuggccgucuucgacaagaaccucuacgacaagcugguguccagcuuccuggagaugaagagcgagaagcagguggagcagaagaucgccgagauccccaaggaggaggucaagcccuucaucaccgaguccaagccgagcguggagcagcggaagcaggacgacaagaagaucaaggcgugcguggaggaggucacgaccacccucgaggagaccaaguuccugacggagaaccugcuccuguacaucgacaucaacgggaaccugcaccccgacuccgccacccucgugagcgacaucgacaucaccuuccugaagaaggacgcccccuacaucgugggcgacgucgugcaggagggcgugcugaccgccgucgugauccccacgaagaaggccgggggcaccaccgagaugcucgcgaaggcccugcgcaaggugccgaccgacaacuacaucacgaccuaccccgggcagggccugaacggguacaccgucgaggaggccaagaccgugcucaagaagugcaaguccgccuucuacauccugcccagcaucaucuccaacgagaagcaggagauccugggcaccgugagcuggaaccuccgggagaugcuggcgcacgccgaggagacgcgcaagcugaugcccgucugcguggagaccaaggccaucguguccaccauccagcggaaguacaagggcaucaagauccaggagggggucguggacuacggcgcccgcuucuacuucuacaccagcaagacgaccguggccucccugaucaacacccucaacgaccugaacgagacccuggucacgaugccgcucggguacgugacccacggccugaaccuggaggaggcggcccgguacaugcgcagccucaaggugcccgccaccgucuccgugagcucccccgacgccgugaccgccuacaacggguaccugacgagcuccagcaagacccccgaggagcacuucaucgagaccaucucccuggcgggcagcuacaaggacuggagcuacuccggccagagcacccagcucgggaucgaguuccugaagcggggcgacaaguccgucuacuacacgagcaacccgaccaccuuccaccuggacggggaggugaucaccuucgacaaccucaagacgcugcugucccuccgcgaggugcggaccaucaaggucuucaccaccguggacaacaucaaccugcacacgcagguggucgacaugagcaugaccuacggccagcaguucggccccaccuaccuggacggggccgacgugaccaagaucaagccccacaacucccacgagggcaagacguucuacgugcucccgaacgacgacacccugcgcgucgaggccuucgaguacuaccacaccaccgaccccagcuuccuggggcgguacauguccgcccucaaccacacgaagaaguggaaguacccccaggugaacggccugaccagcaucaagugggccgacaacaacugcuaccuggcgaccgcccuccugacccugcagcagaucgagcucaaguucaaccccccggcccugcaggacgccuacuaccgcgcgcgggccggggaggccgccaacuucugcgcccugauccucgcguacugcaacaagacggugggcgagcugggcgacguccgcgagaccauguccuaccuguuccagcacgccaaccucgacagcugcaagcgggugcugaacgucgugugcaagaccugcgggcagcagcagaccacccugaagggcguggaggccgucauguacauggggacgcucuccuacgagcaguucaagaagggcgugcagauccccugcaccugcgggaagcaggccaccaaguaccuggugcagcaggagagccccuucgucaugauguccgcccccccggcgcaguacgagcugaagcacggcaccuucacgugcgccagcgaguacaccggcaacuaccagugcgggcacuacaagcacaucaccuccaaggagacccucuacugcaucgacggcgcccugcugacgaagagcagcgaguacaaggggcccaucaccgacguguucuacaaggagaacuccuacaccaccacgaucaagcccgugaccuacaagcucgacggcgucgugugcaccgagaucgaccccaagcuggacaacuacuacaagaaggacaacagcuacuucaccgagcagccgaucgaccuggugcccaaccagcccuaccccaacgccuccuucgacaacuucaaguucgucugcgacaacaucaaguucgccgacgaccucaaccagcugacgggguacaagaagccggcgagccgcgagcugaaggugaccuucuuccccgaccucaacggcgacguggucgccaucgacuacaagcacuacacccccuccuucaagaagggcgccaagcugcugcacaagcccaucguguggcacgugaacaacgccaccaacaaggcgacguacaagccgaacaccuggugcauccggugccucuggagcaccaagcccgucgagaccuccaacagcuucgacgugcugaaguccgaggacgcccaggggauggacaaccuggccugcgaggaccucaagcccgugagcgaggaggucguggagaaccccacgauccagaaggacuuccuggagugcaacgugaagaccaccgaggucgugggcgacaucauccugaagccggccaacaacucccucaagaucaccgaggagguggggcacacggaccugauggccgcguacgucgacaacagcucccugaccaucaagaagcccaacgagcucagccgcgugcugggccugaagacccucgccacccacgggcuggccgccgugaacuccguccccugggacacgaucgccaacuacgcgaagccguuccugaacaagguggugagcaccaccaccaacaucgucacgcgcugccucaaccgggugugcaccaacuacaugcccuacuucuucacccugcugcuccagcugugcaccuucacccgcuccacgaacagccggaucaaggccuccaugcccaccaccaucgccaagaacaccgugaagagcgucggcaaguucugccuggaggccagcuucaacuaccucaagucccccaacuucagcaagcugaucaacaucaucaucugguuccugcuccuguccgugugccugggcagccucaucuacuccacggccgcgcugggggugcugaugagcaaccucggcaugccguccuacugcaccggguaccgcgagggcuaccugaacagcaccaacgucaccaucgccacguacugcaccggcuccauccccugcagcgugugccuguccgggcucgacagccuggacaccuaccccucccuggagaccauccagaucacgaucagcuccuucaagugggaccucaccgccuucggccugguggccgagugguuccuggccuacauccucuucacccgguucuucuacguccuggggcuggcggccaucaugcagcucuucuucagcuacuucgccgugcacuucaucuccaacagcuggcugauguggcugaucaucaaccuggugcagauggcccccaucuccgcgaugguccgcauguacaucuucuucgccagcuucuacuacguguggaagagcuacgugcacgucguggacggcugcaacuccagcaccugcaugaugugcuacaagcggaaccgcgccacgcggguggagugcaccaccaucgucaacggggugcgccgguccuucuacgucuacgccaacggcggcaagggguucugcaagcuccacaacuggaacugcgugaacugcgacaccuucugcgccggcagcacguucaucuccgacgagguggcgcgcgaccugagccugcaguucaagcggccgaucaaccccaccgaccaguccagcuacaucgucgacuccgugaccgugaagaacgggagcauccaccucuacuucgacaaggccggccagaagaccuacgagcgccacucccugagccacuucgucaaccuggacaaccuccgggccaacaacacgaaggggucccugcccaucaacgugaucguguucgacggcaagagcaagugcgaggaguccagcgccaaguccgccagcgucuacuacucccagcugaugugccagcccauccuccugcuggaccaggcgcucgugagcgacgugggcgacagcgccgaggucgccgugaagauguucgacgccuacgugaacaccuucuccagcaccuucaacgucccgauggagaagcugaagacccugguggccacggcggaggccgagcucgccaagaacgugucccuggacaacguccugagcaccuucaucuccgccgcgcgccagggguucguggacagcgacguggagaccaaggacgucguggagugccucaagcugucccaccagagcgacaucgaggugaccggcgacuccugcaacaacuacaugcugacguacaacaaggucgagaacaugaccccccgggaccucggggccugcaucgacugcagcgcccgccacaucaacgcccagguggccaagucccacaacaucgcgcugaucuggaacgugaaggacuucaugagccuguccgagcagcuccggaagcagauccgcagcgccgccaagaagaacaaccugcccuucaagcugaccugcgccaccacgcgccaggucgugaacguggucaccaccaagaucgcccucaagggcggguga

SEQ ID NO: 17974 - RNA, 5841 nt, Artificial Sequence
  SARS-CoV-2__MT745715.1__non-structural protein 3 (NSP3) CDS gc
auggcccccaccaaggugaccuucggcgacgacacggucaucgaggugcagggguacaagagcgugaacaucaccuucgagcuggacgagcgcaucgacaagguccucaacgagaagugcuccgccuacaccguggagcugggcaccgaggugaacgaguucgcgugcgucguggccgacgccgugaucaagacgcugcagccggucagcgagcuccugaccccccuggggaucgaccucgacgagugguccauggccaccuacuaccuguucgacgagagcggcgaguucaagcuggccucccacauguacugcagcuucuacccccccgacgaggacgaggaggagggggacugcgaggaggaggaguucgagccguccacccaguacgaguacggcacggaggacgacuaccagggcaagccccucgaguucggggcgaccagcgccgcccugcagcccgaggaggagcaggaggaggacuggcuggacgacgacucccagcagaccgugggccagcaggacgggagcgaggacaaccagaccacgaccauccagaccaucguggagguccagccccagcucgagauggagcugaccccgguggugcagacgaucgaggucaacuccuucagcggcuaccugaagcucaccgacaacguguacaucaagaacgccgacaucguggaggaggcgaagaaggucaagcccaccgugguggucaacgccgccaacguguaccugaagcacgggggcggcguggccggggcccugaacaaggcgaccaacaacgccaugcaggucgaguccgacgacuacaucgccacgaacggcccccucaagguggggggcagcugcguccuguccggccacaaccuggccaagcacugccuccacgugguggggcccaacgucaacaagggcgaggacauccagcugcugaagagcgccuacgagaacuucaaccagcacgaggugcuccuggcgccgcugcucuccgccgggaucuucggcgccgaccccauccacagccugcgggugugcgucgacaccgugcgcaccaacguguaccuggccgucuucgacaagaaccucuacgacaagcugguguccagcuuccuggagaugaagagcgagaagcagguggagcagaagaucgccgagauccccaaggaggaggucaagcccuucaucaccgaguccaagccgagcguggagcagcggaagcaggacgacaagaagaucaaggcgugcguggaggaggucacgaccacccucgaggagaccaaguuccugacggagaaccugcuccuguacaucgacaucaacgggaaccugcaccccgacuccgccacccucgugagcgacaucgacaucaccuuccugaagaaggacgcccccuacaucgugggcgacgucgugcaggagggcgugcugaccgccgucgugauccccacgaagaaggccgggggcaccaccgagaugcucgcgaaggcccugcgcaaggugccgaccgacaacuacaucacgaccuaccccgggcagggccugaacggguacaccgucgaggaggccaagaccgugcucaagaagugcaaguccgccuucuacauccugcccagcaucaucuccaacgagaagcaggagauccugggcaccgugagcuggaaccuccgggagaugcuggcgcacgccgaggagacgcgcaagcugaugcccgucugcguggagaccaaggccaucguguccaccauccagcggaaguacaagggcaucaagauccaggagggggucguggacuacggcgcccgcuucuacuucuacaccagcaagacgaccguggccucccugaucaacacccucaacgaccugaacgagacccuggucacgaugccgcucggguacgugacccacggccugaaccuggaggaggcggcccgguacaugcgcagccucaaggugcccgccaccgucuccgugagcucccccgacgccgugaccgccuacaacggguaccugacgagcuccagcaagacccccgaggagcacuucaucgagaccaucucccuggcgggcagcuacaaggacuggagcuacuccggccagagcacccagcucgggaucgaguuccugaagcggggcgacaaguccgucuacuacacgagcaacccgaccaccuuccaccuggacggggaggugaucaccuucgacaaccucaagacgcugcugucccuccgcgaggugcggaccaucaaggucuucaccaccguggacaacaucaaccugcacacgcagguggucgacaugagcaugaccuacggccagcaguucggccccaccuaccuggacggggccgacgugaccaagaucaagccccacaacucccacgagggcaagacguucuacgugcucccgaacgacgacacccugcgcgucgaggccuucgaguacuaccacaccaccgaccccagcuuccuggggcgguacauguccgcccucaaccacacgaagaaguggaaguacccccaggugaacggccugaccagcaucaagugggccgacaacaacugcuaccuggcgaccgcccuccugacccugcagcagaucgagcucaaguucaaccccccggcccugcaggacgccuacuaccgcgcgcgggccggggaggccgccaacuucugcgcccugauccucgcguacugcaacaagacggugggcgagcugggcgacguccgcgagaccauguccuaccuguuccagcacgccaaccucgacagcugcaagcgggugcugaacgucgugugcaagaccugcgggcagcagcagaccacccugaagggcguggaggccgucauguacauggggacgcucuccuacgagcaguucaagaagggcgugcagauccccugcaccugcgggaagcaggccaccaaguaccuggugcagcaggagagccccuucgucaugauguccgcccccccggcgcaguacgagcugaagcacggcaccuucacgugcgccagcgaguacaccggcaacuaccagugcgggcacuacaagcacaucaccuccaaggagacccucuacugcaucgacggcgcccugcugacgaagagcagcgaguacaaggggcccaucaccgacguguucuacaaggagaacuccuacaucaccaccaucaagcccgugacguacaagcucgacggcgucgugugcaccgagaucgaccccaagcuggacaacuacuacaagaaggacaacagcuacuucaccgagcagccgaucgaccuggugcccaaccagcccuaccccaacgccuccuucgacaacuucaaguucgucugcgacaacaucaaguucgccgacgaccucaaccagcugaccggguacaagaagccggcgagccgcgagcugaaggugacguucuuccccgaccucaacggcgacguggucgccaucgacuacaagcacuacacccccuccuucaagaagggcgccaagcugcugcacaagcccaucguguggcacgugaacaacgccaccaacaaggcgaccuacaagccgaacacguggugcauccggugccucuggagcaccaagcccgucgagaccuccaacagcuucgacgugcugaaguccgaggacgcccaggggauggacaaccuggccugcgaggaccucaagcccgugagcgaggaggucguggagaaccccaccauccagaaggacgugcuggagugcaacgucaagacgaccgagguggugggcgacaucauccugaagccggccaacaacucccucaagaucaccgaggaggucgggcacaccgaccugauggccgcguacguggacaacagcucccugacgaucaagaagcccaacgagcucagccgcgugcugggccugaagacccucgccacccacgggcuggccgucgugaacuccgugcccugggacaccaucgccaacuacgccaagccguuccugaacaaggucgugagcacgaccaccaacaucgugacccgcugccucaaccgggucugcacgaacuacaugcccuacuucuucacccugcugcuccagcugugcaccuucacccgcuccaccaacagccggaucaaggcguccaugcccacgaccaucgccaagaacaccgugaagagcgugggcaaguucugccuggaggccagcuucaacuaccucaagucccccaacuucagcaagcugaucaacaucaucaucugguuccugcuccuguccgucugccugggcagccucaucuacuccaccgccgcccugggggugcugaugagcaaccucggcaugccguccuacugcacgggguaccgcgagggcuaccugaacagcaccaacgugaccaucgcgaccuacugcacgggcuccauccccugcagcgucugccuguccgggcucgacagccuggacaccuaccccucccuggagaccauccagaucaccaucagcuccuucaagugggaccucacggccuucggccugguggccgagugguuccuggccuacauccucuucacccgguucuucuacgugcuggggcuggccgcgaucaugcagcucuucuucagcuacuucgccguccacuucaucuccaacagcuggcugauguggcugaucaucaaccuggugcagauggcccccaucuccgccauggugcgcauguacaucuucuucgcgagcuucuacuacgucuggaagagcuacgugcacguggucgacggcugcaacuccagcaccugcaugaugugcuacaagcggaaccgcgccacccggguggagugcacgaccaucgucaacggggugcgccgguccuucuacguguacgccaacggcggcaagggguucugcaagcuccacaacuggaacugcgucaacugcgacaccuucugcgccggcagcaccuucaucuccgacgagguggcccgcgaccugagccugcaguucaagcggccgaucaaccccacggaccaguccagcuacaucguggacuccgucaccgugaagaacgggagcauccaccucuacuucgacaaggcgggccagaagaccuacgagcgccacucccugagccacuucgugaaccuggacaaccuccgggccaacaacaccaaggggucccugcccaucaacgucaucguguucgacggcaagagcaagugcgaggaguccagcgccaaguccgccagcguguacuacucccagcugaugugccagcccauccuccugcuggaccaggcccucgucagcgacgugggcgacagcgcggagguggccgucaagauguucgacgccuacgugaacacguucuccagcaccuucaacgugccgauggagaagcugaagacccuggucgccaccgccgaggcggagcucgccaagaacgugucccuggacaacgugcugagcacguucaucuccgccgcccgccagggguucgucgacagcgacguggagaccaaggacguggucgagugccucaagcugucccaccagagcgacaucgaggugaccggcgacuccugcaacaacuacaugcugaccuacaacaagguggagaacaugacgccccgggaccucggggcgugcaucgacugcagcgcccgccacaucaacgcccaggucgccaagucccacaacaucgcccugaucuggaacgugaaggacuucaugagccuguccgagcagcuccggaagcagauccgcagcgcggccaagaagaacaaccugcccuucaagcugaccugcgccaccacccgccagguggucaacguggugacgaccaagaucgcccucaagggcggguga

SEQ ID NO: 17975 - RNA, 5841 nt, Artificial Sequence
  SARS-CoV-2__MT750044.1__non-structural protein 3 (NSP3) CDS gc
auggcccccaccaaggugaccuucggcgacgacacggucaucgaggugcagggguacaagagcgugaacaucaccuucgagcuggacgagcgcaucgacaagguccucaacgagaagugcuccgccuacaccguggagcugggcaccgaggugaacgaguucgcgugcgucguggccgacgccgugaucaagacgcugcagccggucagcgagcuccugaccccccuggggaucgaccucgacgagugguccauggccaccuacuaccuguucgacgagagcggcgaguucaagcuggccucccacauguacugcagcuucuacccccccgacgaggacgaggaggagggggacugcgaggaggaggaguucgagccguccacccaguacgaguacggcacggaggacgacuaccagggcaagccccucgaguucggggcgaccagcgccgcccugcagcccgaggaggagcaggaggaggacuggcuggacgacgacucccagcagaccgugggccagcaggacgggagcgaggacaaccagaccacgaccauccagaccaucguggagguccagccccagcucgagauggagcugaccccgguggugcagacgaucgaggucaacuccuucagcggcuaccugaagcucaccgacaacguguacaucaagaacgccgacaucguggaggaggcgaagaaggucaagcccaccgugguggucaacgccgccaacguguaccugaagcacgggggcggcguggccggggcccugaacaaggcgaccaacaacgccaugcaggucgaguccgacgacuacaucgccacgaacggcccccucaagguggggggcagcugcguccuguccggccacaaccuggccaagcacugccuccacgugguggggcccaacgucaacaagggcgaggacauccagcugcugaagagcgccuacgagaacuucaaccagcacgaggugcuccuggcgccgcugcucuccgccgggaucuucggcgccgaccccauccacagccugcgggugugcgucgacaccgugcgcaccaacguguaccuggccgucuucgacaagaaccucuacgacaagcugguguccagcuuccuggagaugaagagcgagaagcagguggagcagaacaucgccgagauccccaaggaggaggucaagcccuucaucaccgaguccaagccgagcguggagcagcggaagcaggacgacaagaagaucaaggcgugcguggaggaggucacgaccacccucgaggagaccaaguuccugacggagaaccugcuccuguacaucgacaucaacgggaaccugcaccccgacuccgccacccucgugagcgacaucgacaucaccuuccugaagaaggacgcccccuacaucgugggcgacgucgugcaggagggcgugcugaccgccgucgugauccccacgaagaaggccgggggcaccaccgagaugcucgcgaaggcccugcgcaaggugccgaccgacaacuacaucacgaccuaccccgggcagggccugaacggguacaccgucgaggaggccaagaccgugcucaagaagugcaaguccgccuucuacauccugcccagcaucaucuccaacgagaagcaggagauccugggcaccgugagcuggaaccuccgggagaugcuggcgcacgccgaggagacgcgcaagcugaugcccgucugcguggagaccaaggccaucguguccaccauccagcggaaguacaagggcaucaagauccaggagggggucguggacuacggcgcccgcuucuacuucuacaccagcaagacgaccguggccucccugaucaacacccucaacgaccugaacgagacccuggucacgaugccgcucggguacgugacccacggccugaaccuggaggaggcggcccgguacaugcgcagccucaaggugcccgccaccgucuccgugagcucccccgacgccgugaccgccuacaacggguaccugacgagcuccagcaagacccccgaggagcacuucaucgagaccaucucccuggcgggcagcuacaaggacuggagcuacuccggccagagcacccagcucgggaucgaguuccugaagcggggcgacaaguccgucuacuacacgagcaacccgaccaccuuccaccuggacggggaggugaucaccuucgacaaccucaagacgcugcugucccuccgcgaggugcggaccaucaaggucuucaccaccguggacaacaucaaccugcacacgcagguggucgacaugagcaugaccuacggccagcaguucggccccaccuaccuggacggggccgacgugaccaagaucaagccccacaacucccacgagggcaagacguucuacgugcucccgaacgacgacacccugcgcgucgaggccuucgaguacuaccacaccaccgaccccagcuuccuggggcgguacauguccgcccucaaccacacgaagaaguggaaguacccccaggugaacggccugaccagcaucaagugggccgacaacaacugcuaccuggcgaccgcccuccugacccugcagcagaucgagcucaaguucaaccccccggcccugcaggacgccuacuaccgcgcgcgggccggggaggccgccaacuucugcgcccugauccucgcguacugcaacaagacggugggcgagcugggcgacguccgcgagaccauguccuaccuguuccagcacgccaaccucgacagcugcaagcgggugcugaacgucgugugcaagaccugcgggcagcagcagaccacccugaagggcguggaggccgucauguacauggggacgcucuccuacgagcaguucaagaagggcgugcagauccccugcaccugcgggaagcaggccaccaaguaccuggugcagcaggagagccccuucgucaugauguccgcccccccggcgcaguacgagcugaagcacggcaccuucacgugcgccagcgaguacaccggcaacuaccagugcgggcacuacaagcacaucaccuccaaggagacccucuacugcaucgacggcgcccugcugacgaagagcagcgaguacaaggggcccaucaccgacguguucuacaaggagaacuccuacaccaccacgaucaagcccgugaccuacaagcucgacggcgucgugugcaccgagaucgaccccaagcuggacaacuacuacaagaaggacaacagcuacuucaccgagcagccgaucgaccuggugcccaaccagcccuaccccaacgccuccuucgacaacuucaaguucgucugcgacaacaucaaguucgccgacgaccucaaccagcugacgggguacaagaagccggcgagccgcgagcugaaggugaccuucuuccccgaccucaacggcgacguggucgccaucgacuacaagcacuacacccccuccuucaagaagggcgccaagcugcugcacaagcccaucguguggcacgugaacaacgccaccaacaaggcgacguacaagccgaacaccuggugcauccggugccucuggagcaccaagcccgucgagaccuccaacagcuucgacgugcugaaguccgaggacgcccaggggauggacaaccuggccugcgaggaccucaagcccgugagcgaggaggucguggagaaccccacgauccagaaggacgugcuggagugcaacgucaagaccaccgagguggugggcgacaucauccugaagccggccaacaacucccucaagaucaccgaggaggucgggcacacggaccugauggccgcguacguggacaacagcucccugaccaucaagaagcccaacgagcucagccgcgugcugggccugaagacccucgccacccacgggcuggccgccgucaacuccgugcccugggacacgaucgccaacuacgcgaagccguuccugaacaagguggucagcaccaccaccaacaucgugacgcgcugccucaaccgggugugcaccaacuacaugcccuacuucuucacccugcugcuccagcugugcaccuucacccgcuccacgaacagccggaucaaggccuccaugcccaccaccaucgccaagaacaccgucaagagcgugggcaaguucugccuggaggcccucuucaacuaccugaagagccccaacuucuccaagcugaucaacaucaucaucugguuccuccugcugagcgugugccucggcucccugaucuacagcacggccgcgcuggggguccucauguccaaccugggcaugccgagcuacugcaccggguaccgcgagggcuaccugaacuccaccaacgugaccaucgccacguacugcaccggcagcauccccugcuccgugugccucagcgggcuggacucccuggacaccuaccccagccucgagaccauccagaucacgaucuccagcuucaagugggaccugaccgccuucggccuggucgccgagugguuccucgccuacauccuguucacccgguucuucuacgugcuggggcucgcggccaucaugcagcuguucuucuccuacuucgccgugcacuucaucagcaacuccuggcugauguggcugaucaucaaccucguccagauggcccccaucagcgcgauggugcgcauguacaucuucuucgccuccuucuacuacguguggaagagcuacguccacgugguggacggcugcaacagcuccaccugcaugaugugcuacaagcggaaccgcgccacgcgggucgagugcaccaccaucgugaacgggguccgccggagcuucuacguguacgccaacggcggcaagggguucugcaagcugcacaacuggaacugcgugaacugcgacaccuucugcgccggcuccacguucaucagcgacgaggucgcgcgcgaccugucccuccaguucaagcggccgaucaaccccaccgaccagagcuccuacaucguggacagcgugaccgucaagaacggguccauccaccuguacuucgacaaggccggccagaagaccuacgagcgccacagccugucccacuucgugaaccucgacaaccugcgggccaacaacacgaaggggagccugcccaucaacgugaucgucuucgacggcaaguccaagugcgaggagagcuccgccaagagcgccuccguguacuacagccagcucaugugccagcccauccugcugcucgaccaggcgcugguguccgacgucggcgacagcgccgagguggccgugaagauguucgacgccuacgucaacaccuucagcuccaccuucaacgugccgauggagaagcugaagacccucguggccacggcggaggccgagcuggccaagaacgucagccuggacaacgugcucuccaccuucaucagcgccgcgcgccagggguucguggacuccgacgucgagaccaaggacgugguggagugccugaagcugagccaccaguccgacaucgaggucaccggcgacagcugcaacaacuacaugcucacguacaacaagguggagaacaugaccccccgggaccugggggccugcaucgacugcuccgcccgccacaucaacgcccagguggccaagagccacaacgucgcgcugaucuggaacgugaaggacuucaugucccucagcgagcagcugcggaagcagauccgcuccgccgccaagaagaacaaccugcccuucaagcucaccugcgccaccacgcgccagguggucaacguggugaccaccaagaucgcccugaagggcggguga

SEQ ID NO: 17976 - RNA, 5841 nt, Artificial Sequence
  SARS-CoV-2__MT750049.1__non-structural protein 3 (NSP3) CDS gc
auggcccccaccaaggugaccuucggcgacgacacggucaucgaggugcagggguacaagagcgugaacaucaccuucgagcuggacgagcgcaucgacaagguccucaacgagaagugcuccgccuacaccguggagcugggcaccgaggugaacgaguucgcgugcgucguggccgacgccgugaucaagacgcugcagccggucagcgagcuccugaccccccuggggaucgaccucgacgagugguccauggccaccuacuaccuguucgacgagagcggcgaguucaagcuggccucccacauguacugcagcuucuacccccccgacgaggacgaggaggagggggacugcgaggaggaggaguucgagccguccacccaguacgaguacggcacggaggacgacuaccagggcaagccccucgaguucggggcgaccagcgccgcccugcagcccgaggaggagcaggaggaggacuggcuggacgacgacucccagcagaccgugggccagcaggacgggagcgaggacaaccagaccacgaccauccagaccaucguggagguccagccccagcucgagauggagcugaccccgguggugcagacgaucgaggucaacuccuucagcggcuaccugaagcucaccgacaacguguacaucaagaacgccgacaucguggaggaggcgaagaaggucaagcccaccgugguggucaacgccgccaacguguaccugaagcacgggggcggcguggccggggcccugaacaaggcgaccaacaacgccaugcaggucgaguccgacgacuacaucgccacgaacggcccccucaagguggggggcagcugcguccuguccggccacaaccuggccaagcacugccuccacgugguggggcccaacgucaacaagggcgaggacauccagcugcugaagagcgccuacgagaacuucaaccagcacgaggugcuccuggcgccgcugcucuccgccgggaucuucggcgccgaccccauccacagccugcgggugugcgucgacaccgugcgcaccaacguguaccuggccgucuucgacaagaaccucuacgacaagcugguguccagcuuccuggagaugaagagcgagaagcagguggagcagaacaucgccgagauccccaaggaggaggucaagcccuucaucaccgaguccaagccgagcguggagcagcggaagcaggacgacaagaagaucaaggcgugcguggaggaggucacgaccacccucgaggagaccaaguuccugacggagaaccugcuccuguacaucgacaucaacgggaaccugcaccccgacuccgccacccucgugagcgacaucgacaucaccuuccugaagaaggacgcccccuacaucgugggcgacgucgugcaggagggcgugcugaccgccgucgugauccccacgaagaaggccgggggcaccaccgagaugcucgcgaaggcccugcgcaagguguccaccgacaacuacaucacgaccuacccggggcagggccugaacggguacaccgucgaggaggccaagaccgugcucaagaagugcaagagcgccuucuacauccugcccuccaucaucagcaacgagaagcaggagauccugggcaccguguccuggaaccuccgggagaugcuggcgcacgccgaggagacgcgcaagcugaugcccgucugcguggagaccaaggccaucgugagcaccauccagcggaaguacaagggcaucaagauccaggagggggucguggacuacggcgcccgcuucuacuucuacaccuccaagacgaccguggccagccugaucaacacccucaacgaccugaacgagacccuggucacgaugccccucggguacgugacccacggccugaaccuggaggaggcggcccgguacaugcgcucccucaaggugccggccaccgucagcguguccagccccgacgccgugaccgccuacaacggguaccugacguccagcuccaagacccccgaggagcacuucaucgagaccaucagccuggcgggcagcuacaaggacugguccuacagcggccaguccacccagcucgggaucgaguuccugaagcggggcgacaagagcgucuacuacacguccaaccccaccaccuuccaccuggacggggaggugaucaccuucgacaaccucaagacgcugcugagccuccgcgaggugcggaccaucaaggucuucaccaccguggacaacaucaaccugcacacgcagguggucgacauguccaugaccuacggccagcaguucggcccgaccuaccuggacggggccgacgugaccaagaucaagccccacaacagccacgagggcaagacguucuacgugcuccccaacgacgacacccugcgcgucgaggccuucgaguacuaccacaccaccgacccguccuuccuggggcgguacaugagcgcccucaaccacacgaagaaguggaaguacccccaggugaacggccugaccuccaucaagugggccgacaacaacugcuaccuggcgaccgcccuccugacccugcagcagaucgagcucaaguucaacccccccgcccugcaggacgccuacuaccgcgcgcgggccggggaggccgccaacuucugcgcccugauccucgcguacugcaacaagacggugggcgagcugggcgacguccgcgagaccaugagcuaccuguuccagcacgccaaccucgacuccugcaagcgggugcugaacgucgugugcaagaccugcgggcagcagcagaccacccugaagggcguggaggccgucauguacauggggacgcucagcuacgagcaguucaagaagggcgugcagaucccgugcaccugcgggaagcaggccaccaaguaccuggugcagcaggaguccagcuucgucaugauguccgccccccccgcgcaguacgagcugaagcacggcaccuucacgugcgccagcgaguacaccggcaacuaccagugcgggcacuacaagcacaucaccagcaaggagacccucuacugcaucgacggcgcccugcugacgaaguccagcgaguacaaggggcccaucaccgacguguucuacaaggagaacuccuacaccaccacgaucaagccggugaccuacaagcucgacggcgucgugugcaccgagaucgaccccaagcuggacaacuacuacaagaaggacaacagcuacuucaccgagcagcccaucgaccuggugcccaaccagccguaccccaacgccuccuucgacaacuucaaguucgucugcgacaacaucaaguucgccgacgaccucaaccagcugacgggguacaagaagcccgcgagccgcgagcugaaggugaccuucuuccccgaccucaacggcgacguggucgccaucgacuacaagcacuacaccccguccuucaagaagggcgccaagcugcugcacaagcccaucguguggcacgugaacaacgccaccaacaaggcgacguacaagcccaacaccuggugcauccggugccucuggagcaccaagcccgucgagaccuccaacagcuucgacgugcugaaguccgaggacgcccaggggauggacaaccuggccugcgaggaccucaagccggugagcgaggaggucguggagaaccccacgauccagaaggacgugcuggagugcaacgucaagaccaccgagguggugggcgacaucauccugaagcccgccaacaacucccucaagaucaccgaggaggucgggcacacggaccugauggccgcguacguggacaacagcucccugaccaucaagaagcccaacgagcucagccgcgugcugggccugaagacccucgccacccacgggcuggccgccgucaacuccgugccgugggacacgaucgccaacuacgcgaagcccuuccugaacaagguggucagcaccaccaccaacaucgugacgcgcugccucaaccgggugugcaccaacuacaugcccuacuucuucacccugcugcuccagcugugcaccuucacccgcuccacgaacagccggaucaaggccagcaugccgaccaccaucgccaagaacaccgucaaguccgugggcaaguucugccuggaggccagcuucaacuaccucaagucccccaacuucagcaagcugaucaacaucaucaucugguuccugcuccuguccgugugccugggcagccucaucuacuccacggccgcgcuggggguccugaugagcaaccucggcaugcccuccuacugcaccggguaccgcgagggcuaccugaacagcaccaacgugaccaucgccacguacugcaccggcuccauccccugcagcgugugccuguccagccucgacucccuggacaccuacccgagccuggagaccauccagaucacgaucuccagcuucaagugggaccucaccgccuucgggcuggucgccgagugguuccuggccuacauccucuucacccgguucuucuacgugcugggccuggcggccaucaugcagcucuucuucuccuacuucgccgugcacuucaucagcaacagcuggcugauguggcugaucaucaaccugguccagauggcccccaucuccgcgauggugcgcauguacaucuucuucgccagcuucuacuacguguggaaguccuacguccacgugguggacgggugcaacagcuccaccugcaugaugugcuacaagcggaaccgcgccacgcgggucgagugcaccaccaucgugaacggcguccgccggagcuucuacguguacgccaacgggggcaagggcuucugcaagcuccacaacuggaacugcgugaacugcgacaccuucugcgccggguccacguucaucagcgacgaggucgcgcgcgaccugucccugcaguucaagcggcccaucaaccccaccgaccagagcuccuacaucguggacagcgugaccgucaagaacggcuccauccaccucuacuucgacaaggccgggcagaagaccuacgagcgccacagccugucccacuucgugaacuucgacaaccugcgggccaacaacacgaagggcagccucccgaucaacgugaucgucuucgacgggaaguccaagugcgaggagagcuccgccaagagcgccagcguguacuacucccagcugaugugccagcccauccugcuccuggaccaggcgcuggugagcgacgucggcgacuccgccgagguggccgugaagauguucgacgccuacgucaacaccuucagcuccaccuucaacgugcccauggagaagcucaagacccugguggccacggcggaggccgagcuggccaagaacgucagccucgacaacgugcuguccaccuucaucagcgccgcgcgccagggcuucguggacuccgacgucgagaccaaggacgugguggagugccugaagcucagccaccaguccgacaucgaggucaccggggacagcugcaacaacuacaugcugacguacaacaagguggagaacaugaccccccgggaccugggcgccugcaucgacugcuccgcccgccacaucaacgcccagguggccaagagccacaacaucgcgcucaucuggaacgucaaggacuucaugucccugagcgagcagcugcggaagcagauccgcuccgccgccaagaagaacaaccucccguucaagcugaccugcgccaccacgcgccagguggugaacgucgugaccaccaagaucgcccugaaggggggcuga

SEQ ID NO: 17977 - RNA, 5841 nt, Artificial Sequence
  SARS-CoV-2__MT750056.1__non-structural protein 3 (NSP3) CDS gc
auggcccccaccaaggugaccuucggcgacgacacggucaucgaggugcagggguacaagagcgugaacaucaccuucgagcuggacgagcgcaucgacaagguccucaacgagaagugcuccgccuacaccguggagcugggcaccgaggugaacgaguucgcgugcgucguggccgacgccgugaucaagacgcugcagccggucagcgagcuccugaccccccuggggaucgaccucgacgagugguccauggccaccuacuaccuguucgacgagagcggcgaguucaagcuggccucccacauguacugcagcuucuacccccccgacgaggacgaggaggagggggacugcgaggaggaggaguucgagccguccacccaguacgaguacggcacggaggacgacuaccagggcaagccccucgaguucggggcgaccagcgccgcccugcagcccgaggaggagcaggaggaggacuggcuggacgacgacucccagcagaccgugggccagcaggacgggagcgaggacaaccagaccacgaccauccagaccaucguggagguccagccccagcucgagauggagcugaccccgguggugcagacgaucgaggucaacuccuucagcggcuaccugaagcucaccgacaacguguacaucaagaacgccgacaucguggaggaggcgaagaaggucaagcccaccgugguggucaacgccgccaacguguaccugaagcacgggggcggcguggccggggcccugaacaaggcgaccaacaacgccaugcaggucgaguccgacgacuacaucgccacgaacggcccccucaagguggggggcagcugcguccuguccggccacaaccuggccaagcacugccuccacgugguggggcccaacgucaacaagggcgaggacauccagcugcugaagagcgccuacgagaacuucaaccagcacgaggugcuccuggcgccgcugcucuccgccgggaucuucggcgccgaccccauccacagccugcgggugugcgucgacaccgugcgcaccaacguguaccuggccgucuucgacaagaaccucuacgacaagcugguguccagcuuccuggagaugaagagcgagaagcagguggagcagaacaucgccgagauccccaaggaggaggucaagcccuucaucaccgaguccaagccgagcguggagcagcggaagcaggacgacaagaagaucaaggcgugcguggaggaggucacgaccacccucgaggagaccaaguuccugacggagaaccugcuccuguacaucgacaucaacgggaaccugcaccccgacuccgccacccucgugagcgacaucgacaucaccuuccugaagaaggacgcccccuacaucgugggcgacgucgugcaggagggcgugcugaccgccgucgugauccccacgaagaaggccgggggcaccaccgagaugcucgcgaaggcccugcgcaaggugccgaccgacaacuacaucacgaccuaccccgggcagggccugaacggguacaccgucgaggaggccaagaccgugcucaagaagugcaaguccgccuucuacauccugcccagcaucaucuccaacgagaagcaggagauccugggcaccgugagcuggaaccuccgggagaugcuggcgcacgccgaggagacgcgcaagcugaugcccgucugcguggagaccaaggccaucguguccaccauccagcggaaguacaagggcaucaagauccaggagggggucguggacuacggcgcccgcuucuacuucuacaccagcaagacgaccguggccucccugaucaacacccucaacgaccugaacgagacccuggucacgaugccgcucggguacgugacccacggccugaaccuggaggaggcggcccgguacaugcgcagccucaaggugcccgccaccgucuccgugagcucccccgacgccgugaccgccuacaacggguaccugacgagcuccagcaagacccccgaggagcacuucaucgagaccaucucccuggcgggcagcuacaaggacuggagcuacuccggccagagcacccagcucgggaucgaguuccugaagcggggcgacaaguccgucuacuacacgagcaacccgaccaccuuccaccuggacggggaggugaucaccuucgacaaccucaagacgcugcugucccuccgcgaggugcggaccaucaaggucuucaccaccguggacaacaucaaccugcacacgcagguggucgacaugagcaugaccuacggccagcaguucggccccaccuaccuggacggggccgacgugaccaagaucaagccccacaacucccacgagggcaagacguucuacgugcucccgaacgacgacacccugcgcgucgaggccuucgaguacuaccacaccaccgaccccagcuuccuggggcgguacauguccgcccucaaccacacgaagaaguggaaguacccccaggugaacggccugaccagcaucaagugggccgacaacaacugcuaccuggcgaccgcccuccugacccugcagcagaucgagcucaaguucaaccccccggcccugcaggacgccuacuaccgcgcgcgggccggggaggccgccaacuucugcgcccugauccucgcguacugcaacaagacggugggcgagcugggcgacguccgcgagaccauguccuaccuguuccagcacgccaaccucgacagcugcaagcgggugcugaacgucgugugcaagaccugcgggcagcagcagaccacccugaagggcguggaggccgucauguacauggggacgcucuccuacgagcaguucaagaagggcgugcagauccccugcaccugcgggaagcaggccaccaaguaccuggugcagcaggagagccccuucgucaugauguccgcccccccggcgcaguacgagcugaagcacggcaccuucacgugcgccagcgaguacaccggcaacuaccagugcgggcacuacaagcacaucaccuccaaggagacccucuacugcaucgacggcgcccugcugacgaagagcagcgaguacaaggggcccaucaccgacguguucuacaaggagaacuccuacaccaccacgaucaagcccgugaccuacaagcucgacggcgucgugugcaccgagaucgaccccaagcuggacaacuacuacaagaaggacaacagcuacuucaccgagcagccgaucgaccuggugcccaaccagcccuaccccaacgccuccuucgacaacuucaaguucgucugcgacaacaucaaguucgccgacgaccucaaccagcugacgggguacaagaagccggcgagccgcgagcugaaggugaccuucuuccccgaccucaacggcgacguggucgccaucgacuacaagcacuacacccccuccuucaagaagggcgccaagcugcugcacaagcccaucguguggcacgugaacaacgccaccaacaaggcgacguacaagccgaacaccuggugcauccggugccucuggagcaccaagcccgucgagaccuccaacagcuucgacgugcugaaguccgaggacgcccaggggauggacaaccuggccugcgaggaccucaagcccgugagcgaggaggucguggagaaccccacgauccagaaggacgugcuggagugcaacgucaagaccaccgagguggugggcgacaucauccugaagccggccaacaacucccucaagaucaccgaggaggucgggcacacggaccugauggccgcguacguggacaacagcucccugaccaucaagaagcccaacgagcucagccgcgugcugggccugaagacccucgccacccacgggcuggccgccgucaacuccgugcccugggacacgaucgccaacuacgcgaagccguuccugaacaagguggucagcaccaccaccaacaucgugacgcgcugccucaaccgggugugcaccaacuacaugcccuacuucuucacccugcugcuccagcugugcaccuucacccgcuccacgaacagccggaucaaggccuccaugcccaccaccaucgccaagaacaccgucaagagcgugggcaaguucugccuggaggccagcuucaacuaccucaagucccccaacuucagcaagcugaucaacaucaucaucugguuccugcuccuguccgugugccugggcagccucaucuacuccacggccgcgcuggggguccugaugagcaaccucggcaugccguccuacugcaccggguaccgcgagggcuaccugaacagcaccaacgugaccaucgccacguacugcaccggcuccauccccugcagcgugugccuguccgggcucgacagccuggacaccuaccccucccuggagaccauccagaucacgaucagcuccuucaagugggaccucaccgccuucggccuggucgccgagugguuccuggccuacauccucuucacccgguucuucuacgugcuggggcuggcggccaucaugcagcucuucuucagcuacuucgccgugcacuucaucuccaacagcuggcugauguggcugaucaucaaccugguccagauggcccccaucuccgcgauggugcgcauguacaucuucuucgccagcuucuacuacguguggaagagcuacguccacgugguggacggcugcaacuccagcaccugcaugaugugcuacaagcggaaccgcgccacgcgggucgagugcaccaccaucgugaacgggguccgccgguccuucuacguguacgccaacggcggcaagggguucugcaagcuccacaacuggaacugcgugaacugcgacaccuucugcgccggcagcacguucaucuccgacgaggucgcgcgcgaccugagccugcaguucaagcggccgaucaaccccaccgaccaguccagcuacaucguggacuccgugaccgucaagaacgggagcauccaccucuacuucgacaaggccggccagaagaccuacgagcgccacucccugagccacuucgugaaccuggacaaccuccgggccaacaacacgaaguccagccugcccaucaacgugaucgucuucgacgggaaguccaagugcgaggagagcuccgccaagagcgccuccguguacuacagccagcugaugugccagcccauccuccugcuggaccaggcgcucgugagcgacgucggcgacuccgccgagguggccgugaagauguucgacgccuacgucaacaccuucagcuccaccuucaacgugccgauggagaagcugaagacccugguggccacggcggaggccgagcucgccaagaacgucagccuggacaacgugcuguccaccuucaucagcgccgcgcgccagggcuucguggacuccgacgucgagaccaaggacgugguggagugccucaagcugagccaccaguccgacaucgaggucaccggggacagcugcaacaacuacaugcugacguacaacaagguggagaacaugaccccccgggaccucggcgccugcaucgacugcuccgcccgccacaucaacgcccagguggccaagagccacaacaucgcgcugaucuggaacgucaaggacuucaugucccugagcgagcagcuccggaagcagauccgcuccgccgccaagaagaacaaccugcccuucaagcugaccugcgccaccacgcgccagguggugaacgucgugaccaccaagaucgcccucaaggggggcuga

SEQ ID NO: 17978 - RNA, 5841 nt, Artificial Sequence
  SARS-CoV-2__MT750087.1__non-structural protein 3 (NSP3) CDS gc
auggcccccaccaaggugaccuucggcgacgacacggucaucgaggugcagggguacaagagcgugaacaucaccuucgagcuggacgagcgcaucgacaagguccucaacgagaagugcuccgccuacaccguggagcugggcaccgaggugaacgaguucgcgugcgucguggccgacgccgugaucaagacgcugcagccggucagcgagcuccugaccccccuggggaucgaccucgacgagugguccauggccaccuacuaccuguucgacgagagcggcgaguucaagcuggccucccacauguacugcagcuucuacccccccgacgaggacgaggaggagggggacugcgaggaggaggaguucgagccguccacccaguacgaguacggcacggaggacgacuaccagggcaagccccucgaguucggggcgaccagcgccgcccugcagcccgaggaggagcaggaggaggacuggcuggacgacgacucccagcagaccgugggccagcaggacgggagcgaggacaaccagaccacgaccauccagaccaucguggagguccagccccagcucgagauggagcugaccccgguggugcagacgaucgaggucaacuccuucagcggcuaccugaagcucaccgacaacguguacaucaagaacgccgacaucguggaggaggcgaagaaggucaagcccaccgugguggucaacgccgccaacguguaccugaagcacgggggcggcguggccggggcccugaacaaggcgaccaacaacgccaugcaggucgaguccgacgacuacaucgccacgaacggcccccucaagguggggggcagcugcguccuguccggccacaaccuggccaagcacugccuccacgugguggggcccaacgucaacaagggcgaggacauccagcugcugaagagcgccuacgagaacuucaaccagcacgaggugcuccuggcgccgcugcucuccgccgggaucuucggcgccgaccccauccacagccugcgggugugcgucgacaccgugcgcaccaacguguaccuggccgucuucgacaagaaccucuacgacaagcugguguccagcuuccuggagaugaagagcgagaagcagguggagcagaagaucgccgagauccccaaggaggaggucaagcccuucaucaccgaguccaagccgagcguggagcagcggaagcaggacgacaagaagaucaaggcgugcguggaggaggucacgaccacccucgaggagaccaaguuccugacggagaaccugcuccuguacaucgacaucaacgggaaccugcaccccgacuccgccacccucgugagcgacaucgacaucaccuuccugaagaaggacgcccccuacaucgugggcgacgucgugcaggagggcgugcugaccgccgucgugauccccacgaagaaggccgggggcaccaccgagaugcucgcgaaggcccugcgcaaggugccgaccgacaacuacaucacgaccuaccccgggcagggccugaacggguacaccgucgaggaggccaagaccgugcucaagaagugcaaguccgccuucuacauccugcccagcaucaucuccaacgagaagcaggagauccugggcaccgugagcuggaaccuccgggagaugcuggcgcacgccgaggagacgcgcaagcugaugcccgucugcguggagaccaaggccaucguguccaucauccagcggaaguacaagggcaucaagauccaggagggggucguggacuacggcgcccgcuucuacuucuacaccagcaagaccacgguggccucccugaucaacacccucaacgaccugaacgagacccuggucaccaugccgcucggguacgugacgcacggccugaaccuggaggaggcggcccgguacaugcgcagccucaaggugcccgccaccgucuccgugagcucccccgacgccgugaccgccuacaacggguaccugaccagcuccagcaagacgcccgaggagcacuucaucgagaccaucucccuggcgggcagcuacaaggacuggagcuacuccggccagagcacccagcucgggaucgaguuccugaagcggggcgacaaguccgucuacuacaccagcaacccgacgaccuuccaccuggacggggaggugaucaccuucgacaaccucaagacccugcugucccuccgcgaggugcggacgaucaaggucuucaccaccguggacaacaucaaccugcacacccagguggucgacaugagcaugacguacggccagcaguucggccccaccuaccuggacggggccgacgugaccaagaucaagccccacaacucccacgagggcaagaccuucuacgugcucccgaacgacgacacgcugcgcgucgaggccuucgaguacuaccacaccaccgaccccagcuuccuggggcgguacauguccgcccucaaccacaccaagaaguggaaguacccccaggugaacggccugacgagcaucaagugggccgacaacaacugcuaccuggcgaccgcccuccugacccugcagcagaucgagcucaaguucaaccccccggcccugcaggacgccuacuaccgcgcgcgggccggggaggccgccaacuucugcgcccugauccucgcguacugcaacaagaccgugggcgagcugggcgacguccgcgagacgauguccuaccuguuccagcacgccaaccucgacagcugcaagcgggugcugaacgucgugugcaagaccugcgggcagcagcagaccacccugaagggcguggaggccgucauguacauggggacccucuccuacgagcaguucaagaagggcgugcagauccccugcacgugcgggaagcaggccaccaaguaccuggugcagcaggagagccccuucgucaugauguccgcccccccggcgcaguacgagcugaagcacggcaccuucaccugcgccagcgaguacacgggcaacuaccagugcgggcacuacaagcacaucaccuccaaggagacccucuacugcaucgacggcgcccugcugaccaagagcagcgaguacaaggggcccaucacggacguguucuacaaggagaacuccuacaccaccaccaucaagcccgugacguacaagcucgacggcgucgugugcaccgagaucgaccccaagcuggacaacuacuacaagaaggacaacagcuacuucaccgagcagccgaucgaccuggugcccaaccagcccuaccccaacgccuccuucgacaacuucaaguucgucugcgacaacaucaaguucgccgacgaccucaaccagcugaccggguacaagaagccggcgagccgcgagcugaaggugacguucuuccccgaccucaacggcgacguggucgccaucgacuacaagcacuacacccccuccuucaagaagggcgccaagcugcugcacaagcccaucguguggcacgugaacaacgccaccaacaaggcgaccuacaagccgaacacguggugcauccggugccucuggagcaccaagcccgucgagaccuccaacagcuucgacgugcugaaguccgaggacgcccaggggauggacaaccuggccugcgaggaccucaagcccgugagcgaggaggucguggagaaccccaccauccagaaggacgugcuggagugcaacgucaagacgaccgagguggugggcgacaucauccugaagccggccaacaacucccucaagaucaccgaggaggucgggcacaccgaccugauggccgcguacguggacaacagcucccugacgaucaagaagcccaacgagcucagccgcgugcugggccugaagacccucgccacccacgggcuggccgccgucaacuccgugcccugggacaccaucgccaacuacgcgaagccguuccugaacaagguggucagcacgaccaccaacaucgugacccgcugccucaaccgggugugcacgaacuacaugcccuacuucuucacccugcugcuccagcugugcaccuucacccgcuccaccaacagccggaucaaggccuccaugcccacgaccaucgccaagaacaccgucaagagcgugggcaaguucugccuggaggccagcuucaacuaccucaagucccccaacuucagcaagcugaucaacaucaucaucugguuccugcuccuguccgugugccugggcagccucaucuacuccaccgccgcgcuggggguccugaugagcaaccucggcaugccguccuacugcacgggguaccgcgagggcuaccugaacagcaccaacgugaccaucgccaccuacugcacgggcuccauccccugcagcgugugccuguccgggcucgacagccuggacaccuaccccucccuggagaccauccagaucaccaucagcuccuucaagugggaccucacggccuucggccuggucgccgagugguuccuggccuacauccucuucacccgguucuucuacgugcuggggcuggcggccaucaugcagcucuucuucagcuacuucgccgugcacuucaucuccaacagcuggcugauguggcugaucaucaaccugguccagauggcccccaucuccgcgauggugcgcauguacaucuucuucgccagcuucuacuacguguggaagagcuacguccacgugguggacggcugcaacuccagcaccugcaugaugugcuacaagcggaaccgcgccacccgggucgagugcacgaccaucgugaacgggguccgccgguccuucuacguguacgccaacggcggcaagggguucugcaagcuccacaacuggaacugcgugaacugcgacaccuucugcgccggcagcaccuucaucuccgacgaggucgcgcgcgaccugagccugcaguucaagcggccgaucaaccccacggaccaguccagcuacaucguggacuccgugaccgucaagaacgggagcauccaccucuacuucgacaaggccggccagaagaccuacgagcgccacucccugagccacuucgugaaccuggacaaccuccgggccaacaacaccaaggggucccugcccaucaacgugaucgucuucgacggcaagagcaagugcgaggaguccagcgccaaguccgccagcguguacuacucccagcugaugugccagcccauccuccugcuggaccaggcgcucgugagcgacgucggcgacagcgccgagguggccgugaagauguucgacgccuacgucaacacguucuccagcaccuucaacgugccgauggagaagcugaagacccugguggccaccgcggaggccgagcucgccaagaacgucucccuggacaacgugcugagcacguucaucuccgccgcgcgccagggguucguggacagcgacgucgagaccaaggacgugguggagugccucaagcugucccaccagagcgacaucgaggucaccggcgacuccugcaacaacuacaugcugaccuacaacaagguggagaacaugacgccccgggaccucggggccugcaucgacugcagcgcccgccacaucaacgcccagguggccaagucccacaacaucgcgcugaucuggaacgucaaggacuucaugagccuguccgagcagcuccggaagcagauccgcagcgccgccaagaagaacaaccugcccuucaagcugaccugcgccaccacccgccagguggugaacgucgugacgaccaagaucgcccucaagggcggguga

SEQ ID NO: 17979 - RNA, 5841 nt, Artificial Sequence
  SARS-CoV-2__MT750365.1__non-structural protein 3 (NSP3) CDS gc
auggcccccaccaaggugaccuucggcgacgacacggucaucgaggugcagggguacaagagcgugaacaucaccuucgagcuggacgagcgcaucgacaagguccucaacgagaagugcuccgccuacaccguggagcugggcaccgaggugaacgaguucgcgugcgucguggccgacgccgugaucaagacgcugcagccggucagcgagcuccugaccccccuggggaucgaccucgacgagugguccauggccaccuacuaccuguucgacgagagcggcgaguucaagcuggccucccacauguacugcagcuucuacccccccgacgaggacgaggaggagggggacugcgaggaggaggaguucgagccguccacccaguacgaguacggcacggaggacgacuaccagggcaagccccucgaguucggggcgaccagcgccgcccugcagcccgaggaggagcaggaggaggacuggcuggacgacgacucccagcagaccgugggccagcaggacgggagcgaggacaaccagaccacgaccauccagaccaucguggagguccagccccagcucgagauggagcugaccccgguggugcagacgaucgaggucaacuccuucagcggcuaccugaagcucaccgacaacguguacaucaagaacgccgacaucguggaggaggcgaagaaggucaagcccaccgugguggucaacgccgccaacguguaccugaagcacgggggcggcguggccggggcccugaacaaggcgaccaacaacgccaugcaggucgaguccgacgacuacaucgccacgaacggcccccucaagguggggggcagcugcguccuguccggccacaaccuggccaagcacugccuccacgugguggggcccaacgucaacaagggcgaggacauccagcugcugaagagcgccuacgagaacuucaaccagcacgaggugcuccuggcgccgcugcucuccgccgggaucuucggcgccgaccccauccacagccugcgggugugcgucgacaccgugcgcaccaacguguaccuggccgucuucgacaagaaccucuacgacaagcugguguccagcuuccuggagaugaagagcgagaagcagguggagcagaagaucgccgagauccccaaggaggaggucaagcccuucaucaccgaguccaagccgagcguggagcagcggaagcaggacgacaagaagaucaaggcgugcguggaggaggucacgaccacccucgaggagaccaaguuccugacggagaaccugcuccuguacaucgacaucaacgggaaccugcaccccgacuccgccacccucgugagcgacaucgacaucaccuuccugaagaaggacgcccccuacaucgugggcgacgucgugcaggagggcgugcugaccgccgucgugauccccacgaagaaggccgggggcaccaccgagaugcucgcgaaggcccugcgcaaggugccgaccgacaacuacaucacgaccuaccccgggcagggccugaacggguacaccgucgaggaggccaagaccgugcucaagaagugcaaguccgccuucuacauccugcccagcaucaucuccaacgagaagcaggagauccugggcaccgugagcuggaaccuccgggagaugcuggcgcacgccgaggagacgcgcaagcugaugcccgucugcguggagaccaaggccaucguguccaccauccagcggaaguacaagggcaucaagauccaggagggggucguggacuacggcgcccgcuucuacuucuacaccagcaagacgaccguggccucccugaucaacacccucaacgaccugaacgagacccuggucacgaugccgcucggguacgugacccacggccugaaccuggaggaggcggcccgguacaugcgcagccucaaggugcccgccaccgucuccgugagcucccccgacgccgugaccgccuacaacggguaccugacgagcuccagcaagacccccgaggagcacuucaucgagaccaucucccuggcgggcagcuacaaggacuggagcuacuccggccagagcacccagcucgggaucgaguuccugaagcggggcgacaaguccgucuacuacacgagcaacccgaccaccuuccaccuggacggggaggugaucaccuucgacaaccucaagacgcugcugucccuccgcgaggugcggaccaucaaggucuucaccaccguggacaacaucaaccugcacacgcagguggucgacaugagcaugaccuacggccagcaguucggccccaccuaccuggacggggccgacgugaccaagaucaagccccacaacucccacgagggcaagacguucuacgugcucccgaacgacgacacccugcgcgucgaggccuucgaguacuaccacaccaccgaccccagcuuccuggggcgguacauguccgcccucaaccacacgaagaaguggaaguacccccaggugaacggccugaccagcaucaagugggccgacaacaacugcuaccuggcgaccgcccuccugacccugcagcagaucgagcucaaguucaaccccccggcccugcaggacgccuacuaccgcgcgcgggccggggaggccgccaacuucugcgcccugauccucgcguacugcaacaagacggugggcgagcugggcgacguccgcgagaccauguccuaccuguuccagcacgccaaccucgacagcugcaagcgggugcugaacgucgugugcaagaccugcgggcagcagcagaccacccugaagggcguggaggccgucauguacauggggacgcucuccuacgagcaguucaagaagggcgugcagauccccugcaccugcgggaagcaggccaccaaguaccuggugcagcaggagagccccuucgucaugauguccgcccccccggcgcaguacgagcugaagcacggcaccuucacgugcgccagcgaguacaccggcaacuaccagugcgggcacuacaagcacaucaccuccaaggagacccucuacugcaucgacggcgcccugcugacgaagagcagcgaguacaaggggcccaucaccgacguguucuacaaggagaacuccuacaccaccacgaucaagcccgugaccuacaagcucgacggcgucgugugcaccgagaucgaccccaagcuggacaacuacuacaagaaggacaacagcuacuucaccgagcagccgaucgaccuggugcccaaccagcccuaccccaacgccuccuucgacaacuucaaguucgucugcgacaacaucaaguucgccgacgaccucaaccagcugacgggguacaagaagccggcgagccgcgagcugaaggugaccuucuuccccgaccucaacggcgacguggucgccaucgacuacaagcacuacacccccuccuucaagaagggcgccaagcugcugcacaagcccaucguguggcacgugaacaacgccaccaacaaggcgacguacaagccgaacaccuggugcauccggugccucuggagcaccaagcccgucgagaccuccaacagcuucgacgugcugaaguccgaggacgcccaggggauggacaaccuggccugcgaggaccucaagcccgugagcgaggaggucguggagaaccccacgauccagaaggacgugcuggagugcaacgucaagaccaccgagguggugggcgacaucauccugaagccggccaacaacucccucaagaucaccgaggacgucgggcacacggaccugauggccgcguacguggacaacagcucccugaccaucaagaagcccaacgagcucagccgcgugcugggccugaagacccucgccacccacgggcuggccgccgucaacuccgugcccugggacacgaucgccaacuacgcgaagccguuccugaacaagguggucagcaccaccaccaacaucgugacgcgcugccucaaccgggugugcaccaacuacaugcccuacuucuucacccugcugcuccagcugugcaccuucacccgcuccacgaacagccggaucaaggccuccaugcccaccaccaucgccaagaacaccgucaagagcgugggcaaguucugccuggaggccagcuucaacuaccucaagucccccaacuucagcaagcugaucaacaucaucaucugguuccugcuccuguccgugugccugggcagccucaucuacuccacggccgcgcuggggguccugaugagcaaccucggcaugccguccuacugcaccggguaccgcgagggcuaccugaacagcaccaacgugaccaucgccacguacugcaccggcuccauccccugcagcgugugccuguccgggcucgacagccuggacaccuaccccucccuggagaccauccagaucacgaucagcuccuucaagugggaccucaccgccuucggccuggucgccgagugguuccuggccuacauccucuucacccgguucuucuacgugcuggggcuggcggccaucaugcagcucuucuucagcuacuucgccgugcacuucaucuccaacagcuggcugauguggcugaucaucaaccugguccagauggcccccaucuccgcgauggugcgcauguacaucuucuucgccagcuucuacuacguguggaagagcuacguccacgugguggacggcugcaacuccagcaccugcaugaugugcuacaagcggaaccgcgccacgcgggucgagugcaccaccaucgugaacgggguccgccgguccuucuacguguacgccaacggcggcaagggguucugcaagcuccacaacuggaacugcgugaacugcgacaccuucugcgccggcagcacguucaucuccgacgaggucgcgcgcgaccugagccugcaguucaagcggccgaucaaccccaccgaccaguccagcuacaucguggacuccgugaccgucaagaacgggagcauccaccucuacuucgacaaggccggccagaagaccuacgagcgccacucccugagccacuucgugaaccuggacaaccuccgggccaacaacacgaaggggucccugcccaucaacgugaucgucuucgacggcaagagcaagugcgaggaguccagcgccaaguccgccagcguguacuacucccagcugaugugccagcccauccuccugcuggaccaggcgcucgugagcgacgucggcgacagcgccgagguggccgugaagauguucgacgccuacgucaacaccuucuccagcaccuucaacgugccgauggagaagcugaagacccugguggccacggcggaggccgagcucgccaagaacgucucccuggacaacgugcugagcaccuucaucuccgccgcgcgccagggguucguggacagcgacgucgagaccaaggacgugguggagugccucaagcugucccaccagagcgacaucgaggucaccggcgacuccugcaacaacuacaugcugacguacaacaagguggagaacaugaccccccgggaccucggggccugcaucgacugcagcgcccgccacaucaacgcccagguggccaagucccacaacaucgcgcugaucuggaacgucaaggacuucaugagccuguccgagcagcuccggaagcagauccgcagcgccgccaagaagaacaaccugcccuucaagcugaccugcgccaccacgcgccagguggugaacgucgugaccaccaagaucgcccucaagggcggguga

SEQ ID NO: 17980 - RNA, 5841 nt, Artificial Sequence
  SARS-CoV-2__MT750410.1__non-structural protein 3 (NSP3) CDS gc
auggcccccaccaaggugaccuucggcgacgacacggucaucgaggugcagggguacaagagcgugaacaucaccuucgagcuggacgagcgcaucgacaagguccucaacgagaagugcuccgccuacaccguggagcugggcaccgaggugaacgaguucgcgugcgucguggccgacgccgugaucaagacgcugcagccggucagcgagcuccugaccccccuggggaucgaccucgacgagugguccauggccaccuacuaccuguucgacgagagcggcgaguucaagcuggccucccacauguacugcagcuucuacccccccgacgaggacgaggaggagggggacugcgaggaggaggaguucgagccguccacccaguacgaguacggcacggaggacgacuaccagggcaagccccucgaguucggggcgaccagcgccgcccugcagcccgaggaggagcaggaggaggacuggcuggacgacgacucccagcagaccgugggccagcaggacgggagcgaggacaaccagaccacgaccauccagaccaucgugggcguccagccccagcucgagauggagcugaccccgguggugcagacgaucgaggucaacuccuucagcggguaccugaagcucaccgacaacguguacaucaagaacgccgacaucguggaggaggcgaagaaggucaagcccaccgugguggucaacgccgccaacguguaccugaagcacggcggcgggguggccggcgcccugaacaaggcgaccaacaacgccaugcaggucgaguccgacgacuacaucgccacgaacgggccccucaaggugggcggcagcugcguccuguccgggcacaaccuggccaagcacugccuccacguggugggccccaacgucaacaagggggaggacauccagcugcugaagagcgccuacgagaacuucaaccagcacgaggugcuccuggcgccgcugcucuccgccggcaucuucggggccgaccccauccacagccugcgggugugcgucgacaccgugcgcaccaacguguaccuggccgucuucgacaagaaccucuacgacaagcugguguccagcuuccuggagaugaagagcgagaagcagguggagcagaagaucgccgagauccccaaggaggaggucaagcccuucaucaccgaguccaagccgagcguggagcagcggaagcaggacgacaagaagaucaaggcgugcguggaggaggucacgaccacccucgaggagaccaaguuccugacggagaaccugcuccuguacaucgacaucaacggcaaccugcaccccgacuccgccacccucgugagcgacaucgacaucaccuuccugaagaaggacgcccccuacaucgugggcgacgucgugcaggagggggugcugaccgccgucgugauccccacgaagaaggccggcgggaccaccgagaugcucgcgaaggcccugcgcaaggugccgaccgacaacuacaucacgaccuaccccggccaggggcugaacggcuacaccgucgaggaggccaagaccgugcucaagaagugcaaguccgccuucuacauccugcccagcaucaucuccaacgagaagcaggagauccugggcaccgugagcuggaaccuccgggagaugcuggcgcacgccgaggagacgcgcaagcugaugcccgucugcguggagaccaaggccaucguguccaccauccagcggaaguacaaggggaucaagauccaggagggcgucguggacuacggggcccgcuucuacuucuacaccagcaagacgaccguggccucccugaucaacacccucaacgaccugaacgagacccuggucacgaugccgcucggcuacgugacccacgggcugaaccuggaggaggcggcccgguacaugcgcagccucaaggugcccgccaccgucuccgugagcucccccgacgccgugaccgccuacaacggcuaccugacgagcuccagcaagacccccgaggagcacuucaucgagaccaucucccuggcgggcagcuacaaggacuggagcuacuccgggcagagcacccagcucggcaucgaguuccugaagcggggggacaaguccgucuacuacacgagcaacccgaccaccuuccaccuggacggcgaggugaucaccuucgacaaccucaagacgcugcugucccuccgcgaggugcggaccaucaaggucuucaccaccguggacaacaucaaccugcacacgcagguggucgacaugagcaugaccuacggccagcaguucgggcccaccuaccuggacggcgccgacgugaccaagaucaagccccacaacucccacgaggggaagacguucuacgugcucccgaacgacgacacccugcgcgucgaggccuucgaguacuaccacaccaccgaccccagcuuccugggccgguacauguccgcccucaaccacacgaagaaguggaaguacccccaggugaacgggcugaccagcaucaagugggccgacaacaacugcuaccuggcgaccgcccuccugacccugcagcagaucgagcucaaguucaaccccccggcccugcaggacgccuacuaccgcgcgcgggccggcgaggccgccaacuucugcgcccugauccucgcguacugcaacaagacggugggcgagcugggggacguccgcgagaccauguccuaccuguuccagcacgccaaccucgacagcugcaagcgggugcugaacgucgugugcaagaccugcggccagcagcagaccacccugaaggggguggaggccgucauguacaugggcacgcucuccuacgagcaguucaagaagggggugcagauccccugcaccugcggcaagcaggccaccaaguaccuggugcagcaggagagccccuucgucaugauguccgcccccccggcgcaguacgagcugaagcacggcaccuucacgugcgccagcgaguacaccgggaacuaccagugcggccacuacaagcacaucaccuccaaggagacccucuacugcaucgacggggcccugcugacgaagagcagcgaguacaagggccccaucaccgacguguucuacaaggagaacuccuacaccaccacgaucaagcccgugaccuacaagcucgacggggucgugugcaccgagaucgaccccaagcuggacaacuacuacaagaaggacaacagcuacuucaccgagcagccgaucgaccuggugcccaaccagcccuaccccaacgccuccuucgacaacuucaaguucgucugcgacaacaucaaguucgccgacgaccucaaccagcugacgggcuacaagaagccggcgagccgcgagcugaaggugaccuucuuccccgaccucaacggcgacguggucgccaucgacuacaagcacuacacccccuccuucaagaagggggccaagcugcugcacaagcccaucguguggcacgugaacaacgccaccaacaaggcgacguacaagccgaacaccuggugcauccggugccucuggagcaccaagcccgucgagaccuccaacagcuucgacgugcugaaguccgaggacgcccagggcauggacaaccuggccugcgaggaccucaagcccgugagcgaggaggucguggagaaccccacgauccagaaggacgugcuggagugcaacgucaagaccaccgagguggugggggacaucauccugaagccggccaacaacucccucaagaucaccgaggaggucggccacacggaccugauggccgcguacguggacaacagcucccugaccaucaagaagcccaacgagcucagccgcgugcuggggcugaagacccucgccacccacggccuggccgccgucaacuccgugcccugggacacgaucgccaacuacgcgaagccguuccugaacaagguggucagcaccaccaccaacaucgugacgcgcugccucaaccgggugugcaccaacuacaugcccuacuucuucacccugcugcuccagcugugcaccuucacccgcuccacgaacagccggaucaaggccuccaugcccaccaccaucgccaagaacaccgucaagagcgugggcaaguucugccuggaggccagcuucaacuaccucaagucccccaacuucagcaagcugaucaacaucaucaucugguuccugcuccuguccgugugccuggggagccucaucuacuccacggccgcgcugggcguccugaugagcaaccucgggaugccguccuacugcaccggcuaccgcgagggcuaccugaacagcaccaacgugaccaucgccacguacugcaccggguccauccccugcagcgugugccuguccggccucgacagccuggacaccuaccccucccuggagaccauccagaucacgaucagcuccuucaagugggaccucaccgccuucgggcuggucgccgagugguuccuggccuacauccucuucacccgguucuucuacgugcugggccuggcggccaucaugcagcucuucuucagcuacuucgccgugcacuucaucuccaacagcuggcugauguggcugaucaucaaccugguccagauggcccccaucuccgcgauggugcgcauguacaucuucuucgccagcuucuacuacguguggaagagcuacguccacgugguggacgggugcaacuccagcaccugcaugaugugcuacaagcggaaccgcgccacgcgggucgagugcaccaccaucgugaacggcguccgccgguccuucuacguguacgccaacggcgggaagggcuucugcaagcuccacaacuggaacugcgugaacugcgacaccuucugcgccgggagcacguucaucuccgacgaggucgcgcgcgaccugagccugcaguucaagcggccgaucaaccccaccgaccaguccagcuacaucguggacuccgugaccgucaagaacggcagcauccaccucuacuucgacaaggccgggcagaagaccuacgagcgccacucccugagccacuucgugaaccuggacaaccuccgggccaacaacacgaagggcucccugcccaucaacgugaucgucuucgacggcaagagcaagugcgaggaguccagcgccaaguccgccagcguguacuacucccagcugaugugccagcccauccuccugcuggaccaggcgcucgugagcgacgucggggacagcgccgagguggccgugaagauguucgacgccuacgucaacaccuucuccagcaccuucaacgugccgauggagaagcugaagacccugguggccacggcggaggccgagcucgccaagaacgucucccuggacaacgugcugagcaccuucaucuccgccgcgcgccagggcuucguggacagcgacgucgagaccaaggacgugguggagugccucaagcugucccaccagagcgacaucgaggucaccggggacuccugcaacaacuacaugcugacguacaacaagguggagaacaugaccccccgggaccucggcgccugcaucgacugcagcgcccgccacaucaacgcccagguggccaagucccacaacaucgcgcugaucuggaacgucaaggacuucaugagccuguccgagcagcuccggaagcagauccgcagcgccgccaagaagaacaaccugcccuucaagcugaccugcgccaccacgcgccagguggugaacgucgugaccaccaagaucgcccucaaggggggcuga

SEQ ID NO: 17981 - RNA, 5841 nt, Artificial Sequence
  SARS-CoV-2__MT750418.1__non-structural protein 3 (NSP3) CDS gc
auggcccccaccaaggugaccuucggcgacgacacggucaucgaggugcagggguacaagagcgugaacaucaccuucgagcuggacgagcgcaucgacaagguccucaacgagaagugcuccgccuacaccguggagcugggcaccgaggugaacgaguucgcgugcgucguggccgacgccgugaucaagacgcugcagccggucagcgagcuccugaccccccuggggaucgaccucgacgagugguccauggccaccuacuaccuguucgacgagagcggcgaguucaagcuggccucccacauguacugcagcuucuacccccccgacgaggacgaggaggagggggacugcgaggaggaggaguucgagccguccacccaguacgaguacggcacggaggacgacuaccagggcaagccccucgaguucggggcgaccagcgccgcccugcagcccgaggaggagcaggaggaggacuggcuggacgacgacucccagcagaccgugggccagcaggacgggagcgaggacaaccagaccacgaccauccagaccaucguggagguccagccccagcucgagauggagcugaccccgguggugcagacgaucgaggucaacuccuucagcggcuaccugaagcucaccgacaacguguacaucaagaacgccgacaucguggaggaggcgaagaaggucaagcccaccgugguggucaacgccgccaacguguaccugaagcacgggggcggcguggccggggcccugaacaaggcgaccaacaacgccaugcaggucgaguccgacgacuacaucgccacgaacggcccccucaagguggggggcagcugcguccuguccggccacaaccuggccaagcacugccuccacgugguggggcccaacgucaacaagggcgaggacauccagcugcugaagagcgccuacgagaacuucaaccagcacgaggugcuccuggcgccgcugcucuccgccgggaucuucggcgccgaccccauccacagccugcgggugugcgucgacaccgugcgcaccaacguguaccuggccgucuucgacaagaaccucuacgacaagcugguguccagcuuccuggagaugaagagcgagaagcagguggagcagaagaucgccgagauccccaaggaggaggucaagcccuucaucaccgaguccaagccgagcguggagcagcggaagcaggacgacaagaagaucaaggcgugcguggaggaggucacgaccacccucgaggagaccaaguuccugacggagaaccugcuccuguacaucgacaucaacgggaaccugcaccccgacuccgccacccucgugagcgacaucgacaucaccuuccugaagaaggacgcccccuacaucgugggcgacgucgugcaggagggcgugcugaccgccgucgugauccccacgaagaaggccgggggcaccaccgagaugcucgcgaaggcccugcgcaaggugccgaccgacaacuacaucacgaccuaccccgggcagggccugaacggguacaccgucgaggaggccaagaccgugcucaagaagugcaaguccgccuucuacauccugcccagcaucaucuccaacgagaagcaggagauccugggcaccgugagcuggaaccuccgggagaugcuggcgcacgccgaggagacgcgcaagcugaugcccgucugcguggagaccaaggccaucguguccaccauccagcggaaguacaagggcaucaagauccaggagggggucguggacuacggcgcccgcuucuacuucuacaccagcaagacgaccguggccucccugaucaacacccucaacgaccugaacgagacccuggucacgaugccgcucggguacgugacccacggccugaaccuggaggaggcggcccgguacaugcgcagccucaaggugcccgccaccgucuccgugagcucccccgacgccgugaccgccuacaacggguaccugacgagcuccagcaagacccccgaggagcacuucaucgagaccaucucccuggcgggcagcuacaaggacuggagcuacuccggccagagcacccagcucgggaucgaguuccugaagcggggcgacaaguccgucuacuacacgagcaacccgaccaccuuccaccuggacggggaggugaucaccuucgacaaccucaagacgcugcugucccuccgcgaggugcggaccaucaaggucuucaccaccguggacaacaucaaccugcacacgcagguggucgacaugagcaugaccuacggccagcaguucggccccaccuaccuggacggggccgacgugaccaagaucaagccccacaacucccacgagggcaagacguucuacgugcucccgaacgacgacacccugcgcgucgaggccuucgaguacuaccacaccaccgaccccagcuuccuggggcgguacauguccgcccucaaccacacgaagaaguggaaguacccccaggugaacggccugaccagcaucaagugggccgacaacaacugcuaccuggcgaccgcccuccugacccugcagcagaucgagcucaaguucaaccccccggcccugcaggacgccuacuaccgcgcgcgggccggggaggccgccaacuucugcgcccugauccucgcguacugcaacaagacggugggcgagcugggcgacguccgcgagaccauguccuaccuguuccagcacgccaaccucgacagcugcaagcgggugcugaacgucgugugcaagaccugcgggcagcagcagaccacccugaagggcguggaggccgucauguacauggggacgcucuccuacgagcaguucaagaagggcgugcagauccccugcaccugcgggaagcaggccaccaaguaccuggugcagcaggagagccccuucgucaugauguccgcccccccggcgcaguacgagcugaagcacggcaccuucacgugcgccagcgaguacaccggcaacuaccagugcgggcacuacaagcacaucaccuccaaggagacccucuacugcaucgacggcgcccugcugacgaagagcagcgaguacaaggggcccaucaccgacguguucuacaaggagaacuccuacaccaccacgaucaagcccgugaccuacaagcucgacggcgucgugugcaccgagaucgaccccaagcuggacaacuacuacaagaaggacaacagcuacuucaccgagcagccgaucgaccuggugcccaaccagcccuaccccaacgccuccuucgacaacuucaaguucgucugcgacaacaucaaguucgccgacgaccucaaccagcugacgggguacaagaagccggcgagccgcgagcugaaggugaccuucuuccccgaccucaacggcgacguggucgccaucgacuacaagcacuacacccccuccuucaagaagggcgccaagcugcugcacaagcccaucguguggcacgugaacaacgccaccaacaaggcgacguacaagccgaacaccuggugcauccggugccucuggagcaccaagcccgucgagaccuccaacagcuucgacgugcugaaguccgaggacgcccaggggauggacaaccuggccugcgaggaccucaagcccgugagcgaggaggucguggagaaccccacgauccagaaggacgugcuggagugcaacgucaagaccaccgagguggugggcgacaucauccugaagccggccaacaacucccucaagaucaccgaggaggucgggcacacggaccugauggccgcguacguggacaacagcucccugaccaucaagaagcccaacgagcucagccgcgugcugggccugaagacccucgccacccacgggcuggccgccgucaacuccgugcccugggacacgaucgccaacuacgcgaagccguuccugaacaagguggucagcaccaccaccaacaucgugacgcgcugccucaaccgggugugcaccaacuacaugcccuacuucuucacccugcugcuccagcugugcaccuucacccgcuccacgaacagccggaucaaggccuccaugcccaccaccaucgccaagaacaccgucaagagcgugggcaaguucugccuggaggccagcuucaacuaccucaagucccccaacuucagcaagcugaucaacaucaucaucugguuccugcuccuguccgugugccugggcagccucaucuacuccacggccgcgcuggggguccugaugagcaaccucggcaugccguccuacugcaccggguaccgcgagggcuaccugaacagcaccaacgugaccaucgccacguacugcaccggcuccauccccugcagcgugugccuguccgggcucgacagccuggacaccuaccccucccuggagaccauccagaucacgaucagcuccuucaagugggaccucaccgccuucggccuggucgccgagugguuccuggccuacauccucuucacccgguucuucuacgugcuggggcuggcggccaucaugcagcucuucuucagcuacuucgccgugcacuucaucuccaacagcuggcugauguggcugaucaucaaccugguccagauggcccccaucuccgcgauggugcgcauguacaucuucuucgccagcuucuacuacguguggaagagcuacguccacgugguggacggcugcaacuccagcaccugcaugaugugcuacaagcggaaccgcgccacgcgggucgagugcaccaccaucgugaacgggguccgccgguccuucuacguguacgccaacggcggcaagggguucugcaagcuccacaacuggaacugcgugaacugcgacaccuucugcgccggcagcacguucaucuccgacgaggucgcgcgcgaccugagccugcaguucaagcggccgaucaaccccaccgaccaguccagcuacaucguggacuccgugaccgucaagaacgggagcauccaccucuacuucgacaaggccggccagaagaccuacgagcgccacucccugagccacuucgugaaccuggacaaccuccgggccaacaacacgaaggggucccugcccaucaacgugaucgucuucgacggcaagagcaagugcgaggaguccagcgccaaguccgccagcguguacuacucccagcugaugugccagcccauccuccugcuggaccaggcgcucgugagcgacgucggcgacagcgccgaggccgccgugaagauguucgacgccuacgugaacaccuucuccagcaccuucaacgucccgauggagaagcugaagacccugguggcgacggccgaggccgagcucgccaagaacgugucccuggacaacguccugagcaccuucaucuccgcggcccgccagggguucguggacagcgacguggagaccaaggacgucguggagugccucaagcugucccaccagagcgacaucgaggugaccggcgacuccugcaacaacuacaugcugacguacaacaaggucgagaacaugaccccccgggaccucggggccugcaucgacugcagcgcccgccacaucaacgcccagguggcgaagucccacaacaucgcccugaucuggaacgugaaggacuucaugagccuguccgagcagcuccggaagcagauccgcagcgccgccaagaagaacaaccugcccuucaagcugaccugcgccaccacgcgccaggucgugaacguggucaccaccaagaucgcgcucaagggcggguga

SEQ ID NO: 17982 - RNA, 5841 nt, Artificial Sequence
  SARS-CoV-2__MT750436.1__non-structural protein 3 (NSP3) CDS gc
auggcccccaccaaggugaccuucggcgacgacacggucaucgaggugcagggguacaagagcgugaacaucaccuucgagcuggacgagcgcaucgacaagguccucaacgagaagugcuccgccuacaccguggagcugggcaccgaggugaacgaguucgcgugcgucguggccgacgccgugaucaagacgcugcagccggucagcgagcuccugaccccccuggggaucgaccucgacgagugguccauggccaccuacuaccuguucgacgagagcggcgaguucaagcuggccucccacauguacugcagcuucuacccccccgacgaggacgaggaggagggggacugcgaggaggaggaguucgagccguccacccaguacgaguacggcacggaggacgacuaccagggcaagccccucgaguucggggcgaccagcgccgcccugcagcccgaggaggagcaggaggaggacuggcuggacgacgacucccagcagaccgugggccagcaggacgggagcgaggacaaccagaccacgaccauccagaccaucguggagguccagccccagcucgacauggagcugaccccgguggugcagacgaucgaggucaacuccuucagcggcuaccugaagcucaccgacaacguguacaucaagaacgccgacaucguggaggaggcgaagaaggucaagcccaccgugguggucaacgccgccaacguguaccugaagcacgggggcggcguggccggggcccugaacaaggcgaccaacaacgccaugcaggucgaguccgacgacuacaucgccacgaacggcccccucaagguggggggcagcugcguccuguccggccacaaccuggccaagcacugccuccacgugguggggcccaacgucaacaagggcgaggacauccagcugcugaagagcgccuacgagaacuucaaccagcacgaggugcuccuggcgccgcugcucuccgccgggaucuucggcgccgaccccauccacagccugcgggugugcgucgacaccgugcgcaccaacguguaccuggccgucuucgacaagaaccucuacgacaagcugguguccagcuuccuggagaugaagagcgagaagcagguggagcagaagaucgccgagauccccaaggaggaggucaagcccuucaucaccgaguccaagccgagcguggagcagcggaagcaggacgacaagaagaucaaggcgugcguggaggaggucacgaccacccucgaggagaccaaguuccugacggagaaccugcuccuguacaucgacaucaacgggaaccugcaccccgacuccgccacccucgugagcgacaucgacaucaccuuccugaagaaggacgcccccuacaucgugggcgacgucgugcaggagggcgugcugaccgccgucgugauccccacgaagaaggccgggggcaccaccgagaugcucgcgaaggcccugcgcaaggugccgaccgacaacuacaucacgaccuaccccgggcagggccugaacggguacaccgucgaggaggccaagaccgugcucaagaagugcaaguccgccuucuacauccugcccagcaucaucuccaacgagaagcaggagauccugggcaccgugagcuggaaccuccgggagaugcuggcgcacgccgaggagacgcgcaagcugaugcccgucugcguggagaccaaggccaucguguccaccauccagcggaaguacaagggcaucaagauccaggagggggucguggacuacggcgcccgcuucuacuucuacaccagcaagacgaccguggccucccugaucaacacccucaacgaccugaacgagacccuggucacgaugccgcucggguacgugacccacggccugaaccuggaggaggcggcccgguacaugcgcagccucaaggugcccgccaccgucuccgugagcucccccgacgccgugaccgccuacaacggguaccugacgagcuccagcaagacccccgaggagcacuucaucgagaccaucucccuggcgggcagcuacaaggacuggagcuacuccggccagagcacccagcucgggaucgaguuccugaagcggggcgacaaguccgucuacuacacgagcaacccgaccaccuuccaccuggacggggaggugaucaccuucgacaaccucaagacgcugcugucccuccgcgaggugcggaccaucaaggucuucaccaccguggacaacaucaaccugcacacgcagguggucgacaugagcaugaccuacggccagcaguucggccccaccuaccuggacggggccgacgugaccaagaucaagccccacaacucccacgagggcaagacguucuacgugcucccgaacgacgacacccugcgcgucgaggccuucgaguacuaccacaccaccgaccccagcuuccuggggcgguacauguccgcccucaaccacacgaagaaguggaaguacccccaggugaacggccugaccagcaucaagugggccgacaacaacugcuaccuggcgaccgcccuccugacccugcagcagaucgagcucaaguucaaccccccggcccugcaggacgccuacuaccgcgcgcgggccggggaggccgccaacuucugcgcccugauccucgcguacugcaacaagacggugggcgagcugggcgacguccgcgagaccauguccuaccuguuccagcacgccaaccucgacagcugcaagcgggugcugaacgucgugugcaagaccugcgggcagcagcagaccacccugaagggcguggaggccgucauguacauggggacgcucuccuacgagcaguucaagaagggcgugcagauccccugcaccugcgggaagcaggccaccaaguaccuggugcagcaggagagccccuucgucaugauguccgcccccccggcgcaguacgagcugaagcacggcaccuucacgugcgccagcgaguacaccggcaacuaccagugcgggcacuacaagcacaucaccuccaaggagacccucuacugcaucgacggcgcccugcugacgaagagcagcgaguacaaggggcccaucaccgacguguucuacaaggagaacuccuacaccaccacgaucaagcccgugaccuacaagcucgacggcgucgugugcaccgagaucgaccccaagcuggacaacuacuacaagaaggacaacagcuacuucaccgagcagccgaucgaccuggugcccaaccagcccuaccccaacgccuccuucgacaacuucaaguucgucugcgacaacaucaaguucgccgacgaccucaaccagcugacgggguacaagaagccggcgagccgcgagcugaaggugaccuucuuccccgaccucaacggcgacguggucgccaucgacuacaagcacuacacccccuccuucaagaagggcgccaagcugcugcacaagcccaucguguggcacgugaacaacgccaccaacaaggcgacguacaagccgaacaccuggugcauccggugccucuggagcaccaagcccgucgagaccuccaacagcuucgacgugcugaaguccgaggacgcccaggggauggacaaccuggccugcgaggaccucaagcccgugagcgaggaggucguggagaaccccacgauccagaaggacgugcuggagugcaacgucaagaccaccgagguggugggcgacaucauccugaagccggccaacaacucccucaagaucaccgaggaggucgggcacacggaccugauggccgcguacguggacaacagcucccugaccaucaagaagcccaacgagcucagccgcgugcugggccugaagacccucgccacccacgggcuggccgccgucaacuccgugcccugggacacgaucgccaacuacgcgaagccguuccugaacaagguggucagcaccaccaccaacaucgugacgcgcugccucaaccgggugugcaccaacuacaugcccuacuucuucacccugcugcuccagcugugcaccuucacccgcuccacgaacagccggaucaaggccuccaugcccaccaccaucgccaagaacaccgucaagagcgugggcaaguucugccuggaggccagcuucaacuaccucaagucccccaacuucagcaagcugaucaacaucaucaucugguuccugcuccuguccgugugccugggcagccucaucuacuccacggccgcgcuggggguccugaugagcaaccucggcaugccguccuacugcaccggguaccgcgagggcuaccugaacagcaccaacgugaccaucgccacguacugcaccggcuccauccccugcagcgugugccuguccgggcucgacagccuggacaccuaccccucccuggagaccauccagaucacgaucagcuccuucaagugggaccucaccgccuucggccuggucgccgagugguuccuggccuacauccucuucacccgguucuucuacgugcuggggcuggcggccaucaugcagcucuucuucagcuacuucgccgugcacuucaucuccaacagcuggcugauguggcugaucaucaaccugguccagauggcccccaucuccgcgauggugcgcauguacaucuucuucgccagcuucuacuacguguggaagagcuacguccacgugguggacggcugcaacuccagcaccugcaugaugugcuacaagcggaaccgcgccacgcgggucgagugcaccaccaucgugaacgggguccgccgguccuucuacguguacgccaacggcggcaagggguucugcaagcuccacaacuggaacugcgugaacugcgacaccuucugcgccggcagcacguucaucuccgacgaggucgcgcgcgaccugagccugcaguucaagcggccgaucaaccccaccgaccaguccagcuacaucguggacuccgugaccgucaagaacgggagcauccaccucuacuucgacaaggccggccagaagaccuacgagcgccacucccugagccacuucgugaaccuggacaaccuccgggccaacaacacgaaggggucccugcccaucaacgugaucgucuucgacggcaagagcaagugcgaggaguccagcgccaaguccgccagcguguacuacucccagcugaugugccagcccauccuccugcuggaccaggcgcucgugagcgacgucggcgacagcgccgagguggccgugaagauguucgacgccuacgucaacaccuucuccagcaccuucaacgugccgauggagaagcugaagacccugguggccacggcggaggccgagcucgccaagaacgucucccuggacaacgugcugagcaccuucaucuccgccgcgcgccagggguucguggacagcgacgucgagaccaaggacgugguggagugccucaagcugucccaccagagcgacaucgaggucaccggcgacuccugcaacaacuacaugcugacguacaacaagguggagaacaugaccccccgggaccucggggccugcaucgacugcagcgcccgccacaucaacgcccagguggccaagucccacaacaucgcgcugaucuggaacgucaaggacuucaugagccuguccgagcagcuccggaagcagauccgcagcgccgccaagaagaacaaccugcccuucaagcugaccugcgccaccacgcgccagguggugaacgucgugaccaccaagaucgcccucaagggcggguga

SEQ ID NO: 17983 - RNA, 5841 nt, Artificial Sequence
  SARS-CoV-2__MT742784.1__non-structural protein 3 (NSP3) CDS gc
auggcccccaccaaggugaccuucggcgacgacacggucaucgaggugcagggguacaagagcgugaacaucaccuucgagcuggacgagcgcaucgacaagguccucaacgagaagugcuccgccuacaccguggagcugggcaccgaggugaacgaguucgcgugcgucguggccgacgccgugaucaagacgcugcagccggucagcgagcuccugaccccccuggggaucgaccucgacgagugguccauggccaccuacuaccuguucgacgagagcggcgaguucaagcuggccucccacauguacugcagcuucuacccccucgacgaggacgaggaggagggggacugcgaggaggaggaguucgagcccuccacccaguacgaguacggcacggaggacgacuaccagggcaagccgcuggaguucggggcgaccagcgccgcccugcagcccgaggaggagcaggaggaggacuggcucgacgacgacucccagcagaccgugggccagcaggacgggagcgaggacaaccagaccacgaccauccagaccaucguggagguccagccccagcuggagauggagcugacccccguggugcagacgaucgaggucaacuccuucagcggcuaccucaagcugaccgacaacguguacaucaagaacgccgacaucguggaggaggcgaagaaggucaagccgaccgugguggucaacgccgccaacguguaccugaagcacgggggcggcguggccggggcccucaacaaggcgaccaacaacgccaugcaggucgaguccgacgacuacaucgccacgaacggcccccugaagguggggggcagcugcguccuguccggccacaaccucgccaagcacugccugcacgugguggggcccaacgucaacaagggcgaggacauccagcugcucaagagcgccuacgagaacuucaaccagcacgaggugcugcuggcgccccuccuguccgccgggaucuucggcgccgacccgauccacagccugcgggugugcgucgacaccgugcgcaccaacguguaccucgccgucuucgacaagaaccuguacgacaagcugguguccagcuuccucgagaugaagagcgagaagcagguggagcagaagaucgccgagauccccaaggaggaggucaagcccuucaucaccgaguccaagcccagcguggagcagcggaagcaggacgacaagaagaucaaggcgugcguggaggaggucacgaccacccuggaggagaccaaguuccugacggagaaccuccugcuguacaucgacaucaacgggaaccuccacccggacuccgccacccuggugagcgacaucgacaucaccuuccugaagaaggacgcccccuacaucgugggcgacgucgugcaggagggcgugcucaccgccgucgugauccccacgaagaaggccgggggcaccaccgagaugcuggcgaaggcccugcgcaaggugcccaccgacaacuacaucacgaccuacccggggcagggccucaacggguacaccgucgaggaggccaagaccgugcugaagaagugcaaguccgccuucuacauccugcccagcaucaucuccaacgagaagcaggagauccucggcaccgugagcuggaaccugcgggagaugcuggcgcacgccgaggagacgcgcaagcugaugcccgucugcguggagaccaaggccaucguguccaccauccagcggaaguacaagggcaucaagauccaggagggggucguggacuacggcgcccgcuucuacuucuacaccagcaagacgaccguggccucccucaucaacacccugaacgaccugaacgagacccucgucacgaugccccugggguacgugacccacggccugaaccucgaggaggcggcccgguacaugcgcagccugaaggugccggccaccgucuccgugagcucccccgacgccgugaccgccuacaacggguaccugacgagcuccagcaagacccccgaggagcacuucaucgagaccaucucccucgcgggcagcuacaaggacuggagcuacuccggccagagcacccagcuggggaucgaguuccugaagcggggcgacaaguccgucuacuacacgagcaaccccaccaccuuccaccucgacggggaggugaucaccuucgacaaccugaagacgcugcucucccugcgcgaggugcggaccaucaaggucuucaccaccguggacaacaucaaccugcacacgcagguggucgacaugagcaugaccuacggccagcaguucggcccgaccuaccucgacggggccgacgugaccaagaucaagccccacaacucccacgagggcaagacguucuacgugcugcccaacgacgacacccugcgcgucgaggccuucgaguacuaccacaccaccgacccgagcuuccucgggcgguacauguccgcccugaaccacacgaagaaguggaaguacccccaggugaacggccugaccagcaucaagugggccgacaacaacugcuaccucgcgaccgcccugcugacccuccagcagaucgagcugaaguucaacccccccgcccugcaggacgccuacuaccgcgcgcgggccggggaggccgccaacuucugcgcccucauccuggcguacugcaacaagacggugggcgagcugggcgacguccgcgagaccauguccuaccucuuccagcacgccaaccuggacagcugcaagcgggugcugaacgucgugugcaagaccugcgggcagcagcagaccacccucaagggcguggaggccgucauguacauggggacgcuguccuacgagcaguucaagaagggcgugcagaucccgugcaccugcgggaagcaggccaccaaguaccuggugcagcaggagagccccuucgucaugauguccgccccccccgaccaguacgagcucaagcacggcaccuucacgugcgcgagcgaguacaccggcaacuaccagugcgggcacuacaagcacaucaccuccaaggagacccuguacugcaucgacggcgcccugcucacgaagagcagcgaguacaaggggccgaucaccgacguguucuacaaggagaacuccuacaccaccacgaucaagcccgugaccuacaagcuggacggcgucgugugcaccgagaucgaccccaagcuggacaacuacuacaagaaggacaacagcuacuucaccgagcagcccaucgaccucgugccgaaccagcccuaccccaacgccuccuucgacaacuucaaguucgucugcgacaacaucaaguucgccgacgaccugaaccagcugacgggguacaagaagcccgccagccgcgagcucaaggugaccuucuucccggaccugaacggcgacguggucgcgaucgacuacaagcacuacacccccuccuucaagaagggcgccaagcugcuccacaagcccaucguguggcacgugaacaacgccaccaacaaggccacguacaagcccaacaccuggugcauccggugccuguggagcaccaagccggucgagaccuccaacagcuucgacgugcugaaguccgaggacgcgcaggggauggacaaccucgccugcgaggaccugaagcccgugagcgaggaggucguggagaaccccacgauccagaaggacgugcuggagugcaacgucaagaccaccgagguggugggcgacaucauccucaagcccgccaacaacucccugaagaucaccgaggaggucgggcacacggaccugauggccgccuacguggacaacagcucccucaccaucaagaagccgaacgagcugagccgcgugcugggccucaagacccuggcgacccacgggcuggccgccgucaacuccgugcccugggacacgaucgccaacuacgccaagcccuuccucaacaagguggucagcaccaccaccaacaucgugacgcgcugccugaaccgggugugcaccaacuacaugccguacuucuucacccugcuccugcagcugugcaccuucacccgcuccacgaacagccggaucaaggcguccaugcccaccaccaucgccaagaacaccgucaagagcgugggcaaguucugccucgaggccagcuucaacuaccugaagucccccaacuucagcaagcugaucaacaucaucaucugguuccuccugcuguccgugugccucggcagccugaucuacuccacggccgcccuggggguccucaugagcaaccugggcaugcccuccuacugcaccggguaccgcgagggcuaccugaacagcaccaacgugaccaucgcgacguacugcaccggcuccaucccgugcagcgugugccucuccgggcuggacagccuggacaccuaccccucccucgagaccauccagaucacgaucagcuccuucaagugggaccugaccgccuucggccuggucgccgagugguuccucgccuacauccuguucacccgguucuucuacgugcuggggcucgccgcgaucaugcagcuguucuucagcuacuucgccgugcacuucaucuccaacagcuggcugauguggcugaucaucaaccucguccagauggcccccaucuccgccauggugcgcauguacaucuucuucgcgagcuucuacuacguguggaagagcuacguccacgugguggacggcugcaacuccagcaccugcaugaugugcuacaagcggaaccgcgccacgcgggucgagugcaccaccaucgugaacgggguccgccgguccuucuacguguacgccaacggcggcaagggguucugcaagcugcacaacuggaacugcgugaacugcgacaccuucugcgccggcagcacguucaucuccgacgaggucgcccgcgaccugagccuccaguucaagcggcccaucaacccgaccgaccaguccagcuacaucguggacuccgugaccgucaagaacgggagcauccaccuguacuucgacaaggcgggccagaagaccuacgagcgccacucccugagccacuucgugaaccucgacaaccugcgggccaacaacacgaaggggucccugcccaucaacgugaucgucuucgacggcaagagcaagugcgaggaguccagcgccaaguccgccagcguguacuacucccagcucaugugccagcccauccugcugcucgaccaggcccuggugagcgacgucggcgacagcgcggagguggccgugaagauguucgacgccuacgucaacaccuucuccagcaccuucaacgugcccauggagaagcugaagacccucguggccacggccgaggcggagcuggccaagaacgucucccuggacaacgugcucagcaccuucaucuccgccgcccgccagggguucguggacagcgacgucgagaccaaggacgugguggagugccugaagcugucccaccagagcgacaucgaggucaccggcgacuccugcaacaacuacaugcucacguacaacaagguggagaacaugaccccgcgggaccugggggcgugcaucgacugcagcgcccgccacaucaacgcccagguggccaagucccacaacaucgcccugaucuggaacgucaaggacuucaugagccucuccgagcagcugcggaagcagauccgcagcgcggccaagaagaacaaccugcccuucaagcucaccugcgccaccacgcgccagguggugaacgucgugaccaccaagaucgcccugaagggcggguga

SEQ ID NO: 17984 - RNA, 5841 nt, Artificial Sequence
  SARS-CoV-2__MT740392.1__non-structural protein 3 (NSP3) CDS gc
auggcccccaccaaggugaccuucggcgacgacacggucaucgaggugcagggguacaagagcgugaacaucaccuucgagcuggacgagcgcaucgacaagguccucaacgagaagugcuccgccuacaccguggagcugggcaccgaggugaacgaguucgcgugcgucguggccgacgccgugaucaagacgcugcagccggucagcgagcuccugaccccccuggggaucgaccucgacgagugguccauggccaccuacuaccuguucgacgagagcggcgaguucaagcuggccucccacauguacugcagcuucuacccccccgacgaggacgaggaggagggggacugcgaggaggaggaguucgagccguccacccaguacgaguacggcacggaggacgacuaccagggcaagccccucgaguucggggcgaccagcgccgcccugcagcccgaggaggagcaggaggaggacuggcuggacgacgacucccagcagaccgugggccagcaggacgggagcgacgacaaccagaccacgaccauccagaccaucguggagguccagccccagcucgagauggagcugaccccgguggugcagacgaucgaggucaacuccuucagcggcuaccugaagcucaccgacaacguguacaucaagaacgccgacaucguggaggaggcgaagaaggucaagcccaccgugguggucaacgccgccaacguguaccugaagcacgggggcggcguggccggggcccugaacaaggcgaccaacaacgccaugcaggucgaguccgacgacuacaucgccacgaacggcccccucaagguggggggcagcugcguccuguccggccacaaccuggccaagcacugccuccacgugguggggcccaacgucaacaagggcgaggacauccagcugcugaagagcgccuacgagaacuucaaccagcacgaggugcuccuggcgccgcugcucuccgccgggaucuucggcgccgaccccauccacagccugcgggugugcgucgacaccgugcgcaccaacguguaccuggccgucuucgacaagaaccucuacgacaagcugguguccagcuuccuggagaugaagagcgagaagcagguggagcagaagaucgccgagauccccaaggaggaggucaagcccuucaucaccgaguccaagccgagcguggagcagcggaagcaggacgacaagaagaucaaggcgugcguggaggaggucacgaccacccucgaggagaccaaguuccugacggagaaccugcuccuguacaucgacaucaacgggaaccugcaccccgacuccgccacccucgugagcgacaucgacaucaccuuccugaagaaggacgcccccuacaucgugggcgacgucgugcaggagggcgugcugaccgccgucgugauccccacgaagaaggccgggggcaccaccgagaugcucgcgaaggcccugcgcaaggugccgaccgacaacuacaucacgaccuaccccgggcagggccugaacggguacaccgucgaggaggccaagaccgugcucaagaagugcaaguccgccuucuacauccugcccagcaucaucuccaacgagaagcaggagauccugggcaccgugagcuggaaccuccgggagaugcuggcgcacgccgaggagacgcgcaagcugaugcccgucugcguggagaccaaggccaucguguccaccauccagcggaaguacaagggcaucaagauccaggagggggucguggacuacggcgcccgcuucuacuucuacaccagcaagacgaccguggccucccugaucaacacccucaacgaccugaacgagacccuggucacgaugccgcucggguacgugacccacggccugaaccuggaggaggcggcccgguacaugcgcagccucaaggugcccgccaccgucuccgugagcucccccgacgccgugaccgccuacaacggguaccugacgagcuccagcaagacccccgaggagcacuucaucgagaccaucucccuggcgggcagcuacaaggacuggagcuacuccggccagagcacccagcucgggaucgaguuccugaagcggggcgacaaguccgucuacuacacgagcaacccgaccaccuuccaccuggacggggaggugaucaccuucgacaaccucaagacgcugcugucccuccgcgaggugcggaccaucaaggucuucaccaccguggacaacaucaaccugcacacgcagguggucgacaugagcaugaccuacggccagcaguucggccccaccuaccuggacggggccgacgugaccaagaucaagccccacaacucccacgagggcaagacguucuacgugcucccgaacgacgacacccugcgcgucgaggccuucgaguacuaccacaccaccgaccccagcuuccuggggcgguacauguccgcccucaaccacacgaagaaguggaaguacccccaggugaacggccugaccagcaucaagugggccgacaacaacugcuaccuggcgaccgcccuccugacccugcagcagaucgagcucaaguucaaccccccggcccugcaggacgccuacuaccgcgcgcgggccggggaggccgccaacuucugcgcccugauccucgcguacugcaacaagacggugggcgagcugggcgacguccgcgagaccauguccuaccuguuccagcacgccaaccucgacagcugcaagcgggugcugaacgucgugugcaagaccugcgggcagcagcagaccacccugaagggcguggaggccgucauguacauggggacgcucuccuacgagcaguucaagaagggcgugcagauccccugcaccugcgggaagcaggccaccaaguaccuggugcagcaggagagccccuucgucaugauguccgcccccccggcgcaguacgagcugaagcacggcaccuucacgugcgccagcgaguacaccggcaacuaccagugcgggcacuacaagcacaucaccuccaaggagacccucuacugcaucgacggcgcccugcugacgaagagcagcgaguacaaggggcccaucaccgacguguucuacaaggagaacuccuacaccaccacgaucaagcccgugaccuacaagcucgacggcgucgugugcaccgagaucgaccccaagcuggacaacuacuacaagaaggacaacagcuacuucaccgagcagccgaucgaccuggugcccaaccagcccuaccccaacgccuccuucgacaacuucaaguucgucugcgacaacaucaaguucgccgacgaccucaaccagcugacgggguacaagaagccggcgagccgcgagcugaaggugaccuucuuccccgaccucaacggcgacguggucgccaucgacuacaagcacuacacccccuccuucaagaagggcgccaagcugcugcacaagcccaucguguggcacgugaacaacgccaccaacaaggcgacguacaagccgaacaccuggugcauccggugccucuggagcaccaagcccgucgagaccuccaacagcuucgacgugcugaaguccgaggacgcccaggggauggacaaccuggccugcgaggaccucaagcccgugagcgaggaggucguggagaaccccacgauccagaaggacgugcuggagugcaacgucaagaccaccgagguggugggcgacaucauccugaagccggccaacaacucccucaagaucaccgaggaggucgggcacacggaccugauggccgcguacguggacaacagcucccugaccaucaagaagcccaacgagcucagccgcgugcugggccugaagacccucgccacccacgggcuggccgccgucaacuccgugcccugggacacgaucgccaacuacgcgaagccguuccugaacaagguggucagcaccaccaccaacaucgugacgcgcugccucaaccgggugugcaccaacuacaugcccuacuucuucacccugcugcuccagcugugcaccuucacccgcuccacgaacagccggaucaaggccuccaugcccaccaccaucgccaagaacaccgucaagagcgugggcaaguucugccuggaggccagcuucaacuaccucaagucccccaacuucagcaagcugaucaacaucaucaucugguuccugcuccuguccgugugccugggcagccucaucuacuccacggccgcgcuggggguccugaugagcaaccucggcaugccguccuacugcaccggguaccgcgagggcuaccugaacagcaccaacgugaccaucgccacguacugcaccggcuccauccccugcagcgugugccuguccgggcucgacagccuggacaccuaccccucccuggagaccauccagaucacgaucagcuccuucaagugggaccucaccgccuucggccuggucgccgagugguuccuggccuacauccucuucacccgguucuucuacgugcuggggcuggcggccaucaugcagcucuucuucagcuacuucgccgugcacuucaucuccaacagcuggcugauguggcugaucaucaaccugguccagauggcccccaucuccgcgauggugcgcauguacaucuucuucgccagcuucuacuacguguggaagagcuacguccacgugguggacggcugcaacuccagcaccugcaugaugugcuacaagcggaaccgcgccacgcgggucgagugcaccaccaucgugaacgggguccgccgguccuucuacguguacgccaacggcggcaagggguucugcaagcuccacaacuggaacugcgugaacugcgacaccuucugcgccggcagcacguucaucuccgacgaggucgcgcgcgaccugagccugcaguucaagcggccgaucaaccccaccgaccaguccagcuacaucguggacuccgugaccgucaagaacgggagcauccaccucuacuucgacaaggccggccagaagaccuacgagcgccacucccugagccacuucgugaaccuggacaaccuccgggccaacaacacgaaggggucccugcccaucaacgugaucgucuucgacggcaagagcaagugcgaggaguccagcgccaaguccgccagcguguacuacucccagcugaugugccagcccauccuccugcuggaccaggcgcucgugagcgacgucggcgacagcgccgagguggccgugaagauguucgacgccuacgucaacaccuucuccagcaccuucaacgugccgauggagaagcugaagacccugguggccacggcggaggccgagcucgccaagaacgucucccuggacaacgugcugagcaccuucaucuccgccgcgcgccagggguucguggacagcgacgucgagaccaaggacgugguggagugccucaagcugucccaccagagcgacaucgaggucaccggcgacuccugcaacaacuacaugcugacguacaacaagguggagaacaugaccccccgggaccucggggccugcaucgacugcagcgcccgccacaucaacgcccagguggccaagucccacaacaucgcgcugaucuggaacgucaaggacuucaugagccuguccgagcagcuccggaagcagauccgcagcgccgccaagaagaacaaccugcccuucaagcugaccugcgccaccacgcgccagguggugaacgucgugaccaccaagaucgcccucaagggcggguga

SEQ ID NO: 17985 - RNA, 5841 nt, Artificial Sequence
  SARS-CoV-2__MT740401.1__non-structural protein 3 (NSP3) CDS gc
auggcccccaccaaggugaccuucggcgacgacacggucaucgaggugcagggguacaagagcgugaacaucaccuucgagcuggacgagcgcaucgacaagguccucaacgagaagugcuccgccuacaccguggagcugggcaccgaggugaacgaguucgcgugcgucguggccgacgccgugaucaagacgcugcagccggucagcgagcuccugaccccccuggggaucgaccucgacgagugguccauggccaccuacuaccuguucgacgagagcggcgaguucaagcuggccucccacauguacugcagcuucuacccccccgacgaggacgaggaggagggggacugcgaggaggaggaguucgagccguccacccaguacgaguacggcacggaggacgacuaccagggcaagccccucgaguucggggcgaccagcgccgcccugcagcccgaggaggagcaggaggaggacuggcuggacgacgacucccagcagaccgugggccagcaggacgggagcgaggacaaccagaccacgaccauccagaccaucguggagguccagccccagcucgagauggagcugaccccgguggugcagacgaucgaggucaacuccuucagcggcuaccugaagcucaccgacaacguguacaucaagaacgccgacaucguggaggaggcgaagaaggucaagcccaccgugguggucaacgccgccaacgugugccugaagcacgggggcggcguggccggggcccugaacaaggcgaccaacaacgccaugcaggucgaguccgacgacuacaucgccacgaacggcccccucaagguggggggcagcugcguccuguccggccacaaccuggccaagcacugccuccacgugguggggcccaacgucaacaagggcgaggacauccagcugcugaagagcgccuacgagaacuucaaccagcacgaggugcuccuggcgccgcugcucuccgccgggaucuucggcgccgaccccauccacagccugcgggugugcgucgacaccgugcgcaccaacguguaccuggccgucuucgacaagaaccucuacgacaagcugguguccagcuuccuggagaugaagagcgagaagcagguggagcagaagaucgccgagauccccaaggaggaggucaagcccuucaucaccgaguccaagccgagcguggagcagcggaagcaggacgacaagaagaucaaggcgugcguggaggaggucacgaccacccucgaggagaccaaguuccugacggagaaccugcuccuguacaucgacaucaacgggaaccugcaccccgacuccgccacccucgugagcgacaucgacaucaccuuccugaagaaggacgcccccuacaucgugggcgacgucgugcaggagggcgugcugaccgccgucgugauccccacgaagaaggccgggggcaccaccgagaugcucgcgaaggcccugcgcaaggugccgaccgacaacuacaucacgaccuaccccgggcagggccugaacggguacaccgucgaggaggccaagaccgugcucaagaagugcaaguccgccuucuacauccugcccagcaucaucuccaacgagaagcaggagauccugggcaccgugagcuggaaccuccgggagaugcuggcgcacgccgaggagacgcgcaagcugaugcccgucugcguggagaccaaggccaucguguccaccauccagcggaaguacaagggcaucaagauccaggagggggucguggacuacggcgcccgcuucuacuucuacaccagcaagacgaccguggccucccugaucaacacccucaacgaccugaacgagacccuggucacgaugccgcucggguacgugacccacggccugaaccuggaggaggcggcccgguacaugcgcagccucaaggugcccgccaccgucuccgugagcucccccgacgccgugaccgccuacaacggguaccugacgagcuccagcaagacccccgaggagcacuucaucgagaccaucucccuggcgggcagcuacaaggacuggagcuacuccggccagagcacccagcucgggaucgaguuccugaagcggggcgacaaguccgucuacuacacgagcaacccgaccaccuuccaccuggacggggaggugaucaccuucgacaaccucaagacgcugcugucccuccgcgaggugcggaccaucaaggucuucaccaccguggacaacaucaaccugcacacgcagguggucgacaugagcaugaccuacggccagcaguucggccccaccuaccuggacggggccgacgugaccaagaucaagccccacaacucccacgagggcaagacguucuacgugcucccgaacgacgacacccugcgcgucgaggccuucgaguacuaccacaccaccgaccccagcuuccuggggcgguacauguccgcccucaaccacacgaagaaguggaaguacccccaggugaacggccugaccagcaucaagugggccgacaacaacugcuaccuggcgaccgcccuccugacccugcagcagaucgagcucaaguucaaccccccggcccugcaggacgccuacuaccgcgcgcgggccggggaggccgccaacuucugcgcccugauccucgcguacugcaacaagacggugggcgagcugggcgacguccgcgagaccauguccuaccuguuccagcacgccaaccucgacagcugcaagcgggugcugaacgucgugugcaagaccugcgggcagcagcagaccacccugaagggcguggaggccgucauguacauggggacgcucuccuacgagcaguucaagaagggcgugcagauccccugcaccugcgggaagcaggccaccaaguaccuggugcagcaggagagccccuucgucaugauguccgcccccccggcgcaguacgagcugaagcacggcaccuucacgugcgccagcgaguacaccggcaacuaccagugcgggcacuacaagcacaucaccuccaaggagacccucuacugcaucgacggcgcccugcugacgaagagcagcgaguacaaggggcccaucaccgacguguucuacaaggagaacuccuacaccaccacgaucaagcccgugaccuacaagcucgacggcgucgugugcaccgagaucgaccccaagcuggacaacuacuacaagaaggacaacagcuacuucaccgagcagccgaucgaccuggugcccaaccagcccuaccccaacgccuccuucgacaacuucaaguucgucugcgacaacaucaaguucgccgacgaccucaaccagcugacgggguacaagaagccggcgagccgcgagcugaaggugaccuucuuccccgaccucaacggcgacguggucgccaucgacuacaagcacuacacccccuccuucaagaagggcgccaagcugcugcacaagcccaucguguggcacgugaacaacgccaccaacaaggcgacguacaagccgaacaccuggugcauccggugccucuggagcaccaagcccgucgagaccuccaacagcuucgacgugcugaaguccgaggacgcccaggggauggacaaccuggccugcgaggaccucaagcccgugagcgaggaggucguggagaaccccacgauccagaaggacgugcuggagugcaacgucaagaccaccgagguggugggcgacaucauccugaagccggccaacaacucccucaagaucaccgaggaggucgggcacacggaccugauggccgcguacguggacaacagcucccugaccaucaagaagcccaacgagcucagccgcgugcugggccugaagacccucgccacccacgggcuggccgccgucaacuccgugcccugggacacgaucgccaacuacgcgaagccguuccugaacaagguggucagcaccaccaccaacaucgugacgcgcugccucaaccgggugugcaccaacuacaugcccuacuucuucacccugcugcuccagcugugcaccuucacccgcuccacgaacagccggaucaaggccuccaugcccaccaccaucgccaagaacaccgucaagagcgugggcaaguucugccuggaggccagcuucaacuaccucaagucccccaacuucagcaagcugaucaacaucaucaucugguuccugcuccuguccgugugccugggcagccucaucuacuccacggccgcgcuggggguccugaugagcaaccucggcaugccguccuacugcaccggguaccgcgagggcuaccugaacagcaccaacgugaccaucgccacguacugcaccggcuccauccccugcagcgugugccuguccgggcucgacagccuggacaccuaccccucccuggagaccauccagaucacgaucagcuccuucaagugggaccucaccgccuucggccuggucgccgagugguuccuggccuacauccucuucacccgguucuucuacgugcuggggcuggcggccaucaugcagcucuucuucagcuacuucgccgugcacuucaucuccaacagcuggcugauguggcugaucaucaaccugguccagauggcccccaucuccgcgauggugcgcauguacaucuucuucgccagcuucuacuacguguggaagagcuacguccacgugguggacggcugcaacuccagcaccugcaugaugugcuacaagcggaaccgcgccacgcgggucgagugcaccaccaucgugaacgggguccgccgguccuucuacguguacgccaacggcggcaagggguucugcaagcuccacaacuggaacugcgugaacugcgacaccuucugcgccggcagcacguucaucuccgacgaggucgcgcgcgaccugagccugcaguucaagcggccgaucaaccccaccgaccaguccagcuacaucguggacuccgugaccgucaagaacgggagcauccaccucuacuucgacaaggccggccagaagaccuacgagcgccacucccugagccacuucgugaaccuggacaaccuccgggccaacaacacgaaggggucccugcccaucaacgugaucgucuucgacggcaagagcaagugcgaggaguccagcgccaaguccgccagcguguacuacucccagcugaugugccagcccauccuccugcuggaccaggcgcucgugagcgacgucggcgacagcgccgagguggccgugaagauguucgacgccuacgucaacaccuucuccagcaccuucaacgugccgauggagaagcugaagacccugguggccacggcggaggccgagcucgccaagaacgucucccuggacaacgugcugagcaccuucaucuccgccgcgcgccagggguucguggacagcgacgucgagaccaaggacgugguggagugccucaagcugucccaccagagcgacaucgaggucaccggcgacuccugcaacaacuacaugcugacguacaacaagguggagaacaugaccccccgggaccucggggccugcaucgacugcagcgcccgccacaucaacgcccagguggccaagucccacaacaucgcgcugaucuggaacgucaaggacuucaugagccuguccgagcagcuccggaagcagauccgcagcgccgccaagaagaacaaccugcccuucaagcugaccugcgccaccacgcgccagguggugaacgucgugaccaccaagaucgcccucaagggcggguga

SEQ ID NO: 17986 - RNA, 5841 nt, Artificial Sequence
  SARS-CoV-2__MT740435.1__non-structural protein 3 (NSP3) CDS gc
auggcccccaccaaggugaccuucggcgacgacacggucaucgaggugcagggguacaagagcgugaacaucaccuucgagcuggacgagcgcaucgacaagguccucaacgagaagugcuccgccuacaccguggagcugggcaccgaggugaacgaguucgcgugcgucguggccgacgccgugaucaagacgcugcagccggucagcgagcuccugaccccccuggggaucgaccucgacgagugguccauggccaccuacuaccuguucgacgagagcggcgaguucaagcuggccucccacauguacugcagcuucuacccccccgacgaggacgaggaggagggggacugcgaggaggaggaguucgagccguccacccaguacgaguacggcacggaggacgacuaccagggcaagccccucgaguucggggcgaccagcgccgcccugcagcccgaggaggagcaggaggaggacuggcuggacgacgacucccagcagaccgugggccagcaggacgggagcgaggacaaccagaccacgaccauccagaccaucguggagguccagccccagcucgagauggagcugaccccgguggugcagacgaucgaggucaacuccuucagcggcuaccugaagcucaccgacaacguguacaucaagaacgccgacaucguggaggaggcgaagaaggucaagcccaccgugguggucaacgccgccaacguguaccugaagcacgggggcggcguggccggggcccugaacaaggcgaccaacaacgccaugcaggucgaguccgacgacuacaucgccacgaacggcccccucaagguggggggcagcugcguccuguccggccacaaccuggccaagcacugccuccacgugguggggcccaacgucaacaagggcgaggacauccagcugcugaagagcgccuacgagaacuucaaccagcacgaggugcuccuggcgccgcugcucuccgccgggaucuucggcgccgaccccauccacagccugcgggugugcgucgacaccgugcgcaccaacguguaccuggccgucuucgacaagaaccucuacgacaagcugguguccagcuuccuggagaugaagagcgagaagcagguggagcagaagaucgccgagauccccaaggaggaggucaagcccuucaucaccgaguccaagccgagcguggagcagcggaagcaggacgacaagaagaucaaggcgugcguggaggaggucacgaccacccucgaggagaccaaguuccugacggagaaccugcuccuguacaucgacaucaacgggaaccugcaccccgacuccgccacccucgugagcgacaucgacaucaccuuccugaagaaggacgcccccuacaucgugggcgacgucgugcaggagggcgugcugaccgccgucgugauccccacgaagaaggccgggggcaccaccgagaugcucgcgaaggcccugcgcaaggugccgaccgacaacuacaucacgaccuaccccgggcagggccugaacggguacaccgucgaggaggccaagaccgugcucaagaagugcaaguccgccuucuacauccugcccagcaucaucuccaacgagaagcaggagauccugggcaccgugagcuggaaccuccgggagaugcuggcgcacgccgaggagacgcgcaagcugaugcccgucugcguggagaccaaggccaucguguccaccauccagcggaaguacaagggcaucaagauccaggagggggucguggacuacggcgcccgcuucuacuucuacaccagcaagacgaccguggccucccugaucaacacccucaacgaccugaacgagacccuggucacgaugccgcucggguacgugacccacggccugaaccuggaggaggcggcccgguacaugcgcagccucaaggugcccgccaccgucuccgugagcucccccgacgccgugaccgccuacaacggguaccugacgagcuccagcaagacccccgaggagcacuucaucgagaccaucucccuggcgggcagcuacaaggacuggagcuacuccggccagagcacccagcucgggaucgaguuccugaagcggggcgacaaguccgucuacuacacgagcaacccgaccaccuuccaccuggacggggaggugaucaccuucgacaaccucaagacgcugcugucccuccgcgaggugcggaccaucaaggucuucaccaccguggacaacaucaaccugcacacgcagguggucgacaugagcaugaccuacggccagcaguucggccccaccuaccuggacggggccgacgugaccaagaucaagccccacaacucccacgagggcaagacguucuacgugcucccgaacgacgacacccugcgcgucgaggccuucgaguacuaccacaccaccgaccccagcuuccuggggcgguacauguccgcccucaaccacacgaagaaguggaaguacccccaggugaacggccugaccagcaucaagugggccgacaacaacugcuaccuggcgaccgcccuccugacccugcagcagaucgagcucaaguucaaccccccggcccugcaggacgccuacuaccgcgcgcgggccggggaggccgccaacuucugcgcccugauccucgcguacugcaacaagacggugggcgagcugggcgacguccgcgagaccauguccuaccuguuccagcacgccaaccucgacagcugcaagcgggugcugaacgucgugugcaagaccugcgggcagcagcagaccacccugaagggcguggaggccgucauguacauggggacgcucuccuacgagcaguucaagaagggcgugcagauccccugcaccugcgggaagcaggccaccaaguaccuggugcagcaggagagccccuucgucaugauguccgcccccccggcgcaguacgagcugaagcacggcaccuucacgugcgccagcgaguacaccggcaacuaccagugcgggcacuacaagcacaucaccuccaaggagacccucuacugcaucgacggcgcccugcugacgaagagcagcgaguacaaggggcccaucaccgacguguucuacaaggagaacuccuacaccaccacgaucaagcccgugaccuacaagcucgacggcgucgugugcaccgagaucgaccccaagcuggacaacuacuacaagaaggacaacagcuacuucaccgagcagccgaucgaccuggugcccaaccagcccuaccccaacgccuccuucgacaacuucaaguucgucugcgacaacaucaaguucgccgacgaccucaaccagcugacgggguacaagaagccggcgagccgcgagcugaaggugaccuucuuccccgaccucaacggcgacguggucgccaucgacuacaagcacuacacccccuccuucaagaagggcgccaagcugcugcacaagcccaucguguggcacgugaacaacgccaccaacaaggcgacguacaagccgaacaccuggugcauccggugccucuggagcaccaagcccgucgagaccuccaacagcuucgacgugcugaaguccgaggacgcccaggggauggacaaccuggccugcgaggaccucaagcccgugagcgaggaggucguggagaaccccacgauccagaaggacgugcuggagugcaacgucaagaccaccgagguggugggcgacaucauccugaagccggccaacaacucccucaagaucaccgaggaggucgggcacacggaccugauggccgcguacguggacaacagcucccugaccaucaagaagcccaacgagcucagccgcgugcugggccugaagacccucgccacccacgggcuggccgccgucaacuccgugcccugggacacgaucgccaacuacgcgaagccguuccugaacaagguggucagcaccaccaccaacaucgugacgcgcugccucaaccgggugugcaccaacuacaugcccuacuucuucacccugcugcuccagcugugcaccuucacccgcuccacgaacagccggaucaaggccuccaugcccaccaccaucgccaagaacaccgucaagagcgugggcaaguucugccuggaggccagcuucaacuaccucaagucccccaacuucagcaagcugaucaacaucaucaucugguuccugcuccuguccgugugccugggcagccucaucuacuccacggccgcgcuggggguccugaugagcaaccucggcaugccguccuacugcaccggguaccgcgagggcuaccugaacagcaccaacgugaccaucgccacguacugcaccggcuccauccccugcagcgugugccuguccgggcucgacagccuggacaccuaccccucccuggagaccauccagaucacgaucagcuccuucaagugggaccucaccgccuucggccuggucgccgagugguuccuggccuacauccucuucacccgguucuucuacgugcuggggcuggcggccaucaugcagcucuucuucagcuacuucgccgugcacuucaucuccaacagcuggcugauguggcugaucaucaaccugguccagauggcccccaucuccgcgauggugcgcauguacaucuucuucgccagcuucuacuacguguggaagagcuacguccacgugguggacggcugcaacuccagcaccugcaugaugugcuacaagcggaaccgcgccacgcgggucgagugcaccaccaucgugaacgggguccgccgguccuucuacguguacgccaacggcggcaagggguucugcaagcuccacaacuggaacugcgugaacugcgacaccuucugcgccggcagcacguucaucuccgacgaggucgcgcgcgaccugagccugcaguucaagcggccgaucaaccccaccgaccaguccagcuacaucguggacuccgugaccgucaagaacgggagcauccaccucuacuucgacaaggccggccagaagaccuacgagcgccacucccugagccacuucgugaaccuggacaaccuccgggccaacaacacgaaggggucccugcccaucaacgugaucgucuucgacggcaagagcaagugcgaggaguccagcgccaaguccgccagcguguacuacucccagcugaugugccagcccauccuccugcuggaccaggcgcucgugagcgacgucggcgacagcgccgagguggccgugaagauguucgacgccuacgucaacaccuucuccagcaccuucaacgugccgauggagaagcugaagacccugguggccacggcggaggccgagcucgccaagaacgucucccuggacaacgugcugagcaccuucaucuccgccagccgccagggguucguggacuccgacgucgagaccaaggacgugguggagugccucaagcugagccaccaguccgacaucgaggucaccggcgacagcugcaacaacuacaugcugacguacaacaagguggagaacaugaccccccgggaccucggggcgugcaucgacugcuccgcccgccacaucaacgcccagguggccaagagccacaacaucgcccugaucuggaacgucaaggacuucaugucccugagcgagcagcuccggaagcagauccgcuccgcggccaagaagaacaaccugcccuucaagcugaccugcgccaccacgcgccagguggugaacgucgugaccaccaagaucgcccucaagggcggguga

SEQ ID NO: 17987 - RNA, 5841 nt, Artificial Sequence
  SARS-CoV-2__MT740441.1__non-structural protein 3 (NSP3) CDS gc
auggcccccaccaaggugaccuucggcgacgacacggucaucgaggugcagggguacaagagcgugaacaucaccuucgagcuggacgagcgcaucgacaagguccucaacgagaagugcuccgccuacaccguggagcugggcaccgaggugaacgaguucgcgugcgucguggccgacgccgugaucaagacgcugcagccggucagcgagcuccugaccccccuggggaucgaccucgacgagugguccauggccaccuacuaccuguucgacgagagcggcgaguucaagcuggccucccacauguacugcagcuucuacccccccgacgaggacgaggaggagggggacugcgaggaggaggaguucgagccguccacccaguacgaguacggcacggaggacgacuaccagggcaagccccucgaguucggggcgaccagcgccgcccugcagcccgaggaggagcaggaggaggacuggcuggacgacgacucccagcagaccgugggccagcaggacgggagcgaggacaaccagaccacgaccauccagaccaucguggagguccagccccagcucgagauggagcugaccccgguggugcagacgaucgaggucaacuccuucagcggcuaccugaagcucaccgacaacguguacaucaagaacgccgacaucguggaggaggcgaagaaggucaagcccaccgugguggucaacgccgccaacguguaccugaagcacgggggcggcguggccggggcccugaacaaggcgaccaacaacgccaugcaggucgaguccgacgacuacaucgccacgaacggcccccucaagguggggggcagcugcguccuguccggccacaaccuggccaagcacugccuccacgugguggggcccaacgucaacaagggcgaggacauccagcugcugaagagcgccuacgagaacuucaaccagcacgaggugcuccuggcgccgcugcucuccgccgggaucuucggcgccgaccccauccacagccugcgggugugcgucgacaccgugcgcaccaacguguaccuggccgucuucgacaagaaccucuacgacaagcugguguccagcuuccuggagaugaagagcgagaagcagguggagcagaagaucgccgagauccccaaggaggaggucaagcccuucaucaccgaguccaagccgagcguggagcagcggaagcaggacgacaagaagaucaaggcgugcguggaggaggucacgaccacccucgaggagaccaaguuccugacggagaaccugcuccuguacaucgacaucaacgggaaccugcaccccgacuccgccacccucgugagcgacaucgacaucaccuuccugaagaaggacgcccccuacaucgugggcgacgucgugcaggagggcgugcugaccgccgucgugauccccacgaagaaggccgggggcaccaccgagaugcucgcgaaggcccugcgcaaggugccgaccgacaacuacaucacgaccuaccccgggcagggccugaacggguacaccgucgaggaggccaagaccgugcucaagaagugcaaguccgccuucuacauccugcccagcaucaucuccaacgagaagcaggagauccugggcaccgugagcuggaaccuccgggagaugcuggcgcacgccgaggagacgcgcaagcugaugcccgucugcguggagaccaaggccaucguguccaccauccagcggaaguacaagggcaucaagauccaggagggggucguggacuacggcgcccgcuucuacuucuacaccagcaagacgaccguggccucccugaucaacacccucaacgaccugaacgagacccuggucacgaugccgcucggguacgugacccacggccugaaccuggaggaggcggcccgguacaugcgcagccucaaggugcccgccaccgucuccgugagcucccccgacgccgugaccgccuacaacggguaccugacgagcuccagcaagacccccgaggagcacuucaucgagaccaucucccuggcgggcagcuacaaggacuggagcuacuccggccagagcacccagcucgggaucgaguuccugaagcggggcgacaaguccgucuacuacacgagcaacccgaccaccuuccaccuggacggggaggugaucaccuucgacaaccucaagacgcugcugucccuccgcgaggugcggaccaucaaggucuucaccaccguggacaacaucaaccugcacacgcagguggucgacaugagcaugaccuacggccagcaguucggccccaccuaccuggacggggccgacgugaccaagaucaagccccacaacucccacgagggcaagacguucuacgugcucccgaacgacgacacccugcgcgucgaggccuucgaguacuaccacaccaccgaccccagcuuccuggggcgguacauguccgcccucaaccacacgaagaaguggaaguacccccaggugaacggccugaccagcaucaagugggccgacaacaacugcuaccuggcgaccgcccuccugacccugcagcagaucgagcucaaguucaaccccccggcccugcaggacgccuacuaccgcgcgcgggccggggaggccgccaacuucugcgcccugauccucgcguacugcaacaagacggugggcgagcugggcgacguccgcgagaccauguccuaccuguuccagcacgccaaccucgacagcugcaagcgggugcugaacgucgugugcaagaccugcgggcagcagcagaccacccugaagggcguggaggccgucauguacauggggacgcucuccuacgagcaguucaagaagggcgugcagauccccugcaccugcgggaagcaggccaccaaguaccuggugcagcaggagagccccuucgucaugauguccgcccccccggcgcaguacgagcugaagcacggcaccuucacgugcgccagcgaguacaccggcaacuaccagugcgggcacuacaagcacaucaccuccaaggagacccucuacugcaucgacggcgcccugcugacgaagagcagcgaguacaaggggcccaucaccgacguguucuacaaggagaacuccuacaccaccacgaucaagcccgugaccuacaagcucgacggcgucgugugcaccgagaucgaccccaagcuggacaacuacuacaagaaggacaacagcuacuucaccgagcagccgaucgaccuggugcccaaccagcccuaccccaacgccuccuucgacaacuucaaguucgucugcgacaacaucaaguucgccgacuaccucaaccagcugacgggguacaagaagccggcgagccgcgagcugaaggugaccuucuuccccgaccucaacggcgacguggucgccaucgacuacaagcacuacacccccuccuucaagaagggcgccaagcugcugcacaagcccaucguguggcacgugaacaacgccaccaacaaggcgacguacaagccgaacaccuggugcauccggugccucuggagcaccaagcccgucgagaccuccaacagcuucgacgugcugaaguccgaggacgcccaggggauggacaaccuggccugcgaggaccucaagcccgugagcgaggaggucguggagaaccccacgauccagaaggacgugcuggagugcaacgucaagaccaccgagguggugggcgacaucauccugaagccggccaacaacucccucaagaucaccgaggaggucgggcacacggaccugauggccgcguacguggacaacagcucccugaccaucaagaagcccaacgagcucagccgcgugcugggccugaagacccucgccacccacgggcuggccgccgucaacuccgugcccugggacacgaucgccaacuacgcgaagccguuccugaacaagguggucagcaccaccaccaacaucgugacgcgcugccucaaccgggugugcaccaacuacaugcccuacuucuucacccugcugcuccagcugugcaccuucacccgcuccacgaacagccggaucaaggccuccaugcccaccaccaucgccaagaacaccgucaagagcgugggcaaguucugccuggaggccagcuucaacuaccucaagucccccaacuucagcaagcugaucaacaucaucaucugguuccugcuccuguccgugugccugggcagccucaucuacuccacggccgcgcuggggguccugaugagcaaccucggcaugccguccuacugcaccggguaccgcgagggcuaccugaacagcaccaacgugaccaucgccacguacugcaccggcuccauccccugcagcgugugccuguccgggcucgacagccuggacaccuaccccucccuggagaccauccagaucacgaucagcuccuucaagugggaccucaccgccuucggccuggucgccgagugguuccuggccuacauccucuucacccgguucuucuacgugcuggggcuggcggccaucaugcagcucuucuucagcuacuucgccgugcacuucaucuccaacagcuggcugauguggcugaucaucaaccugguccagauggcccccaucuccgcgauggugcgcauguacaucuucuucgccagcuucuacuacguguggaagagcuacguccacgugguggacggcugcaacuccagcaccugcaugaugugcuacaagcggaaccgcgccacgcgggucgagugcaccaccaucgugaacgggguccgccgguccuucuacguguacgccaacggcggcaagggguucugcaagcuccacaacuggaacugcgugaacugcgacaccuucugcgccggcagcacguucaucuccgacgaggucgcgcgcgaccugagccugcaguucaagcggccgaucaaccccaccgaccaguccagcuacaucguggacuccgugaccgucaagaacgggagcauccaccucuacuucgacaaggccggccagaagaccuacgagcgccacucccugagccacuucgugaaccuggacaaccuccgggccaacaacacgaaggggucccugcccaucaacgugaucgucuucgacggcaagagcaagugcgaggaguccagcgccaaguccgccagcguguacuacucccagcugaugugccagcccauccuccugcuggaccaggcgcucgugagcgacgucggcgacagcgccgagguggccgugaagauguucgacgccuacgucaacaccuucuccagcaccuucaacgugccgauggagaagcugaagacccugguggccacggcggaggccgagcucgccaagaacgucucccuggacaacgugcugagcaccuucaucuccgccgcgcgccagggguucguggacagcgacgucgagaccaaggacgugguggagugccucaagcugucccaccagagcgacaucgaggucaccggcgacuccugcaacaacuacaugcugacguacaacaagguggagaacaugaccccccgggaccucggggccugcaucgacugcagcgcccgccacaucaacgcccagguggccaagucccacaacaucgcgcugaucuggaacgucaaggacuucaugagccuguccgagcagcuccggaagcagauccgcagcgccgccaagaagaacaaccugcccuucaagcugaccugcgccaccacgcgccagguggugaacgucgugaccaccaagaucgcccucaagggcggguga

SEQ ID NO: 17988 - RNA, 5841 nt, Artificial Sequence
  SARS-CoV-2__MT740483.1__non-structural protein 3 (NSP3) CDS gc
auggcccccaccaaggugaccuucggcgacgacacggucaucgaggugcagggguacaagagcgugaacaucaccuucgagcuggacgagcgcaucgacaagguccucaacgagaagugcuccgccuacaccguggagcugggcaccgaggugaacgaguucgcgugcgucguggccgacgccgugaucaagacgcugcagccggucagcgagcuccugaccccccuggggaucgaccucgacgagugguccauggccaccuacuaccuguucgacgagagcggcgaguucaagcuggccucccacauguacugcagcuucuacccccccgacgaggacgaggaggagggggacugcgaggaggaggaguucgagccguccacccaguacgaguacggcacggaggacgacuaccagggcaagccccucgaguucggggcgaccagcgccgcccugcagcccgaggaggagcaggaggaggacuggcuggacgacgacucccagcagaccgugggccagcaggacgggagcgaggacaaccagaccacgaccauccagaccaucguggagguccagccccagcucgagauggagcugaccccgguggugcagacgaucgaggucaacuccuucagcggcuaccugaagcucaccgacaacguguacaucaagaacgccgacaucguggaggaggcgaagaaggucaagcccaccgugguggucaacgccgccaacguguaccugaagcacgggggcggcguggccggggcccugaacaaggcgaccaacaacgccaugcaggucgaguccgacgacuacaucgccacgaacggcccccucaagguggggggcagcugcguccuguccggccacaaccuggccaagcacugccuccacgugguggggcccaacgucaacaagggcgaggacauccagcugcugaagagcgccuacgagaacuucaaccagcacgaggugcuccuggcgccgcugcucuccgccgggaucuucggcgccgaccccauccacagccugcgggugugcgucgacaccgugcgcaccaacguguaccuggccgucuucgacaagaaccucuacgacaagcugguguccagcuuccuggagaugaagagcgagaagcagguggagcagaagaucgccgagauccccaaggaggaggucaagcccuucaucaccgaguccaagccgagcguggagcagcggaagcaggacgacaagaagaucaaggcgugcguggaggaggucacgaccacccucgaggagaccaaguuccugacggagaaccugcuccuguacaucgacaucaacgggaaccugcaccccgacuccgccacccucgugagcgacaucgacaucaccuuccugaagaaggacgcccccuacaucgugggcgacgucgugcaggagggcgugcugaccgccgucgugauccccacgaagaaggccgggggcaccaccgagaugcucgcgaaggcccugcgcaaggugccgaccgacaacuacaucacgaccuaccccgggcagggccugaacggguacaccgucgaggaggccaagaccgugcucaagaagugcaaguccgccuucuacauccugcccagcaucaucuccaacgagaagcaggagauccugggcaccgugagcuggaaccuccgggagaugcuggcgcacgccgaggagacgcgcaagcugaugcccgucugcguggagaccaaggccaucguguccaccauccagcggaaguacaagggcaucaagauccaggagggggucguggacuacggcgcccgcuucuacuucuacaccagcaagacgaccguggccucccugaucaacacccucaacgaccugaacgagacccuggucacgaugccgcucggguacgugacccacggccugaaccuggaggaggcggcccgguacaugcgcagccucaaggugcccgccaccgucuccgugagcucccccgacgccgugaccgccuacaacggguaccugacgagcuccagcaagacccccgaggagcacuucaucgagaccaucucccuggcgggcagcuacaaggacuggagcuacuccggccagagcacccagcucgggaucgaguuccugaagcggggcgacaaguccgucuacuacacgagcaacccgaccaccuuccaccuggacggggaggugaucaccuucgacaaccucaagacgcugcugucccuccgcgaggugcggaccaucaaggucuucaccaccguggacaacaucaaccugcacacgcagguggucgacaugagcaugaccuacggccagcaguucggccccaccuaccuggacggggccgacgugaccaagaucaagccccacaacucccacgagggcaagacguucuacgugcucccgaacgacgacacccugcgcgucgaggccuucgaguacuaccacaccaccgaccccagcuuccuggggcgguacauguccgcccucaaccacacgaagaaguggaaguacccccaggugaacggccugaccagcaucaagugggccgacaacaacugcuaccuggcgaccgcccuccugacccugcagcagaucgagcucaaguucaaccccccggcccugcaggacgccuacuaccgcgcgcgggccggggaggccgccaacuucugcgcccugauccucgcguacugcaacaagacggugggcgagcugggcgacguccgcgagaccauguccuaccuguuccagcacgccaaccucgacagcugcaagcgggugcugaacgucgugugcaagaccugcgggcagcagcagaccacccugaagggcguggaggccgucauguacauggggacgcucuccuacgagcaguucaagaagggcgugcagauccccugcaccugcgggaagcaggccaccaaguaccuggugcagcaggagagccccuucgucaugauguccgcccccccggcgcaguacgagcugaagcacggcaccuucacgugcgccagcgaguacaccggcaacuaccagugcgggcacuacaagcacaucaccuccaaggagacccucuacugcaucgacggcgcccugcugacgaagagcagcgaguacaaggggcccaucaccgacguguucuacaaggagaacuccuacaccaccacgaucaagcccgugaccuacaagcucgacggcgucgugugcaccgagaucgaccccaagcuggacaacuacuacaagaaggacaacagcuacuucaccgagcagccgaucgaccuggugcccaaccagcccuaccccaacgccuccuucgacaacuucaaguucgucugcgacaacaucaaguucgccgacgaccucaaccaccugacgggguacaagaagccggcgagccgcgagcugaaggugaccuucuuccccgaccucaacggcgacguggucgccaucgacuacaagcacuacacccccuccuucaagaagggcgccaagcugcugcacaagcccaucguguggcacgugaacaacgccaccaacaaggcgacguacaagccgaacaccuggugcauccggugccucuggagcaccaagcccgucgagaccuccaacagcuucgacgugcugaaguccgaggacgcccaggggauggacaaccuggccugcgaggaccucaagcccgugagcgaggaggucguggagaaccccacgauccagaaggacgugcuggagugcaacgucaagaccaccgagguggugggcgacaucauccugaagccggccaacaacucccucaagaucaccgaggaggucgggcacacggaccugauggccgcguacguggacaacagcucccugaccaucaagaagcccaacgagcucagccgcgugcugggccugaagacccucgccacccacgggcuggccgccgucaacuccgugcccugggacacgaucgccaacuacgcgaagccguuccugaacaagguggucagcaccaccaccaacaucgugacgcgcugccucaaccgggugugcaccaacuacaugcccuacuucuucacccugcugcuccagcugugcaccuucacccgcuccacgaacagccggaucaaggccuccaugcccaccaccaucgccaagaacaccgucaagagcgugggcaaguucugccuggaggccagcuucaacuaccucaagucccccaacuucagcaagcugaucaacaucaucaucugguuccugcuccuguccgugugccugggcagccucaucuacuccacggccgcgcuggggguccugaugagcaaccucggcaugccguccuacugcaccggguaccgcgagggcuaccugaacagcaccaacgugaccaucgccacguacugcaccggcuccauccccugcagcgugugccuguccgggcucgacagccuggacaccuaccccucccuggagaccauccagaucacgaucagcuccuucaagugggaccucaccgccuucggccuggucgccgagugguuccuggccuacauccucuucacccgguucuucuacgugcuggggcuggcggccaucaugcagcucuucuucagcuacuucgccgugcacuucaucuccaacagcuggcugauguggcugaucaucaaccugguccagauggcccccaucuccgcgauggugcgcauguacaucuucuucgccagcuucuacuacguguggaagagcuacguccacgugguggacggcugcaacuccagcaccugcaugaugugcuacaagcggaaccgcgccacgcgggucgagugcaccaccaucgugaacgggguccgccgguccuucuacguguacgccaacggcggcaagggguucugcaagcuccacaacuggaacugcgugaacugcgacaccuucugcgccggcagcacguucaucuccgacgaggucgcgcgcgaccugagccugcaguucaagcggccgaucaaccccaccgaccaguccagcuacaucguggacuccgugaccgucaagaacgggagcauccaccucuacuucgacaaggccggccagaagaccuacgagcgccacucccugagccacuucgugaaccuggacaaccuccgggccaacaacacgaaggggucccugcccaucaacgugaucgucuucgacggcaagagcaagugcgaggaguccagcgccaaguccgccagcguguacuacucccagcugaugugccagcccauccuccugcuggaccaggcgcucgugagcgacgucggcgacagcgccgagguggccgugaagauguucgacgccuacgucaacaccuucuccagcaccuucaacgugccgauggagaagcugaagacccugguggccacggcggaggccgagcucgccaagaacgucucccuggacaacgugcugagcaccuucaucuccgccgcgcgccagggguucguggacagcgacgucgagaccaaggacgugguggagugccucaagcugucccaccagagcgacaucgaggucaccggcgacuccugcaacaacuacaugcugacguacaacaagguggagaacaugaccccccgggaccucggggccugcaucgacugcagcgcccgccacaucaacgcccagguggccaagucccacaacaucgcgcugaucuggaacgucaaggacuucaugagccuguccgagcagcuccggaagcagauccgcagcgccgccaagaagaacaaccugcccuucaagcugaccugcgccaccacgcgccagguggugaacgucgugaccaccaagaucgcccucaagggcggguga

SEQ ID NO: 17989 - RNA, 5841 nt, Artificial Sequence
  SARS-CoV-2__MT742091.1__non-structural protein 3 (NSP3) CDS gc
auggcccccaccaaggugaccuucggcgacgacacggucaucgaggugcagggguacaagagcgugaacaucaccuucgagcuggacgagcgcaucgacaagguccucaacgagaagugcuccgccuacaccguggagcugggcaccgaggugaacgaguucgcgugcgucguggccgacgccgugaucaagacgcugcagccggucagcgagcuccugaccccccuggggaucgaccucgacgagugguccauggccaccuacuaccuguucgacgagagcggcgaguucaagcuggccucccacauguacugcagcuucuacccccccgacgaggacgaggaggagggggacugcgaggaggaggaguucgagccguccacccaguacgaguacggcacggaggacgacuaccagggcaagccccucgaguucggggcgaccagcgccgcccugcagcccgaggaggagcaggaggaggacuggcuggacgacgacucccagcagaccgugggccagcaggacgggagcgaggacaaccagaccacgaccauccagaccaucguggagguccagccccagcucgagauggagcugaccccgguggugcagacgaucgaggucaacuccuucagcggcuaccugaagcucaccgacaacguguacaucaagaacgccgacaucguggaggaggcgaagaaggucaagcccaccgugguggucaacgccgccaacguguaccugaagcacgggggcggcguggccggggcccugaacaaggcgaccaacaacgccaugcaggucgaguccgacgacuacaucgccacgaacggcccccucaagguggggggcagcugcguccuguccggccacaaccuggccaagcacugccuccacgugguggggcccaacgucaacaagggcgaggacauccagcugcugaagagcgccuacgagaacuucaaccagcacgaggugcuccuggcgccgcugcucuccgccgggaucuucggcgccgaccccauccacagccugcgggugugcgucgacaccgugcgcaccaacguguaccuggccgucuucgacaagaaccucuacgacaagcugguguccagcuuccuggagaugaagagcgagaagcagguggagcagaagaucgccgagauccccaaggaggaggucaagcccuucaucaccgaguccaagccgagcguggagcagcggaagcaggacgacaagaagaucaaggcgugcguggaggaggucacgaccacccucgaggagaccaaguuccugacggagaaccugcuccuguacaucgacaucaacgggaaccugcaccccgacuccgccacccucgugagcgacaucgacaucaccuuccugaagaaggacgcccccuacaucgugggcgacgucgugcaggagggcgugcugaccgccgucgugauccccacgaagaaggccgggggcaccaccgagaugcucgcgaaggcccugcgcaaggugccgaccgacaacuacaucacgaccuaccccgggcagggccugaacggguacaccgucgaggaggccaagaccgugcucaagaagugcaaguccgccuucuacauccugcccagcaucaucuccaacgagaagcaggagauccugggcaccgugagcuggaaccuccgggagaugcuggcgcacgccgaggagacgcgcaagcugaugcccgucugcguggagaccaaggccaucguguccaccauccagcggaaguacaagggcaucaagauccaggagggggucguggacuacggcgcccgcuucuacuucuacaccagcaagacgaccguggccucccugaucaacacccucaacgaccugaacgagacccuggucacgaugccgcucggguacgugacccacggccugaaccuggaggaggcggcccgguacaugcgcagccucaaggugcccgccaccgucuccgugagcucccccgacgccgugaccgccuacaacggguaccugacgagcuccagcaagacccccgaggagcacuucaucgagaccaucucccuggcgggcagcuacaaggacuggagcuacuccggccagagcacccagcucgggaucgaguuccugaagcggggcgacaaguccgucuacuacacgagcaacccgaccaccuuccaccuggacggggaggugaucaccuucgacaaccucaagacgcugcugucccuccgcgaggugcggaccaucaaggucuucaccaccguggacaacaucaaccugcacacgcagguggucgacaugagcaugaccuacggccagcaguucggccccaccuaccuggacggggccgacgugaccaagaucaagccccacaacucccacgagggcaagacguucuacgugcucccgaacgacgacacccugcgcgucgaggccuucgaguacuaccacaccaccgaccccagcuuccuggggcgguacauguccgcccucaaccacacgaagaaguggaaguacccccaggugaacggccugaccagcaucaagugggccgacaacaacugcuaccuggcgaccgcccuccugacccugcagcagaucgagcucaaguucaaccccccggcccugcaggacgccuacuaccgcgcgcgggccggggaggccgccaacuucugcgcccugauccucgcguacugcaacaagacggugggcgagcugggcgacguccgcgagaccauguccuaccuguuccagcacgccaaccucgacagcugcaagcgggugcugaacgucgugugcaagaccugcgggcagcagcagaccacccugaagggcguggaggccgucauguacauggggacgcucuccuacgagcaguucaagaagggcgugcagauccccugcaccugcgggaagcaggccaccaaguaccuggugcagcaggagagccccuucgucaugauguccgcccccccggcgcaguacgagcugaagcacggcaccuucacgugcgccagcgaguacaccggcaacuaccagugcgggcacuacaagcacaucaccuccaaggagacccucuacugcaucgacggcgcccugcugacgaagagcagcgaguacaaggggcccaucaccgacguguucuacaaggagaacuccuacaccaccacgaucaagcccgugaccuacaagcucgacggcgucgugugcaccgagaucgaccccaagcuggacaacuacuacaagaaggacaacagcuacuucaccgagcagccgaucgaccuggugcccaaccagcccuaccccaacgccuccuucgacaacuucaaguucgucugcgacaacaucaaguucgccgacgaccucaaccagcugacgggguacaagaagccggcgagccgcgagcugaaggugaccuucuuccccgaccucaacggcgacguggucgccaucgacuacaagcacuacacccccuccuucaagaagggcgccaagcugcugcacaagcccaucguguggcacgugaacaacgccaccaacaaggcgacguacaagccgaacaccuggugcauccggugccucuggagcaccaagcccgucgagaccuccaacagcuucgacgugcugaaguccgaggacgcccaggggauggacaaccuggccugcgaggaccucaagcccgugagcgaggaggucguggagaaccccacgauccagaaggacgugcuggagugcaacgucaagaccaccgagguggugggcgacaucauccugaagccggccaacaacucccucaagaucaccgaggaggucgggcacacggaccugauggccgcguacguggacaacagcucccugaccaucaagaagcccaacgagcucagccgcgugcugggccugaagacccucgccacccacgggcuggccgccgucaacuccgugcccugggacacgaucgccaacuacgcgaagccguuccugaacaagguggucagcaccaccaccaacaucgugacgcgcugccucaaccgggugugcaccaacuacaugcccuacuucuucacccugcugcuccagcugugcaccuucacccgcuccacgaacagccggaucaaggccuccaugcccaccaccaucgccaagaacagcgucaagagcgugggcaaguucugccuggaggccuccuucaacuaccucaagagccccaacuucuccaagcugaucaacaucaucaucugguuccugcuccugagcgugugccugggcucccucaucuacagcaccgccgcgcuggggguccugauguccaaccucggcaugccgagcuacugcacgggguaccgcgagggcuaccugaacuccaccaacgugaccaucgccaccuacugcacgggcagcauccccugcuccgugugccugagcgggcucgacucccuggacaccuaccccagccuggagaccauccagaucaccaucuccagcuucaagugggaccucacggccuucggccuggucgccgagugguuccuggccuacauccucuucacccgguucuucuacgugcuggggcuggcggccaucaugcagcucuucuucuccuacuucgccgugcacuucaucagcaacuccuggcugauguggcugaucaucaaccugguccagauggcccccaucagcgcgauggugcgcauguacaucuucuucgccagcuucuacuacguguggaaguccuacguccacgugguggacggcugcaacagcuccaccugcaugaugugcuacaagcggaaccgcgccacccgggucgagugcacgaccaucgugaacgggguccgccggagcuucuacguguacgccaacggcggcaagggguucugcaagcuccacaacuggaacugcgugaacugcgacaccuucugcgccggcuccaccuucaucagcgacgaggucgcgcgcgaccugucccugcaguucaagcggccgaucaaccccacggaccagagcuccuacaucguggacagcgugaccgucaagaacggguccauccaccucuacuucgacaaggccggccagaagaccuacgagcgccacagccugucccacuucgugaaccuggacaaccuccgggccaacaacaccaaggggagccugcccaucaacgugaucgucuucgacggcaaguccaagugcgaggagagcuccgccaagagcgccuccguguacuacagccagcugaugugccagcccauccuccugcuggaccaggcgcucgugagcgacgucggcgacuccgccgagguggccgugaagauguucgacgccuacgucaacacguucagcuccaccuucaacgugccgauggagaagcugaagacccugguggccaccgcggaggccgagcucgccaagaacgucagccuggacaacgugcuguccacguucaucagcgccgcgcgccagggguucguggacuccgacgucgagaccaaggacgugguggagugccucaagcugagccaccaguccgacaucgaggucaccggcgacagcugcaacaacuacaugcugaccuacaacaagguggagaacaugacgccccgggaccucggggccugcaucgacugcuccgcccgccacaucaacgcccagguggccaagagccacaacaucgcgcugaucuggaacgucaaggacuucaugucccugagcgagcagcuccggaagcagauccgcuccgccgccaagaagaacaaccugcccuucaagcugaccugcgccaccacccgccagguggugaacgucgugacgaccaagaucgcccucaagggcggguga

SEQ ID NO: 17990 - RNA, 5841 nt, Artificial Sequence
  SARS-CoV-2__MT734055.1__non-structural protein 3 (NSP3) CDS gc
auggcccccaccaaggugaccuucggcgacgacacggucaucgaggugcagggguacaagagcgugaacaucaccuucgagcuggacgagcgcaucgacaagguccucaacgagaagugcuccgccuacaccguggagcugggcaccgaggugaacgaguucgcgugcgucguggccgacgccgugaucaagacgcugcagccggucagcgagcuccugaccccccuggggaucgaccucgacgagugguccauggccaccuacuaccuguucgacgagagcggcgaguucaagcuggccucccacauguacugcagcuucuacccccccgacgaggacgaggaggagggggacugcgaggaggaggaguucgagccguccacccaguacgaguacggcacggaggacgacuaccagggcaagccccucgaguucggggcgaccagcgccgcccugcagcccgaggaggagcaggaggaggacuggcuggacgacgacucccagcagaccgugggccagcaggacgggagcgaggacaaccagaccacgaccauccagaccaucguggagguccagccccagcucgagauggagcugaccccgguggugcagacgaucgaggucaacuccuucagcggcuaccugaagcucaccgacaacguguacaucaagaacgccgacaucguggaggaggcgaagaaggucaagcccaccgugguggucaacgccgccaacguguaccugaagcacgggggcggcguggccggggcccugaacaaggcgaccaacaacgccaugcaggucgaguccgacgacuacaucgccacgaacggcccccucaagguggggggcagcugcguccuguccggccacaaccuggccaagcacugccuccacgugguggggcccaacgucaacaagggcgaggacauccagcugcugaagagcgccuacgagaacuucaaccagcacgaggugcuccuggcgccgcugcucuccgccgggaucuucggcgccgaccccauccacagccugcgggugugcgucgacaccgugcgcaccaacguguaccuggccgucuucgacaagaaccucuacgacaagcugguguccagcuuccuggagaugaagagcgagaagcagguggagcagaagaucgccgagauccccaaggaggaggucaagcccuucaucaccgaguccaagccgagcguggagcagcggaagcaggacgacaagaagaucaaggcgugcguggaggaggucacgaccacccucgaggagaccaaguuccugacggagaaccugcuccuguacaucgacaucaacgggaaccugcaccccgacuccgccacccucgugagcgacaucgacaucaccuuccugaagaaggacgcccccuacaucgugggcgacgucgugcaggagggcgugcugaccgccgucgugauccccacgaagaaggccgggggcaccaccgagaugcucgcgaaggcccugcgcaaggugccgaccgacaacuacaucacgaccuaccccgggcagggccugaacggguacaccgucgaggaggccaagaccgugcucaagaagugcaaguccgccuucuacauccugcccagcaucaucuccaacgagaagcaggagauccugggcaccgugagcuggaaccuccgggagaugcuggcgcacgccgaggagacgcgcaagcugaugcccgucugcguggagaccaaggccaucguguccaccauccagcggaaguacaagggcaucaagauccaggagggggucguggacuacggcgcccgcuucuacuucuacaccagcaagacgaccguggccucccugaucaacacccucaacgaccugaacgagacccuggucacgaugccgcucggguacgugacccacggccugaaccuggaggaggcggcccgguacaugcgcagccucaaggugcccgccaccgucuccgugagcucccccgacgccgugaccgccuacaacggguaccugacgagcuccagcaagacccccgaggagcacuucaucgagaccaucucccuggcgggcagcuacaaggacuggagcuacuccggccagagcacccagcucgggaucgaguuccugaagcggggcgacaaguccgucuacuacacgagcaacccgaccaccuuccaccuggacggggaggugaucaccuucgacaaccucaagacgcugcugucccuccgcgaggugcggaccaucaaggucuucaccaccguggacaacaucaaccugcacacgcagguggucgacaugagcaugaccuacggccagcaguucggccccaccuaccuggacggggccgacgugaccaagaucaagccccacaacucccacgagggcaagacguucuacgugcucccgaacgacgacacccugcgcgucgaggccuucgaguacuaccacaccaccgaccccagcuuccuggggcgguacauguccgcccucaaccacacgaagaaguggaaguacccccaggugaacggccugaccagcaucaagugggccgacaacaacugcuaccuggcgaccgcccuccugacccugcagcagaucgagcucaaguucaaccccccggcccugcaggacgccuacuaccgcgcgcgggccggggaggccgccaacuucugcgcccugauccucgcguacugcaacaagacggugggcgagcugggcgacguccgcgagaccauguccuaccuguuccagcacgccaaccucgacagcugcaagcgggugcugaacgucgugugcaagaccugcgggcagcagcagaccacccugaagggcguggaggccgucauguacauggggacgcucuccuacgagcaguucaagaagggcgugcagauccccugcaccugcgggaagcaggccaccaaguaccuggugcagcaggagagccccuucgucaugauguccgcccccccggcgcaguacgagcugaagcacggcaccuucacgugcgccagcgaguacaccggcaacuaccagugcgggcacuacaagcacaucaccuccaaggagacccucuacugcaucgacggcgcccugcugacgaagagcagcgaguacaaggggcccaucaccgacguguucuacaaggagaacuccuacaccaccacgaucaagcccgugaccuacaagcucgacggcgucgugugcaccgagaucgaccccaagcuggacaacuacuacaagaaggacaacagcuacuucaccgagcagccgaucgaccuggugcccaaccagcccuaccccaacgccuccuucgacaacuucaaguucgucugcgacaacaucaaguucgccgacgaccucaaccagcugacgggguacaagaagccggcgagccgcgagcugaaggugaccuucuuccccgaccucaacggcgacguggucgccaucgacuacaagcacuacacccccuccuucaagaagggcgccaagcugcugcacaagcccaucguguggcacgugaacaacgccaccaacaaggcgacguacaagccgaacaccuggugcauccggugccucuggagcaccaagcccgucgagaccuccaacagcuucgacgugcugaaguccgaggacgcccaggggauggacaaccuggccugcgaggaccucaagcccgugagcgaggaggucguggagaaccccacgauccagaaggacgugcuggagugcaacgucaagaccaccgagguggugggcgacaucauccugaagccggccaacaacucccucaagaucaccgaggaggucgggcacacggaccugauggccgcguacguggacaacagcucccugaccaucaagaagcccaacgagcucagccgcgugcugggccugaagacccucgccacccacgggcuggccgccgucaacuccgugcccugggacacgaucgccaacuacgcgaagccguuccugaacaagguggucagcaccaccaccaacaucgugacgcgcugccucaaccgggugugcaccaacuacaugcccuacuucuucacccugcugcuccagcugugcaccuucacccgcuccacgaacagccggaucaaggccuccaugcccaccaccaucgccaagaacaccgucaagagcgugggcaaguucugccuggaggccagcuucaacuaccucaagucccccaacuucagcaagcugaucaacaucaucaucugguuccugcuccuguccgugugccugggcagccucaucuacuccacggccgcgcuggggguccugaugagcaaccucggcaugccguccuacugcaccggguaccgcgagggcuaccugaacagcaccaacgugaccaucgccacguacugcaccggcuccauccccugcagcgugugccuguccgggcucgacagccuggacaccuaccccucccuggagaccauccagaucacgaucagcuccuucaagugggaccucaccgucuucggccugguggccgagugguuccuggccuacauccucuucacccgguucuucuacgugcuggggcuggccgcgaucaugcagcucuucuucagcuacuucgccguccacuucaucuccaacagcuggcugauguggcugaucaucaaccuggugcagauggcccccaucuccgccauggugcgcauguacaucuucuucgcgagcuucuacuacgucuggaagagcuacgugcacguggucgacggcugcaacuccagcaccugcaugaugugcuacaagcggaaccgcgccacgcggguggagugcaccaccaucgucaacggggugcgccgguccuucuacguguacgccaacggcggcaagggguucugcaagcuccacaacuggaacugcgucaacugcgacaccuucugcgccggcagcacguucaucuccgacgagguggcccgcgaccugagccugcaguucaagcggccgaucaaccccaccgaccaguccagcuacaucguggacuccgucaccgugaagaacgggagcauccaccucuacuucgacaaggcgggccagaagaccuacgagcgccacucccugagccacuucgugaaccuggacaaccuccgggccaacaacacgaaggggucccugcccaucaacgucaucguguucgacggcaagagcaagugcgaggaguccagcgccaaguccgccagcguguacuacucccagcugaugugccagcccauccuccugcuggaccaggcccucgucagcgacgugggcgacagcgcggagguggccgucaagauguucgacgccuacgugaacaccuucuccagcaccuucaacgugccgauggagaagcugaagacccuggucgccacggccgaggcggagcucgccaagaacgugucccuggacaacgugcugagcaccuucaucuccgccgcccgccagggguucgucgacagcgacguggagaccaaggacguggucgagugccucaagcugucccaccagagcgacaucgaggugaccggcgacuccugcaacaacuacaugcugacguacaacaagguggagaacaugaccccccgggaccucggggcgugcaucgacugcagcgcccgccacaucaacgcccaggucgccaagucccacaacaucgcccugaucuggaacgugaaggacuucaugagccuguccgagcagcuccggaagcagauccgcagcgcggccaagaagaacaaccugcccuucaagcugaccugcgccaccacgcgccagguggucaacguggugaccaccaagaucgcccucaagggcggguga

SEQ ID NO: 17991 - RNA, 5841 nt, Artificial Sequence
  SARS-CoV-2__MT730002.1__non-structural protein 3 (NSP3) CDS gc
auggcccccaccaaggugaccuucggcgacgacacggucaucgaggugcagggguacaagagcgugaacaucaccuucgagcuggacgagcgcaucgacaagguccucaacgagaagugcuccgccuacaccguggagcugggcaccgaggugaacgaguucgcgugcgucguggccgacgccgugaucaagacgcugcagccggucagcgagcuccugaccccccuggggaucgaccucgacgagugguccauggccaccuacuaccuguucgacgagagcggcgaguucaagcuggccucccacauguacugcagcuucuacccccccgacgaggacgaggaggagggggacugcgaggaggaggaguucgagccguccacccaguacgaguacggcacggaggacgacuaccagggcaagccccucgaguucggggcgaccagcgccgcccugcagcccgaggaggagcaggaggaggacuggcuggacgacgacucccagcagaccgugggccagcaggacgggagcgaggacaaccagaccacgaccauccagaccaucguggagguccagccccagcucgagauggagcugaccccgguggugcagacgaucgaggucaacuccuucagcggcuaccugaagcucaccgacaacguguacaucaagaacgccgacaucguggaggaggcgaagaaggucaagcccaccgugguggucaacgccgccaacguguaccugaagcacgggggcggcguggccggggcccugaacaaggcgaccaacaacgccaugcaggucgaguccgacgacuacaucgccacgaacggcccccucaagguggggggcagcugcguccuguccggccacaaccuggccaagcacugccuccacgugguggggcccaacgucaacaagggcgaggacauccagcugcugaagagcgccuacgagaacuucaaccagcacgaggugcuccuggcgccgcugcucuccgccgggaucuucggcgccgaccccauccacagccugcgggugugcgucgacaccgugcgcaccaacguguaccuggccgucuucgacaagaaccucuacgacaagcugguguccagcuuccuggagaugaagagcgagaagcagguggagcagaagaucgccgagauccccaaggaggaggucaagcccuucaucaccgaguccaagccgagcguggagcagcggaagcaggacgacaagaagaucaaggcgugcguggaggaggucacgaccacccucgaggagaccaaguuccugacggagaaccugcuccuguacaucgacaucaacgggaaccugcaccccgacuccgccacccucgugagcgacaucgacaucaccuuccugaagaaggacgcccccuacaucgugggcgacgucgugcaggagggcgugcugaccgccgucgugauccccacgaagaaggccgggggcaccaccgagaugcucgcgaaggcccugcgcaaggugccgaccgacaacuacaucacgaccuaccccgggcagggccugaacggguacaccgucgaggaggccaagaccgugcucaagaagugcaaguccgccuucuacauccugcccagcaucaucuccaacgagaagcaggagauccugggcaccgugagcuggaaccuccgggagaugcuggcgcacgccgaggagacgcgcaagcugaugcccgucugcguggagaccaaggccaucguguccaccauccagcggaaguacaagggcaucaagauccaggagggggucguggacuacggcgcccgcuucuacuucuacaccagcaagacgaccguggccucccugaucaacacccucaacgaccugaacgagacccuggucacgaugccgcucggguacgugacccacggccugaaccuggaggaggcggcccgguacaugcgcagccucaaggugcccgccaccgucuccgugagcucccccgacgccgugaccgccuacaacggguaccugacgagcuccagcaagacccccgaggagcacuucaucgagaccaucucccuggcgggcagcuacaaggacuggagcuacuccggccagagcacccagcucgggaucgaguuccugaagcggggcgacaaguccgucuacuacacgagcaacccgaccaccuuccaccuggacggggaggugaucaccuucgacaaccucaagacgcugcugucccuccgcgaggugcggaccaucaaggucuucaccaccguggacaacaucaaccugcacacgcagguggucgacaugagcaugaccuacggccagcaguucggccccaccuaccuggacggggccgacgugaccaagaucaagccccacaacucccacgagggcaagacguucuacgugcucccgaacgacgacacccugcgcgucgaggccuucgaguacuaccacaccaccgaccccagcuuccuggggcgguacauguccgcccucaaccacacgaagaaguggaaguacccccaggugaacggccugaccagcaucaagugggccgacaacaacugcuaccuggcgaccgcccuccugacccugcagcagaucgagcucaaguucaaccccccggcccugcaggacgccuacuaccgcgcgcgggccggggaggccgccaacuucugcgcccugauccucgcguacugcaacaagacggugggcgagcugggcgacguccgcgagaccauguccuaccuguuccagcacgccaaccucgacagcugcaagcgggugcugaacgucgugugcaagaccugcgggcagcagcagaccacccugaagggcguggaggccgucaucuacauggggacgcucuccuacgagcaguucaagaagggcgugcagauccccugcaccugcgggaagcaggccaccaaguaccuggugcagcaggagagccccuucgucaugauguccgcccccccggcgcaguacgagcugaagcacggcaccuucacgugcgccagcgaguacaccggcaacuaccagugcgggcacuacaagcacaucaccuccaaggagacccucuacugcaucgacggcgcccugcugacgaagagcagcgaguacaaggggcccaucaccgacguguucuacaaggagaacuccuacaccaccacgaucaagcccgugaccuacaagcucgacggcgucgugugcaccgagaucgaccccaagcuggacaacuacuacaagaaggacaacagcuacuucaccgagcagccgaucgaccuggugcccaaccagcccuaccccaacgccuccuucgacaacuucaaguucgucugcgacaacaucaaguucgccgacgaccucaaccagcugacgggguacaagaagccggcgagccgcgagcugaaggugaccuucuuccccgaccucaacggcgacguggucgccaucgacuacaagcacuacacccccuccuucaagaagggcgccaagcugcugcacaagcccaucguguggcacgugaacaacgccaccaacaaggcgacguacaagccgaacaccuggugcauccggugccucuggagcaccaagcccgucgagaccuccaacagcuucgacgugcugaaguccgaggacgcccaggggauggacaaccuggccugcgaggaccucaagcccgugagcgaggaggucguggagaaccccacgauccagaaggacgugcuggagugcaacgucaagaccaccgagguggugggcgacaucauccugaagccggccaacaacucccucaagaucaccgaggaggucgggcacacggaccugauggccgcguacguggacaacagcucccugaccaucaagaagcccaacgagcucagccgcgugcugggccugaagacccucgccacccacgggcuggccgccgucaacuccgugcccugggacacgaucgccaacuacgcgaagccguuccugaacaagguggucagcaccaccaccaacaucgugacgcgcugccucaaccgggugugcaccaacuacaugcccuacuucuucacccugcugcuccagcugugcaccuucacccgcuccacgaacagccggaucaaggccuccaugcccaccaccaucgccaagaacaccgucaagagcgugggcaaguucugccuggaggccagcuucaacuaccucaagucccccaacuucagcaagcugaucaacaucaucaucugguuccugcuccuguccgugugccugggcagccucaucuacuccacggccgcgcuggggguccugaugagcaaccucggcaugccguccuacugcaccggguaccgcgagggcuaccugaacagcaccaacgugaccaucgccacguacugcaccggcuccauccccugcagcgugugccuguccgggcucgacagccuggacaccuaccccucccuggagaccauccagaucacgaucagcuccuucaagugggaccucaccgccuucggccuggucgccgagugguuccuggccuacauccucuucacccgguucuucuacgugcuggggcuggcggccaucaugcagcucuucuucagcuacuucgccgugcacuucaucuccaacagcuggcugauguggcugaucaucaaccugguccagauggcccccaucuccgcgauggugcgcauguacaucuucuucgccagcuucuacuacguguggaagagcuacguccacgugguggacggcugcaacuccagcaccugcaugaugugcuacaagcggaaccgcgccacgcgggucgagugcaccaccaucgugaacgggguccgccgguccuucuacguguacgccaacggcggcaagggguucugcaagcuccacaacuggaacugcgugaacugcgacaccuucugcgccggcagcacguucaucuccgacgaggucgcgcgcgaccugagccugcaguucaagcggccgaucaaccccaccgaccaguccagcuacaucguggacuccgugaccgucaagaacgggagcauccaccucuacuucgacaaggccggccagaagaccuacgagcgccacucccugagccacuucgugaaccuggacaaccuccgggccaacaacacgaaggggucccugcccaucaacgugaucgucuucgacggcaagagcaagugcgaggaguccagcgccaaguccgccagcguguacuacucccagcugaugugccagcccauccuccugcuggaccaggcgcucgugagcgacgucggcgacagcgccgagguggccgugaagauguucgacgccuacgucaacaccuucuccagcaccuucaacgugccgauggagaagcugaagacccugguggccacggcggaggccgagcucgccaagaacgucucccuggacaacgugcugagcaccuucaucuccgccgcgcgccagggguucguggacagcgacgucgagaccaaggacgugguggagugccucaagcugucccaccagagcgacaucgaggucaccggcgacuccugcaacaacuacaugcugacguacaacaagguggagaacaugaccccccgggaccucggggccugcaucgacugcagcgcccgccacaucaacgcccagguggccaagucccacaacaucgcgcugaucuggaacgucaaggacuucaugagccuguccgagcagcuccggaagcagauccgcagcgccgccaagaagaacaaccugcccuucaagcugaccugcgccaccacgcgccagguggugaacgucgugaccaccaagaucgcccucaagggcggguga

SEQ ID NO: 17992 - RNA, 5841 nt, Artificial Sequence
  SARS-CoV-2__MT731327.1__non-structural protein 3 (NSP3) CDS gc
auggcccccaccaaggugaccuucggcgacgacacggucaucgaggugcagggguacaagagcgugaacaucaccuucgagcuggacgagcgcaucgacaagguccucaacgagaagugcuccgccuacaccguggagcugggcaccgaggugaacgaguucgcgugcgucguggccgacgccgugaucaagacgcugcagccggucagcgagcuccugaccccccuggggaucgaccucgacgagugguccauggccaccuacuaccuguucgacgagagcggcgaguucaagcuggccucccacauguacugcagcuucuacccccccgacgaggacgaggaggagggggacugcgaggaggaggaguucgagccguccacccaguacgaguacggcacggaggacgacuaccagggcaagccccucgaguucggggcgaccagcgccgcccugcagcccgaggaggagcaggaggaggacuggcuggacgacgacucccagcagaccgugggccagcaggacgggagcgaggacaaccagaccacgaccauccagaccaucguggagguccagccccagcucgagauggagcugaccccgguggugcagacgaucgaggucaacuccuucagcggcuaccugaagcucaccgacaacguguacaucaagaacgccgacaucguggaggaggcgaagaaggucaagcccaccgugguggucaacgccgccaacguguaccugaagcacgggggcggcguggccggggcccugaacaaggcgaccaacaacgccaugcaggucgaguccgacgacuacaucgccacgaacggcccccucaagguggggggcagcugcguccuguccggccacaaccuggccaagcacugccuccacgugguggggcccaacgucaacaagggcgaggacauccagcugcugaagagcgccuacgagaacuucaaccagcacgaggugcuccuggcgccgcugcucuccgccgggaucuucggcgccgaccccauccacagccugcgggugugcgucgacaccgugcgcaccaacguguaccuggccgucuucgacaagaaccucuacgacaagcugguguccagcuuccuggagaugaagagcgagaagcagguggagcagaagaucgccgagauccccaaggaggaggucaagcccuucaucaccgaguccaagccgagcguggagcagcggaagcaggacgacaagaagaucaaggcgugcguggaggaggucacgaccacccucgaggagaccaaguuccugacggagaaccugcuccuguacaucgacaucaacgggaaccugcaccccgacuccgccacccucgugagcgacaucgacaucaccuuccugaagaaggacgcccccuacaucgugggcgacgucgugcaggagggcgugcugaccgccgucgugauccccacgaagaaggccgggggcaccaccgagaugcucgcgaaggcccugcgcaaggugccgaccgacaacuacaucacgaccuaccccgggcagggccugaacggguacaccgucgaggaggccaagaccgugcucaagaagugcaaguccgccuucuacauccugcccagcaucaucuccaacgagaagcaggagauccugggcaccgugagcuggaaccuccgggagaugcuggcgcacgccgaggagacgcgcaagcugaugcccgucugcguggagaccaaggccaucguguccaccauccagcggaaguacaagggcaucaagauccaggagggggucguggacuacggcgcccgcuucuacuucuacaccagcaagacgaccguggccucccugaucaacacccucaacgaccugaacgagacccuggucacgaugccgcucggguacgugacccacggccugaaccuggaggaggcggcccgguacaugcgcagccucaaggugcccgccaccgucuccgugagcucccccgacgccgugaccgccuacaacggguaccugacgagcuccagcaagacccccgaggagcacuucaucgagaccaucucccuggcgggcagcuacaaggacuggagcuacuccggccagagcacccagcucgggaucgaguuccugaagcggggcgacaaguccgucuacuacacgagcaacccgaccaccuuccaccuggacggggaggugaucaccuucgacaaccucaagacgcugcugucccuccgcgaggugcggaccaucaaggucuucaccaccguggacaacaucaaccugcacacgcagguggucgacaugagcaugaccuacggccagcaguucggccccaccuaccuggacggggccgacgugaccaagaucaagccccacaacucccacgagggcaagacguucuacgugcucccgaacgacgacacccugcgcgucgaggccuucgaguacuaccacaccaccgaccccagcuuccuggggcgguacauguccgcccucaaccacacgaagaaguggaaguacccccaggugaacggccugaccagcaucaagugggccgacaacaacugcuaccuggcgaccgcccuccugacccugcagcagaucgagcucaaguucaaccccccggcccugcaggacgccuacuaccgcgcgcgggccggggaggccgccaacuucugcgcccugauccucgcguacugcaacaagacggugggcgagcugggcgacguccgcgagaccauguccuaccuguuccagcacgccaaccucgacagcugcaagcgggugcugaacgucgugugcaagaccugcgggcagcagcagaccacccugaagggcguggaggccgucauguacauggggacgcucuccuacgagcaguucaagaagggcgugcagauccccugcaccugcgggaagcaggccaccaaguaccuggugcagcaggagagccccuucgucaugauguccgcccccccggcgcaguacgagcugaagcacggcaccuucacgugcgccagcgaguacaccggcaacuaccagugcgggcacuacaagcacaucaccuccaaggagacccucuacugcaucgacggcgcccugcugacgaagagcagcgaguacaaggggcccaucaccgacguguucuacaaggagaacuccuacaccaccacgaucaagcccgugaccuacaagcucgacggcgucgugugcaccgagaucgaccccaagcuggacaacuacuacaagaaggacaacagcuacuucaccgagcagccgaucgaccuggugcccaaccagcccuaccccaacgccuccuucgacaacuucaaguucgucugcgacaacaucaaguucgccgacgaccucaaccagcugacgggguacaagaagccggcgagccgcgagcugaaggugaccuucuuccccgaccucaacggcgacguggucgccaucgacuacaagcacuacacccccuccuucaagaagggcgccaagcugcugcacaagcccaucguguggcacgugaacaacgccaccaacaaggcgacguacaagccgaacaccuggugcauccggugccucuggagcaccaagcccgucgagaccuccaacagcuucgacgugcugaaguccgaggacgcccaggggauggacaaccuggccugcgaggaccucaagcccuucagcgaggagguggucgagaaccccacgauccagaaggacgugcuggagugcaacgugaagaccaccgaggucgugggcgacaucauccugaagccggccaacaacucccucaagaucaccgaggagguggggcacacggaccugauggccgcguacgucgacaacagcucccugaccaucaagaagcccaacgagcucagccgcgugcugggccugaagacccucgccacccacgggcuggccgccgugaacuccguccccugggacacgaucgccaacuacgcgaagccguuccugaacaagguggugagcaccaccaccaacaucgucacgcgcugccucaaccgggugugcaccaacuacaugcccuacuucuucacccugcugcuccagcugugcaccuucacccgcuccacgaacagccggaucaaggccuccaugcccaccaccaucgccaagaacaccgugaagagcgucggcaaguucugccuggaggccagcuucaacuaccucaagucccccaacuucagcaagcugaucaacaucaucaucugguuccugcuccuguccgugugccugggcagccucaucuacuccacggccgcgcugggggugcugaugagcaaccucggcaugccguccuacugcaccggguaccgcgagggcuaccugaacagcaccaacgucaccaucgccacguacugcaccggcuccauccccugcagcgugugccuguccgggcucgacagccuggacaccuaccccucccuggagaccauccagaucacgaucagcuccuucaagugggaccucaccgccuucggccugguggccgagugguuccuggccuacauccucuucacccgguucuucuacguccuggggcuggcggccaucaugcagcucuucuucagcuacuucgccgugcacuucaucuccaacagcuggcugauguggcugaucaucaaccuggugcagauggcccccaucuccgcgaugguccgcauguacaucuucuucgccagcuucuacuacguguggaagagcuacgugcacgucguggacggcugcaacuccagcaccugcaugaugugcuacaagcggaaccgcgccacgcggguggagugcaccaccaucgucaacggggugcgccgguccuucuacgucuacgccaacggcggcaagggguucugcaagcuccacaacuggaacugcgugaacugcgacaccuucugcgccggcagcacguucaucuccgacgagguggcgcgcgaccugagccugcaguucaagcggccgaucaaccccaccgaccaguccagcuacaucgucgacuccgugaccgugaagaacgggagcauccaccucuacuucgacaaggccggccagaagaccuacgagcgccacucccugagccacuucgucaaccuggacaaccuccgggccaacaacacgaaggggucccugcccaucaacgugaucguguucgacggcaagagcaagugcgaggaguccagcgccaaguccgccagcgucuacuacucccagcugaugugccagcccauccuccugcuggaccaggcgcucgugagcgacgugggcgacagcgccgaggucgccgugaagauguucgacgccuacgugaacaccuucuccagcaccuucaacgucccgauggagaagcugaagacccugguggccacggcggaggccgagcucgccaagaacgugucccuggacaacguccugagcaccuucaucuccgccgcgcgccagggguucguggacagcgacguggagaucaaggacgucguggagugccucaagcugucccaccagagcgacaucgaggugaccggcgacuccugcaacaacuacaugcugaccuacaacaaggucgagaacaugacgccccgggaccucggggccugcaucgacugcagcgcccgccacaucaacgcccagguggccaagucccacaacaucgcgcugaucuggaacgugaaggacuucaugagccuguccgagcagcuccggaagcagauccgcagcgccgccaagaagaacaaccugcccuucaagcugaccugcgccaccacccgccaggucgugaacguggucacgaccaagaucgcccucaagggcggguga

SEQ ID NO: 17993 - RNA, 5841 nt, Artificial Sequence
  SARS-CoV-2__MT731656.1__non-structural protein 3 (NSP3) CDS gc
auggcccccaccaaggugaccuucggcgacgacacggucaucgaggugcagggguacaagagcgugaacaucaccuucgagcuggacgagcgcaucgacaagguccucaacgagaagugcuccgccuacaccguggagcugggcaccgaggugaacgaguucgcgugcgucguggccgacgccgugaucaagacgcugcagccggucagcgagcuccugaccccccuggggaucgaccucgacgagugguccauggccaccuacuaccuguucgacgagagcggcgaguucaagcuggccucccacauguacugcagcuucuacccccccgacgaggacgaggaggagggggacugcgaggaggaggaguucgagccguccacccaguacgaguacggcacggaggacgacuaccagggcaagccccucgaguucggggcgaccagcgccgcccugcagcccgaggaggagcaggaggaggacuggcuggacgacgacucccagcagaccgugggccagcaggacgggagcgaggacaaccagaccacgaccauccagaccaucguggagguccagccccagcucgagauggagcugaccccgguggugcagacgaucgaggucaacuccuucagcggcuaccugaagcucaccgacaacguguacaucaagaacgccgacaucguggaggaggcgaagaaggucaagcccaccgugguggucaacgccgccaacguguaccugaagcacgggggcggcguggccggggcccugaacaaggcgaccaacaacgccaugcaggucgaguccgacgacuacaucgccacgaacggcccccucaagguggggggcagcugcguccuguccggccacaaccuggccaagcacugccuccacgugguggggcccaacgucaacaagggcgaggacauccagcugcugaagagcgccuacgagaacuucaaccagcacgaggugcuccuggcgccgcugcucuccgccgggaucuucggcgccgaccccauccacagccugcgggugugcgucgacaccgugcgcaccaacguguaccuggccgucuucgacaagaaccucuacgacaagcugguguccagcuucauggagaugaagagcgagaagcagguggagcagaagaucgccgagauccccaaggaggaggucaagcccuucaucaccgaguccaagccgagcguggagcagcggaagcaggacgacaagaagaucaaggcgugcguggaggaggucacgaccacccuggaggagaccaaguuccucacggagaaccugcugcucuacaucgacaucaacgggaaccugcaccccgacuccgccacccuggugagcgacaucgacaucaccuuccucaagaaggacgcccccuacaucgugggcgacgucgugcaggagggcgugcugaccgccgucgugauccccacgaagaaggccgggggcaccaccgagaugcuggcgaaggcccuccgcaaggugccgaccgacaacuacaucacgaccuaccccgggcagggccugaacggguacaccgucgaggaggccaagaccgugcugaagaagugcaaguccgccuucuacauccuccccagcaucaucuccaacgagaagcaggagauccugggcaccgugagcuggaaccugcgggagaugcucgcgcacgccgaggagacgcgcaagcugaugcccgucugcguggagaccaaggccaucguguccaccauccagcggaaguacaagggcaucaagauccaggacggggucguggacuacggcgcccgcuucuacuucuacaccagcaagacgaccguggccucccugaucaacacccugaacgaccucaacgagacccuggucacgaugccgcugggguacgugacccacggccucaaccuggaggaggcggcccgguacaugcgcagccugaaggugcccgccaccgucuccgugagcucccccgacgccgugaccgccuacaacggguaccucacgagcuccagcaagacccccgaggagcacuucaucgagaccaucucccuggcgggcagcuacaaggacuggagcuacuccggccagagcacccagcuggggaucgaguuccucaagcggggcgacaaguccgucuacuacacgagcaacccgaccaccuuccaccuggacggggaggugaucaccuucgacaaccugaagacgcuccugucccugcgcgaggugcggaccaucaaggucuucaccaccguggacaacaucaaccuccacacgcagguggucgacaugagcaugaccuacggccagcaguucggccccaccuaccuggacggggccgacgugaccaagaucaagccccacaacucccacgagggcaagacguucuacgugcugccgaacgacgacacccuccgcgucgaggccuucgaguacuaccacaccaccgaccccagcuuccuggggcgguacauguccgcccugaaccacacgaagaaguggaaguacccccaggugaacggccucaccagcaucaagugggccgacaacaacugcuaccuggcgaccgcccugcucacccugcagcagaucgagcugaaguucaaccccccggcccuccaggacgccuacuaccgcgcgcgggccggggaggccgccaacuucugcgcccugauccuggcguacugcaacaagacggugggcgagcucggcgacguccgcgagaccauguccuaccuguuccagcacgccaaccuggacagcugcaagcgggugcucaacgucgugugcaagaccugcgggcagcagcagaccacccugaagggcguggaggccgucauguacauggggacgcuguccuacgagcaguucaagaagggcgugcagauccccugcaccugcgggaagcaggccaccaaguaccucgugcagcaggagagccccuucgucaugauguccgcccccccggcgcaguacgagcugaagcacggcaccuucacgugcgccagcgaguacaccggcaacuaccagugcgggcacuacaagcacaucaccuccaaggagacccuguacugcaucgacggcgcccuccugacgaagagcagcgaguacaaggggcccaucaccgacguguucuacaaggagaacuccuacaccaccacgaucaagcccgugaccuacaagcuggacggcgucgugugcaccgagaucgaccccaagcucgacaacuacuacaagaaggacaacagcuacuucaccgagcagccgaucgaccuggugcccaaccagcccuaccccaacgccuccuucgacaacuucaaguucgucugcgacaacaucaaguucgccgacgaccugaaccagcucacgggguacaagaagccggcgagccgcgagcugaaggugaccuucuuccccgaccugaacggcgacguggucgccaucgacuacaagcacuacacccccuccuucaagaagggcgccaagcuccugcacaagcccaucguguggcacgugaacaacgccaccaacaaggcgacguacaagccgaacaccuggugcauccggugccuguggagcaccaagcccgucgagaccuccaacagcuucgacgugcucaaguccgaggacgcccaggggauggacaaccuggccugcgaggaccugaagcccgugagcgaggaggucguggagaaccccacgauccagaaggacgugcucgagugcaacgucaagaccaccgagguggugggcgacaucauccugaagccggccaacaacucccugaagaucaccgaggaggucgggcacacggaccucauggccgcguacguggacaacagcucccugaccaucaagaagcccaacgagcugagccgcgugcucggccugaagacccuggccacccacgggcucgccgccgucaacuccgugcccugggacacgaucgccaacuacgcgaagccguuccugaacaagguggucagcaccaccaccaacaucgugacgcgcugccugaaccgggugugcaccaacuacaugcccuacuucuucacccuccugcugcagcucugcaccuucacccgcuccacgaacagccggaucaaggccuccaugcccaccaccaucgccaagaacaccgucaagagcgugggcaaguucugccuggaggccagcuucaacuaccugaagucccccaacuucagcaagcucaucaacaucaucaucugguuccugcugcucuccgugugccugggcagccugaucuacuccacggccgcgcucgggguccugaugagcaaccugggcaugccguccuacugcaccggguaccgcgagggcuaccucaacagcaccaacgugaccaucgccacguacugcaccggcuccauccccugcagcgugugccuguccgggcuggacagccucgacaccuaccccucccuggagaccauccagaucacgaucagcuccuucaagugggaccugaccgccuucggccucgucgccgagugguuccuggccuacauccuguucacccgguucuucuacgugcucgggcuggcggccaucaugcagcuguucuucagcuacuucgccgugcacuucaucuccaacagcuggcucauguggcugaucaucaaccugguccagauggcccccaucuccgcgauggugcgcauguacaucuucuucgccagcuucuacuacguguggaagagcuacguccacgugguggacggcugcaacuccagcaccugcaugaugugcuacaagcggaaccgcgccacgcgggucgagugcaccaccaucgugaacgggguccgccgguccuucuacguguacgccaacggcggcaagggguucugcaagcugcacaacuggaacugcgugaacugcgacaccuucugcgccggcagcacguucaucuccgacgaggucgcgcgcgaccucagccugcaguucaagcggccgaucaaccccaccgaccaguccagcuacaucguggacuccgugaccgucaagaacgggagcauccaccuguacuucgacaaggccggccagaagaccuacgagcgccacucccucagccacuucgugaaccuggacaaccugcgggccaacaacacgaaggggucccuccccaucaacgugaucgucuucgacggcaagagcaagugcgaggaguccagcgccaaguccgccagcguguacuacucccagcugaugugccagcccauccugcuccuggaccaggcgcuggugagcgacgucggcgacagcgccgagguggccgugaagauguucgacgccuacgucaacaccuucuccagcaccuucaacgugccgauggagaagcucaagacccugguggccacggcggaggccgagcuggccaagaacgucucccucgacaacgugcugagcaccuucaucuccgccgcgcgccagggguucguggacagcgacgucgagaccaaggacgugguggagugccugaagcucucccaccagagcgacaucgaggucaccggcgacuccugcaacaacuacaugcugacguacaacaagguggagaacaugaccccccgggaccugggggccugcaucgacugcagcgcccgccacaucaacgcccagguggccaagucccacaacaucgcgcucaucuggaacgucaaggacuucaugagccuguccgagcagcugcggaagcagauccgcagcgccgccaagaagaacaaccuccccuucaagcugaccugcgccaccacgcgccagguggugaacgucgugaccaccaagaucgcccugaagggcggguga

SEQ ID NO: 17994 - RNA, 5841 nt, Artificial Sequence
  SARS-CoV-2__MT731938.1__non-structural protein 3 (NSP3) CDS gc
auggcccccaccaaggugaccuucggcgacgacacggucaucgaggugcagggguacaagagcgugaacaucaccuucgagcuggacgagcgcaucgacaagguccucaacgagaagugcuccgccuacaccguggagcugggcaccgaggugaacgaguucgcgugcgucguggccgacgccgugaucaagacgcugcagccggucagcgagcuccugaccccccuggggaucgaccucgacgagugguccauggccaccuacuaccuguucgacgagagcggcgaguucaagcuggccucccacauguacugcagcuucuacccccccgacgaggacgaggaggagggggacugcgaggaggaggaguucgagccguccacccaguacgaguacggcacggaggacgacuaccagggcaagccccucgaguucggggcgaccagcgccgcccugcagcccgaggaggagcaggaggaggacuggcuggacgacgacucccagcagaccgugggccagcaggacgggagcgaggacaaccagaccacgaccauccagaccaucguggagguccagccccagcucgagauggagcugaccccgguggugcagacgaucgaggucaacuccuucagcggcuaccugaagcucaccgacaacguguacaucaagaacgccgacaucguggaggaggcgaagaaggucaagcccaccgugguggucaacgccgccaacguguaccugaagcacgggggcggcguggccggggcccugaacaaggcgaccaacaacgccaugcaggucgaguccgacgacuacaucgccacgaacggcccccucaagguggggggcagcugcguccuguccggccacaaccuggccaagcacugccuccacgugguggggcccaacgucaacaagggcgaggacauccagcugcugaagagcgccuacgagaacuucaaccagcacgaggugcuccuggcgccgcugcucuccgccgggaucuucggcgccgaccccauccacagccugcgggugugcgucgacaccgugcgcaccaacguguaccuggccgucuucgacaagaaccucuacgacaagcugguguccagcuuccuggagaugaagagcgagaagcagguggagcagaagaucgccgacaucaccgaguccaagcccagcgucgagcagcggaagcaggacgacaagaagaucaaggcgugcguggaggaggugacgaccacccucgaggagaccaaguuccugacggagaaccugcuccuguacaucgacaucaacgggaaccugcaccccgacuccgccacccucgucagcgacaucgacaucaccuuccugaagaaggacgccccguacaucgugggcgacgugguccaggagggcgugcugaccgccguggucauccccacgaagaaggccgggggcaccaccgagaugcucgcgaaggcccugcgcaaggugcccaccgacaacuacaucacgaccuaccccgggcagggccugaacggguacaccguggaggaggccaagaccguccucaagaagugcaaguccgccuucuacauccugccgagcaucaucuccaacgagaagcaggagauccugggcaccgugagcuggaaccuccgggagaugcuggcgcacgccgaggagacgcgcaagcugaugcccgugugcgucgagaccaaggccaucguguccaccauccagcggaaguacaagggcaucaagauccaggaggggguggucgacuacggcgcccgcuucuacuucuacaccagcaagacgaccguggccucccugaucaacacccucaacgaccugaacgagacccuggugacgaugccccucggguacgucacccacggccugaaccuggaggaggcggcccgguacaugcgcagccucaaggugcccgccaccguguccgucagcuccccggacgccgugaccgccuacaacggguaccugacgagcuccagcaagacccccgaggagcacuucaucgagaccaucucccuggcgggcagcuacaaggacuggagcuacuccggccagagcacccagcucgggaucgaguuccugaagcggggcgacaaguccguguacuacacgagcaaccccaccaccuuccaccuggacggggaggucaucaccuucgacaaccucaagacgcugcugucccuccgcgaggugcggaccaucaagguguucaccaccgucgacaacaucaaccugcacacgcaggugguggacaugagcaugaccuacggccagcaguucggccccaccuaccuggacggggccgacgucaccaagaucaagccgcacaacucccacgagggcaagacguucuacgugcuccccaacgacgacacccugcgcguggaggccuucgaguacuaccacaccaccgaccccagcuuccuggggcgguacauguccgcccucaaccacacgaagaaguggaaguacccgcaggucaacggccugaccagcaucaagugggccgacaacaacugcuaccuggcgaccgcccuccugacccugcagcagaucgagcucaaguucaacccccccgcccugcaggacgccuacuaccgcgcgcgggccggggaggccgccaacuucugcgcccugauccucgcguacugcaacaagacggugggcgagcugggcgacgugcgcgagaccauguccuaccuguuccagcacgccaaccucgacagcugcaagcggguccugaacguggucugcaagaccugcgggcagcagcagaccacccugaagggcguggaggccgugauguacauggggacgcucuccuacgagcaguucaagaagggcguccagauccccugcaccugcgggaagcaggccaccaaguaccuggugcagcaggagagcccguucgugaugauguccgccccccccgcgcaguacgagcugaagcacggcaccuucacgugcgccagcgaguacaccggcaacuaccagugcgggcacuacaagcacaucaccuccaaggagacccucuacugcaucgacggcgcccugcugacgaagagcagcgaguacaaggggcccaucaccgacgucuucuacaaggagaacuccuacaccaccacgaucaagccggugaccuacaagcucgacggcguggucugcaccgagaucgaccccaagcuggacaacuacuacaagaaggacaacagcuacuucaccgagcagcccaucgaccuggugcccaaccagccguaccccaacgccuccuucgacaacuucaaguucgugugcgacaacaucaaguucgccgacgaccucaaccagcugacgggguacaagaagcccgcgagccgcgagcugaaggucaccuucuuccccgaccucaacggcgacgugguggccaucgacuacaagcacuacaccccguccuucaagaagggcgccaagcugcugcacaagcccaucgucuggcacgugaacaacgccaccaacaaggcgacguacaagcccaacaccuggugcauccggugccucuggagcaccaagcccguggagaccuccaacagcuucgacguccugaaguccgaggacgcccaggggauggacaaccuggccugcgaggaccucaagccggugagcgaggagguggucgagaaccccacgauccagaaggacgugcuggagugcaacgugaagaccaccgaggucgugggcgacaucauccugaagcccgccaacaacucccucaagaucaccgaggagguggggcacacggaccugauggccgcguacgucgacaacagcucccugaccaucaagaagcccaacgagcucagccgcgugcugggccugaagacccucgccacccacgggcuggccgccgugaacuccgucccgugggacacgaucgccaacuacgcgaagcccuuccugaacaagguggugagcaccaccaccaacaucgucacgcgcugccucaaccgggugugcaccaacuacaugcccuacuucuucacccugcugcuccagcugugcaccuucacccgcuccacgaacagccggaucaaggccuccaugccgaccaccaucgccaagaacaccgugaagagcgucggcaaguucugccuggaggccagcuucaacuaccucaagucccccaacuucagcaagcugaucaacaucaucaucugguuccugcuccuguccgugugccugggcagccucaucuacuccacggccgcgcugggggugcugaugagcaaccucggcaugcccuccuacugcaccggguaccgcgagggcuaccugaacagcaccaacgucaccaucgccacguacugcaccggcuccauccccugcagcgugugccuguccgggcucgacagccuggacaccuacccgucccuggagaccauccagaucacgaucagcuccuucaagugggaccucaccgccuucggccugguggccgagugguuccuggccuacauccucuucacccgguucuucuacguccuggggcuggcggccaucaugcagcucuucuucagcuacuucgccgugcacuucaucuccaacagcuggcugauguggcugaucaucaaccuggugcagauggcccccaucuccgcgaugguccgcauguacaucuucuucgccagcuucuacuacguguggaagagcuacgugcacgucguggacggcugcaacuccagcaccugcaugaugugcuacaagcggaaccgcgccacgcggguggagugcaccaccaucgucaacggggugcgccgguccuucuacgucuacgccaacggcggcaagggguucugcaagcuccacaacuggaacugcgugaacugcgacaccuucugcgccggcagcacguucaucuccgacgagguggcgcgcgaccugagccugcaguucaagcggcccaucaaccccaccgaccaguccagcuacaucgucgacuccgugaccgugaagaacgggagcauccaccucuacuucgacaaggccggccagaagaccuacgagcgccacucccugagccacuucgucaaccuggacaaccuccgggccaacaacacgaaggggucccugccgaucaacgugaucguguucgacggcaagagcaagugcgaggaguccagcgccaaguccgccagcgucuacuacucccagcugaugugccagcccauccuccugcuggaccaggcgcucgugagcgacgugggcgacagcgccgaggucgccgugaagauguucgacgccuacgugaacaccuucuccagcaccuucaacguccccauggagaagcugaagacccugguggccacggcggaggccgagcucgccaagaacgugucccuggacaacguccugagcaccuucaucuccgccgcgcgccagggguucguggacagcgacguggagaccaaggacgucguggagugccucaagcugucccaccagagcgacaucgaggugaccggcgacuccugcaacaacuacaugcugacguacaacaaggucgagaacaugaccccccgggaccucggggccugcaucgacugcagcgcccgccacaucaacgcccagguggccaagucccacaacaucgcgcugaucuggaacgugaaggacuucaugagccuguccgagcagcuccggaagcagauccgcagcgccgccaagaagaacaaccugccguucaagcugaccugcgccaccacgcgccaggucgugaacguggucaccaccaagaucgcccucaagggcgggaagaucgugaacaacuggcugaagcaguga

SEQ ID NO: 17995 - RNA, 5841 nt, Artificial Sequence
  SARS-CoV-2__MT712861.1__non-structural protein 3 (NSP3) CDS gc
auggcccccaccaaggugaccuucggcgacgacacggucaucgaggugcagggguacaagagcgugaacaucaccuucgagcuggacgagcgcaucgacaagguccucaacgagaagugcuccgccuacaccguggagcugggcaccgaggugaacgaguucgcgugcgucguggccgacgccgugaucaagacgcugcagccggucagcgagcuccugaccccccuggggaucgaccucgacgagugguccauggccaccuacuaccuguucgacgagagcggcgaguucaagcuggccucccacauguacugcagcuucuacccccccgacgaggacgaggaggagggggacugcgaggaggaggaguucgagccguccacccaguacgaguacggcacggaggacgacuaccagggcaagccccucgaguucggggcgaccagcgccgcccugcagcccgaggaggagcaggaggaggacuggcuggacgacgacucccagcagaccgugggccagcaggacgggagcgaggacaaccagaccacgaccauccagaccaucguggagguccagccccagcucgagauggagcugaccccgguggugcagacgaucgaggucaacuccuucagcggcuaccugaagcucaccgacaacguguacaucaagaacgccgacaucguggaggaggcgaagaaggucaagcccaccgugguggucaacgccgccaacguguaccugaagcacgggggcggcguggccggggcccugaacaaggcgaccaacaacgccaugcaggucgaguccgacgacuacaucgccacgaacggcccccucaagguggggggcagcugcguccuguccggccacaaccuggccaagcacugccuccacgugguggggcccaacgucaacaagggcgaggacauccagcugcugaagagcgccuacgagaacuucaaccagcacgaggugcuccuggcgccgcugcucuccgccgggaucuucggcgccgaccccauccacagccugcgggugugcgucgacaccgugcgcaccaacguguaccuggccgucuucgacaagaaccucuacgacaagcugguguccagcuuccuggagaugaagagcgagaagcagguggagcagaagaucgccgagauccccaaggaggaggucaagcccuucaucaccgaguccaagccgagcguggagcagcggaagcaggacgacaagaagaucaaggcgugcguggaggaggucacgaccacccucgaggagaccaaguuccugacggagaaccugcuccuguacaucgacaucaacgggaaccugcaccccgacuccgccacccucgugagcgacaucgacaucaccuuccugaagaaggacgcccccuacaucgugggcgacgucgugcaggagggcgugcugaccgccgucgugauccccacgaagaaggccgggggcaccaccgagaugcucgcgaaggcccugcgcaaggugccgaccgacaacuacaucacgaccuaccccgggcagggccugaacggguacaccgucgaggaggccaagaccgugcucaagaagugcaaguccgccuucuacauccugcccagcaucaucuccaacgagaagcaggagauccugggcaccgugagcuggaaccuccgggagaugcuggcgcacgccgaggagacgcgcaagcugaugcccgucugcguggagaccaaggccaucguguccaccauccagcggaaguacaagggcaucaagauccaggagggggucguggacuacggcgcccgcuucuacuucuacaccagcaagacgaccguggccucccugaucaacacccucaacgaccugaacgagacccuggucacgaugccgcucggguacgugacccacggccugaaccuggaggaggcggcccgguacaugcgcagccucaaggugcccgccaccgucuccgugagcucccccgacgccgugaccgccuacaacggguaccugacgagcuccagcaagacccccgaggagcacuucaucgagaccaucucccuggcgggcagcuacaaggacuggagcuacuccggccagagcacccagcucgggaucgaguuccugaagcggggcgacaaguccgucuacuacacgagcaacccgaccaccuuccaccuggacggggaggugaucaccuucgacaaccucaagacgcugcugucccuccgcgaggugcggaccaucaaggucuucaccaccguggacaacaucaaccugcacacgcagguggucgacaugagcaugaccuacggccagcaguucggccccaccuaccuggacggggccgacgugaccaagaucaagccccacaacucccacgagggcaagacguucuacgugcucccgaacgacgacacccugcgcgucgaggccuucgaguacuaccacaccaccgaccccagcuuccuggggcgguacauguccgcccucaaccacacgaagaaguggaaguacccccaggugaacggccugaccagcaucaagugggccgacaacaacugcuaccuggcgaccgcccuccugacccugcagcagaucgagcucaaguucaaccccccggcccugcaggacgccuacuaccgcgcgcgggccggggaggccgccaacuucugcgcccugauccucgcguacugcaacaagacggugggcgagcugggcgacguccgcgagaccauguccuaccuguuccagcacgccaaccucgacagcugcaagcgggugcugaacgucgugugcaagaccugcgggcagcagcagaccacccugaagggcguggaggccgucauguacauggggacgcucuccuacgagcaguucaagaagggcgugcagauccccugcaccugcgggaagcaggccaccaaguaccuggugcagcaggagagccccuucgucaugauguccgcccccccggcgcaguacgagcugaagcacggcaccuucacgugcgccagcgaguacaccggcaacuaccagugcgggcacuacaagcacaucaccuccaaggagacccucuacugcaucgacggcgcccugcugacgaagagcagcgaguacaaggggcccaucaccgacguguucuacaaggagaacuccuacaccaccacgaucaagcccgugaccuacaagcucgacggcgucgugugcaccgagaucgaccccaagcuggacaacuacuacaagaaggacaacagcuacuucaccgagcagccgaucgaccuggugcccaaccagcccuaccccaacgccuccuucgacaacuucaaguucgucugcgacaacaucaaguucgccgacgaccucaaccagcugacgggguacaagaagccggcgagccgcgagcugaaggugaccuucuuccccgaccucaacggcgacguggucgccaucgacuacaagcacuacacccccuccuucaagaagggcgccaagcugcugcacaagcccaucguguggcacgugaacaacgccaccaacaaggcgacguacaagccgaacaccuggugcauccggugccucuggagcaccaagcccgucgagaccuccaacagcuucgacgugcugaaguccgaggacgcccaggggauggacaaccuggccugcgaggaccucaagcccgugagcgaggaggucguggagaaccccacgauccagaaggacuuccuggagugcaacgugaagaccaccgaggucgugggcgacaucauccugaagccggccaacaacucccucaagaucaccgaggagguggggcacacggaccugauggccgcguacgucgacaacagcucccugaccaucaagaagcccaacgagcucagccgcgugcugggccugaagacccucgccacccacgggcuggccgccgugaacuccguccccugggacacgaucgccaacuacgcgaagccguuccugaacaagguggugagcaccaccaccaacaucgucacgcgcugccucaaccgggugugcaccaacuacaugcccuacuucuucacccugcugcuccagcugugcaccuucacccgcuccacgaacagccggaucaaggccuccaugcccaccaccaucgccaagaacaccgugaagagcgucggcaaguucugccuggaggccagcuucaacuaccucaagucccccaacuucagcaagcugaucaacaucaucaucugguuccugcuccuguccgugugccugggcagccucaucuacuccacggccgcgcugggggugcugaugagcaaccucggcaugccguccuacugcaccggguaccgcgagggcuaccugaacagcaccaacgucaccaucgccacguacugcaccggcuccauccccugcagcgugugccuguccgggcucgacagccuggacaccuaccccucccuggagaccauccagaucacgaucagcuccuucaagugggaccucaccgccuucggccugguggccgagugguuccuggccuacauccucuucacccgguucuucuacguccuggggcuggcggccaucaugcagcucuucuucagcuacuucgccgugcacuucaucuccaacagcuggcugauguggcugaucaucaaccuggugcagauggcccccaucuccgcgaugguccgcauguacaucuucuucgccagcuucuacuacguguggaagagcuacgugcacgucguggacggcugcaacuccagcaccugcaugaugugcuacaagcggaaccgcgccacgcggguggagugcaccaccaucgucaacggggugcgccgguccuucuacgucuacgccaacggcggcaagggguucugcaagcuccacaacuggaacugcgugaacugcgacaccuucugcgccggcagcacguucaucuccgacgagguggcgcgcgaccugagccugcaguucaagcggccgaucaaccccaccgaccaguccagcuacaucgucgacuccgugaccgugaagaacgggagcauccaccucuacuucgacaaggccggccagaagaccuacgagcgccacucccugagccacuucgucaaccuggacaaccuccgggccaacaacacgaaggggucccugcccaucaacgugaucguguucgacggcaagagcaagugcgaggaguccagcgccaaguccgccagcgucuacuacucccagcugaugugccagcccauccuccugcuggaccaggcgcucgugagcgacgugggcgacagcgccgaggucgccgugaagauguucgacgccuacgugaacaccuucuccagcaccuucaacgucuccauggagaagcugaagacccugguggccacggcggaggccgagcucgccaagaacgugagccuggacaacguccuguccaccuucaucagcgccgcgcgccagggguucguggacuccgacguggagaccaaggacgucguggagugccucaagcugagccaccaguccgacaucgaggugaccggcgacagcugcaacaacuacaugcugacguacaacaaggucgagaacaugaccccgcgggaccucggggccugcaucgacugcuccgcccgccacaucaacgcccagguggccaagagccacaacaucgcgcugaucuggaacgugaaggacuucaugucccugagcgagcagcuccggaagcagauccgcuccgccgccaagaagaacaaccugcccuucaagcugaccugcgccaccacgcgccaggucgugaacguggucaccaccaagaucgcccucaagggcggguga

SEQ ID NO: 17996 - RNA, 5841 nt, Artificial Sequence
  SARS-CoV-2__MT706162.1__non-structural protein 3 (NSP3) CDS gc
auggcccccaccaaggugaccuucggcgacgacacggucaucgaggugcagggguacaagagcgugaacaucaccuucgagcuggacgagcgcaucgacaagguccucaacgagaagugcuccgccuacaccguggagcugggcaccgaggugaacgaguucgcgugcgucguggccgacgccgugaucaagacgcugcagccggucagcgagcuccugaccccccuggggaucgaccucgacgagugguccauggccaccuacuaccuguucgacgagagcggcgaguucaagcuggccucccacauguacugcagcuucuacccccccgacgaggacgaggaggagggggacugcgaggaggaggaguucgagccguccacccaguacgaguacggcacggaggacgacuaccagggcaagccccucgaguucggggcgaccagcgccgcccugcagcccgaggaggagcaggaggaggacuggcuggacgacgacucccagcagaccgugggccagcaggacgggagcgaggacaaccagaccacgaccauccagaccaucguggagguccagccccagcucgagauggagcugaccccgguggugcagacgaucgaggucaacuccuucagcggcuaccugaagcucaccgacaacguguacaucaagaacgccgacaucguggaggaggcgaagaaggucaagcccaccgugguggucaacgccgccaacguguaccugaagcacgggggcggcguggccggggcccugaacaaggcgaccaacaacgccaugcaggucgaguccgacgacuacaucgccacgaacggcccccucaagguggggggcagcugcguccuguccggccacaaccuggccaagcacugccuccacgugguggggcccaacgucaacaagggcgaggacauccagcugcugaagagcgccuacgagaacuucaaccagcacgaggugcuccuggcgccgcugcucuccgccgggaucuucggcgccgaccccauccacagccugcgggugugcgucgacaccgugcgcaccaacguguaccuggccgucuucgacaagaaccucuacgacaagcugguguccagcuuccuggagaugaagagcgagaagcagguggagcagaagaucgccgagauccccaaggaggaggucaagcccuucaucaccgaguccaagccgagcguggagcagcggaagcaggacgacaagaagaucaaggcgugcguggaggaggucacgaccacccucgaggagaccaaguuccugacggagaaccugcuccuguacaucgacaucaacgggaaccugcaccccgacuccgccacccucgugagcgacaucgacaucaccuuccugaagaaggacgcccccuacaucgugggcgacgucgugcaggagggcgugcugaccgccgucgugauccccacgaagaaggccgggggcaccaccgagaugcucgcgaaggcccugcgcaaggugccgaccgacaacuacaucacgaccuaccccgggcagggccugaacggguacaccgucgaggaggccaagaccgugcucaagaagugcaaguccgccuucuacauccugcccagcaucaucuccaacgagaagcaggagauccugggcaccgugagcuggaaccuccgggagaugcuggcgcacgccgaggagacgcgcaagcugaugcccgucugcguggagaccaaggccaucguguccaccauccagcggaaguacaagggcaucaagauccaggagggggucguggacuacggcgcccgcuucuacuucuacaccagcaagacgaccguggccucccugaucaacacccucaacgaccugaacgagacccuggucacgaugccgcucggguacgugacccacggccugaaccuggaggaggcggcccgguacaugcgcagccucaaggugcccgccaccgucuccgugagcucccccgacgccgugaccgccuacaacggguaccugacgagcuccagcaagacccccgaggagcacuucaucgagaccaucucccuggcgggcagcuacaaggacuggagcuacuccggccagagcacccagcucgggaucgaguuccugaagcggggcgacaaguccgucuacuacacgagcaacccgaccaccuuccaccuggacggggaggugaucaccuucgacaaccucaagacgcugcugucccuccgcgaggugcggaccaucaaggucuucaccaccguggacaacaucaaccugcacacgcagguggucgacaugagcaugaccuacggccagcaguucggccccaccuaccuggacggggccgacgugaccaagaucaagccccacaacucccacgagggcaagacguucuacgugcucccgaacgacgacacccugcgcgucgaggccuucgaguacuaccacaccaccgaccccagcuuccuggggcgguacauguccgcccucaaccacacgaagaaguggaaguacccccaggugaacggccugaccagcaucaagugggccgacaacaacugcuaccuggcgaccgcccuccugacccugcagcagaucgagcucaaguucaaccccccggcccugcaggacgccuacuaccgcgcgcgggccggggaggccgccaacuucugcgcccugauccucgcguacugcaacaagacggugggcgagcugggcgacguccgcgagaccauguccuaccuguuccagcacgccaaccucgacagcugcaagcgggugcugaacgucgugugcaagaccugcgggcagcagcagaccacccugaagggcguggaggccgucauguacauggggacgcucuccuacgagcaguucaagaagggcgugcagauccccugcaccugcgggaagcaggccaccaaguaccuggugcagcaggagagccccuucgucaugauguccgcccccccggcgcaguacgagcugaagcacggcaccuucacgugcgccagcgaguacaccggcaacuaccagugcgggcacuacaagcacaucaccuccaaggagacccucuacugcaucgacggcgcccugcugacgaagagcagcgaguacaaggggcccaucaccgacguguucuacaaggagaacuccuacaccaccacgaucaagcccgugaccuacaagcucgacggcgucgugugcaccgagaucgaccccaagcuggacaacuacuacaagaaggacaacagcuacuucaccgagcagccgaucgaccuggugcccaaccagcccuaccccaacgccuccuucgacaacuucaaguucgucugcgacaacaucaaguucgccgacgaccucaaccagcugacgggguacaagaagccggcgagccgcgagcugaaggugaccuucuuccccgaccucaacggcgacguggucgccaucgacuacaagcacuacacccccuccuucaagaagggcgccaagcugcugcacaagcccaucguguggcacgugaacaacgccaccaacaaggcgacguacaagccgaacaccuggugcauccggugccucuggagcaccaagcccgucgagaccuccaacagcuucgacgugcugaaguccgaggacgcccaggggauggacaaccuggccugcgaggaccucaagcccgugagcgaggaggucguggagaaccccacgauccagaaggacgugcuggagugcaacgucaagaccaccgagguggugggcgacaucauccugaagccggccaacaacucccucaagaucaccgaggaggucgggcacacggaccugauggccgcguacguggacaacagcucccugaccaucaagaagcccaacgagcucagccgcgugcugggccugaagacccucgccacccacgggcuggccgccgucaacuccgugcccugggacacgaucgccaacuacgcgaagccguuccugaacaagguggucagcaccaccaccaacaucgugacgcgcugccucaaccgggugugcaccaacuacaugcccuacuucuucacccugcugcuccagcugugcaccuucacccgcuccacgaacagccggaucaaggccuccaugcccaccaccaucgccaagaacaccgucaagagcgugugcaaguucugccuggaggccagcuucaacuaccucaagucccccaacuucagcaagcugaucaacaucaucaucugguuccugcuccuguccgugugccugggcagccucaucuacuccacggccgcgcugggcguccugaugagcaaccucgggaugccguccuacugcaccggcuaccgcgagggguaccugaacagcaccaacgugaccaucgccacguacugcaccggcuccauccccugcagcgugugccuguccggccucgacagccuggacaccuaccccucccuggagaccauccagaucacgaucagcuccuucaagugggaccucaccgccuucgggcuggucgccgagugguuccuggccuacauccucuucacccgguucuucuacgugcugggccuggcggccaucaugcagcucuucuucagcuacuucgccgugcacuucaucuccaacagcuggcugauguggcugaucaucaaccugguccagauggcccccaucuccgcgauggugcgcauguacaucuucuucgccagcuucuacuacguguggaagagcuacguccacgugguggacgggugcaacuccagcaccugcaugaugugcuacaagcggaaccgcgccacgcgggucgagugcaccaccaucgugaacggcguccgccgguccuucuacguguacgccaacgggggcaagggcuucugcaagcuccacaacuggaacugcgugaacugcgacaccuucugcgccgggagcacguucaucuccgacgaggucgcgcgcgaccugagccugcaguucaagcggccgaucaaccccaccgaccaguccagcuacaucguggacuccgugaccgucaagaacggcagcauccaccucuacuucgacaaggccgggcagaagaccuacgagcgccacucccugagccacuucgugaaccuggacaaccuccgggccaacaacacgaagggcucccugcccaucaacgugaucgucuucgacgggaagagcaagugcgaggaguccagcgccaaguccgccagcguguacuacucccagcugaugugccagcccauccuccugcuggaccaggcgcucgugagcgacgucggcgacagcgccgagguggccgugaagauguucgacgccuacgucaacaccuucuccagcaccuucaacgugccgauggagaagcugaagacccugguggccacggcggaggccgagcucgccaagaacgucucccuggacaacgugcugagcaccuucaucuccgccgcgcgccagggcuucguggacagcgacgucgagaccaaggacgugguggagugccucaagcugucccaccagagcgacaucgaggucaccggggacuccugcaacaacuacaugcugacguacaacaagguggagaacaugaccccccgggaccucggcgccugcaucgacugcagcgcccgccacaucaacgcccagguggccaagucccacaacaucgcgcugaucuggaacgucaaggacuucaugagccuguccgagcagcuccggaagcagauccgcagcgccgccaagaagaacaaccugcccuucaagcugaccugcgccaccacgcgccagguggugaacgucgugaccaccaagaucgcccucaaggggggcuga

SEQ ID NO: 17997 - RNA, 5841 nt, Artificial Sequence
  SARS-CoV-2__MT706200.1__non-structural protein 3 (NSP3) CDS gc
auggcccccaccaaggugaccuucggcgacgacacggucaucgaggugcagggguacaagagcgugaacaucaccuucgagcuggacgagcgcaucgacaagguccucaacgagaagugcuccgccuacaccguggagcugggcaccgaggugaacgaguucgcgugcgucguggccgacgccgugaucaagacgcugcagccggucagcgagcuccugaccccccuggggaucgaccucgacgagugguccauggccaccuacuaccuguucgacgagagcggcgaguucaagcuggccucccacauguacugcagcuucuacccccccgacgaggacgaggaggagggggacugcgaggaggaggaguucgagccguccacccaguacgaguacggcacggaggacgacuaccagggcaagccccucgaguucggggcgaccagcgccgcccugcagcccgaggaggagcaggaggaggacuggcuggacgacgacucccagcagaccgugggccagcaggacgggagcgaggacaaccagaccacgaccauccagaccaucguggagguccagccccagcucgagauggagcugaccccgguggugcagacgaucgaggucaacuccuucagcggcuaccugaagcucaccgacaacguguacaucaagaacgccgacaucguggaggaggcgaagaaggucaagcccaucgugguggucaacgccgccaacguguaccugaagcacgggggcggcguggccggggcccugaacaaggcgaccaacaacgccaugcaggucgaguccgacgacuacaucgccaccaacggcccccucaagguggggggcagcugcguccuguccggccacaaccuggccaagcacugccuccacgugguggggcccaacgucaacaagggcgaggacauccagcugcugaagagcgccuacgagaacuucaaccagcacgaggugcuccuggcgccgcugcucuccgccgggaucuucggcgccgaccccauccacagccugcgggugugcgucgacacggugcgcaccaacguguaccuggccgucuucgacaagaaccucuacgacaagcugguguccagcuuccuggagaugaagagcgagaagcagguggagcagaagaucgccgagauccccaaggaggaggucaagcccuucaucaccgaguccaagccgagcguggagcagcggaagcaggacgacaagaagaucaaggcgugcguggaggaggucaccacgacccucgaggagaccaaguuccugaccgagaaccugcuccuguacaucgacaucaacgggaaccugcaccccgacuccgccacgcucgugagcgacaucgacaucaccuuccugaagaaggacgcccccuacaucgugggcgacgucgugcaggagggcgugcugaccgccgucgugauccccaccaagaaggccgggggcacgaccgagaugcucgcgaaggcccugcgcaaggugccgaccgacaacuacaucaccacguaccccgggcagggccugaacggguacaccgucgaggaggccaagaccgugcucaagaagugcaaguccgccuucuacauccugcccagcaucaucuccaacgagaagcaggagauccugggcaccgugagcuggaaccuccgggagaugcuggcgcacgccgaggagacccgcaagcugaugcccgucugcguggagacgaaggccaucguguccaccauccagcggaaguacaagggcaucaagauccaggagggggucguggacuacggcgcccgcuucuacuucuacaccagcaagaccacgguggccucccugaucaacacccucaacgaccugaacgagacccuggucaccaugccgcucggguacgugacgcacggccugaaccuggaggaggcggcccgguacaugcgcagccucaaggugcccgccaccgucuccgugagcucccccgacgccgugaccgccuacaacggguaccugaccagcuccagcaagacgcccgaggagcacuucaucgagaccaucucccuggcgggcagcuacaaggacuggagcuacuccggccagagcacccagcucgggaucgaguuccugaagcggggcgacaaguccgucuacuacaccagcaacccgacgaccuuccaccuggacggggaggugaucaccuucgacaaccucaagacccugcugucccuccgcgaggugcggacgaucaaggucuucaccaccguggacaacaucaaccugcacacccagguggucgacaugagcaugacguacggccagcaguucggccccaccuaccuggacggggccgacgugaccaagaucaagccccacaacucccacgagggcaagaccuucuacgugcucccgaacgacgacacgcugcgcgucgaggccuucgaguacuaccacaccaccgaccccagcuuccuggggcgguacauguccgcccucaaccacaccaagaaguggaaguacccccaggugaacggccugacgagcaucaagugggccgacaacaacugcuaccuggcgaccgcccuccugacccugcagcagaucgagcucaaguucaaccccccggcccugcaggacgccuacuaccgcgcgcgggccggggaggccgccaacuucugcgcccugauccucgcguacugcaacaagaccgugggcgagcugggcgacguccgcgagacgauguccuaccuguuccagcacgccaaccucgacagcugcaagcgggugcugaacgucgugugcaagaccugcgggcagcagcagaccacccugaagggcguggaggccgucauguacauggggacccucuccuacgagcaguucaagaagggcgugcagauccccugcacgugcgggaagcaggccaccaaguaccuggugcagcaggagagccccuucgucaugauguccgcccccccggcgcaguacgagcugaagcacggcaccuucaccugcgccagcgaguacacgggcaacuaccagugcgggcacuacaagcacaucaccuccaaggagacccucuacugcaucgacggcgcccugcugaccaagagcagcgaguacaaggggcccaucacggacguguucuacaaggagaacuccuacaccaccaccaucaagcccgugacguacaagcucgacggcgucgugugcaccgagaucgaccccaagcuggacaacuacuacaagaaggacaacagcuacuucaccgagcagccgaucgaccuggugcccaaccagcccuaccccaacgccuccuucgacaacuucaaguucgucugcgacaacaucaaguucgccgacgaccucaaccagcugaccggguacaagaagccggcgagccgcgagcugaaggugacguucuuccccgaccucaacggcgacguggucgccaucgacuacaagcacuacacccccuccuucaagaagggcgccaagcugcugcacaagcccaucguguggcacgugaacaacgccaccaacaaggcgaccuacaagccgaacacguggugcauccggugccucuggagcaccaagcccgucgagaccuccaacagcuucgacgugcugaaguccgaggacgcccaggggauggacaaccuggccugcgaggaccucaagcccgugagcgaggaggucguggagaaccccaccauccagaaggacgugcuggagugcaacgucaagacgaccgagguggugggcgacaucauccugaagccggccaacaacucccucaagaucaccgaggaggucgggcacaccgaccugauggccgcguacguggacaacagcucccugacgaucaagaagcccaacgagcucagccgcgugcugggccugaagacccucgccacccacgggcuggccgccgucaacuccgugcccugggacaccaucgccaacuacgcgaagccguuccugaacaagguggucagcacgaccaccaacaucgugacccgcugccucaaccgggugugcacgaacuacaugcccuacuucuucacccugcugcuccagcugugcaccuucacccgcuccaccaacagccggaucaaggccuccaugcccacgaccaucgccaagaacaccgucaagagcgugggcaaguucugccuggaggccagcuucaacuaccucaagucccccaacuucagcaagcugaucaacaucaucaucugguuccugcuccuguccgugugccugggcagccucaucuacuccaccgccgcgcuggggguccugaugagcaaccucggcaugccguccuacugcacgggguaccgcgagggcuaccugaacagcaccaacgugaccaucgccaccuacugcacgggcuccauccccugcagcgugugccuguccgggcucgacagccuggacaccuaccccucccuggagaccauccagaucaccaucagcuccuucaagugggaccucacggccuucggccuggucgccgagugguuccuggccuacauccucuucacccgguucuucuacgugcuggggcuggcggccaucaugcagcucuucuucagcuacuucgccgugcacuucaucuccaacagcuggcugauguggcugaucaucaaccugguccagauggcccccaucuccgcgauggugcgcauguacaucuucuucgccagcuucuacuacguguggaagagcuacguccacgugguggacggcugcaacuccagcaccugcaugaugugcuacaagcggaaccgcgccacccgggucgagugcacgaccaucgugaacgggguccgccgguccuucuacguguacgccaacggcggcaagggguucugcaagcuccacaacuggaacugcgugaacugcgacaccuucugcgccggcagcaccuucaucuccgacgaggucgcgcgcgaccugagccugcaguucaagcggccgaucaaccccacggaccaguccagcuacaucguggacuccgugaccgucaagaacgggagcauccaccucuacuucgacaaggccggccagaagaccuacgagcgccacucccugagccacuucgugaaccuggacaaccuccgggccaacaacaccaaggggucccugcccaucaacgugaucgucuucgacggcaagagcaagugcgaggaguccagcgccaaguccgccagcguguacuacucccagcugaugugccagcccauccuccugcuggaccaggcgcucgugagcgacgucggcgacagcgccgagguggccgugaagauguucgacgccuacgucaacacguucuccagcaccuucaacgugccgauggagaagcugaagacccugguggccaccgcggaggccgagcucgccaagaacgucucccuggacaacgugcugagcacguucaucuccgccgcgcgccagggguucguggacagcgacgucgagaccaaggacgugguggagugccucaagcugucccaccagagcgacaucgaggucaccggcgacuccugcaacaacuacaugcugaccuacaacaagguggagaacaugacgccccgggaccucggggccugcaucgacugcagcgcccgccacaucaacgcccagguggccaagucccacaacaucgcgcugaucuggaacgucaaggacuucaugagccuguccgagcagcuccggaagcagauccgcagcgccgccaagaagaacaaccugcccuucaagcugaccugcgccaccacccgccagguggugaacgucgugacgaccaagaucgcccucaagggcggguga

SEQ ID NO: 17998 - RNA, 5841 nt, Artificial Sequence
  SARS-CoV-2__MT706216.1__non-structural protein 3 (NSP3) CDS gc
auggcccccaccaaggugaccuucggcgacgacacggucaucgaggugcagggguacaagagcgugaacaucaccuucgagcuggacgagcgcaucgacaagguccucaacgagaagugcuccgccuacaccguggagcugggcaccgaggugaacgaguucgcgugcgucguggccgacgccgugaucaagacgcugcagccggucagcgagcuccugaccccccuggggaucgaccucgacgagugguccauggccaccuacuaccuguucgacgagagcggcgaguucaagcuggccucccacauguacugcagcuucuacccccccgacgaggacgaggaggagggggacugcgaggaggaggaguucgagccguccacccaguacgaguacggcacggaggacgacuaccagggcaagccccucgaguucggggcgaccagcgccgcccugcagcccgaggaggagcaggaggaggacuggcuggacgacgacucccagcagaccgugggccagcaggacgggagcgaggacaaccagaccacgaccauccagaccaucguggagguccagccccagcucgagauggagcugaccccgguggugcagacgaucgaggucaacuccuucagcggcuaccugaagcucaccgacaacguguacaucaagaacgccgacaucguggaggaggcgaagaaggucaagcccaccgugguggucaacgccgccaacguguaccugaagcacgggggcggcguggccggggcccugaacaaggcgaccaacaacgccaugcaggucgaguccgacgacuacaucgccacgaacggcccccucaagguggggggcagcugcguccuguccggccacaaccuggccaagcacugccuccacgugguggggcccaacgucaacaagggcgaggacauccagcugcugaagagcgccuacgagaacuucaaccagcacgaggugcuccuggcgccgcugcucuccgccgggaucuucggcgccgaccccauccacagccugcgggugugcgucgacaccgugcgcaccaacguguaccuggccgucuucgacaagaaccucuacgacaagcugguguccagcuuccuggagaugaagagcgagaagcagguggagcagaagaucgccgagauccccaaggaggaggucaagcccuucaucaccgaguccaagccgagcguggagcagcggaagcaggacgacaagaagaucaaggcgugcguggaggaggucacgaccacccucgaggagaccaaguuccugacggagaaccugcuccuguacaucgacaucaacgggaaccugcaccccgacuccgccacccucgugagcgacaucgacaucaccuuccugaagaaggacgcccccuacaucgugggcgacgucgugcaggagggcgugcugaccgccgucgugauccccacgaagaaggccgggggcaccaccgagaugcucgcgaaggcccugcgcaaggugccgaccgacaacuacaucacgaccuaccccgggcagggccugaacggguacaccgucgaggaggccaagaccgugcucaagaagugcaaguccgccuucuacauccugcccagcaucaucuccaacgagaagcaggagauccugggcaccgugagcuggaaccuccgggagaugcuggcgcacgccgaggagacgcgcaagcugaugcccgucugcguggagaccaaggccaucguguccaccauccagcggaaguacaagggcaucaagauccaggagggggucguggacuacggcgcccgcuucuacuucuacaccagcaagacgaccguggccucccugaucaacacccucaacgaccugaacgagacccuggucacgaugccgcucggguacgugacccacggccugaaccuggaggaggcggcccgguacaugcgcagccucaaggugcccgccaccgucuccgugagcucccccgacgccgugaccgccuacaacggguaccugacgagcuccagcaagacccccgaggagcacuucaucgagaccaucucccuggcgggcagcuacaaggacuggagcuacuccggccagagcacccagcucgggaucgaguuccugaagcggggcgacaaguccgucuacuacacgagcaacccgaccaccuuccaccuggacggggaggugaucaccuucgacaaccucaagacgcugcugucccuccgcgaggugcggaccaucaaggucuucaccaccguggacaacaucaaccugcacacgcagguggucgacaugagcaugaccuacggccagcaguucggccccaccuaccuggacggggccgacgugaccaagaucaagccccacaacucccacgagggcaagacguucuacgugcucccgaacgacgacacccugcgcgucgaggccuucgaguacuaccacaccaccgaccccagcuuccuggggcgguacauguccgcccucaaccacacgaagaaguggaaguacccccaggugaacggccugaccagcaucaagugggccgacaacaacugcuaccuggcgaccgcccuccugacccugcagcagaucgagcucaaguucaaccccccggcccugcaggacgccuacuaccgcgcgcgggccggggaggccgccaacuucugcgcccugauccucgcguacugcaacaagacggugggcgagcugggcgacguccgcgagaccauguccuaccuguuccagcacgccaaccucgacagcugcaagcgggugcugaacgucgugugcaagaccugcgggcagcagcagaccacccugaagggcguggaggccgucauguacauggggacgcucuccuacgagcaguucaagaagggcgugcagauccccugcaccugcgggaagcaggccaccaaguaccuggugcagcaggagagccccuucgucaugauguccgcccccccggcgcaguacgagcugaagcacggcaccuucacgugcgccagcgaguacaccggcaacuaccagugcgggcacuacaagcacaucaccuccaaggagacccucuacugcaucgacggcgcccugcugacgaagagcagcgaguacaaggggcccaucaccgacguguucuacaaggagaacuccuacaccaccacgaucaagcccgugaccuacaagcucgacggcgucgugugcaccgagaucgaccccaagcuggacaacuacuacaagaaggacaacagcuacuucaccgagcagccgaucgaccuggugcccaaccagcccuaccccaacgccuccuucgacaacuucaaguucgucugcgacaacaucaaguucgccgacgaccucaaccagcugacgggguacaagaagccggcgagccgcgagcugaaggugaccuucuuccccgaccucaacggcgacguggucgccaucgacuacaagcacuacacccccuccuucaagaagggcgccaagcugcugcacaagcccaucguguggcacgugaacaacgccaccaacaaggcgacguacaagccgaacaccuggugcauccggugccucuggagcaccaagcccgucgagaccuccaacagcuucgacgugcugaaguccgaggacgcccaggggauggacaaccuggccugcgaggaccucaagcccgugagcgaggaggucguggagaaccccacgauccagaaggacgugcuggacugcaacgucaagaccaccgagguggugggcgacaucauccugaagccggccaacaacucccucaagaucaccgaggaggucgggcacacggaccugauggccgcguacguggacaacagcucccugaccaucaagaagcccaacgagcucagccgcgugcugggccugaagacccucgccacccacgggcuggccgccgucaacuccgugcccugggacacgaucgccaacuacgcgaagccguuccugaacaagguggucagcaccaccaccaacaucgugacgcgcugccucaaccgggugugcaccaacuacaugcccuacuucuucacccugcugcuccagcugugcaccuucacccgcuccacgaacagccggaucaaggccuccaugcccaccaccaucgccaagaacaccgucaagagcgugggcaaguucugccuggaggccagcuucaacuaccucaagucccccaacuucagcaagcugaucaacaucaucaucugguuccugcuccuguccgugugccugggcagccucaucuacuccacggccgcgcuggggguccugaugagcaaccucggcaugccguccuacugcaccggguaccgcgagggcuaccugaacagcaccaacgugaccaucgccacguacugcaccggcuccauccccugcagcgugugccuguccgggcucgacagccuggacaccuaccccucccuggagaccauccagaucacgaucagcuccuucaagugggaccucaccgccuucggccuggucgccgagugguuccuggccuacauccucuucacccgguucuucuacgugcuggggcuggcggccaucaugcagcucuucuucagcuacuucgccgugcacuucaucuccaacagcuggcugauguggcugaucaucaaccugguccagauggcccccaucuccgcgauggugcgcauguacaucuucuucgccagcuucuacuacguguggaagagcuacguccacgugguggacggcugcaacuccagcaccugcaugaugugcuacaagcggaaccgcgccacgcgggucgagugcaccaccaucgugaacgggguccgccgguccuucuacguguacgccaacggcggcaagggguucugcaagcuccacaacuggaacugcgugaacugcgacaccuucugcgccggcagcacguucaucuccgacgaggucgcgcgcgaccugagccugcaguucaagcggccgaucaaccccaccgaccaguccagcuacaucguggacuccgugaccgucaagaacgggagcauccaccucuacuucgacaaggccggccagaagaccuacgagcgccacucccugagccacuucgugaaccuggacaaccuccgggccaacaacacgaaggggucccugcccaucaacgugaucgucuucgacggcaagagcaagugcgaggaguccagcgccaaguccgccagcguguacuacucccagcugaugugccagcccauccuccugcuggaccaggcgcucgugagcgacgucggcgacagcgccgagguggccgugaagauguucgacgccuacgucaacaccuucuccagcaccuucaacgugccgauggagaagcugaagacccugguggccacggcggaggccgagcucgccaagaacgucucccuggacaacgugcugagcaccuucaucuccgccgcgcgccagggguucguggacagcgacgucgagaccaaggacgugguggagugccucaagcugucccaccagagcgacaucgaggucaccggcgacuccugcaacaacuacaugcugacguacaacaagguggagaacaugaccccccgggaccucggggccugcaucgacugcagcgcccgccacaucaacgcccagguggccaagucccacaacaucgcgcugaucuggaacgucaaggacuucaugagccuguccgagcagcuccggaagcagauccgcagcgccgccaagaagaacaaccugcccuucaagcugaccugcgccaccacgcgccagguggugaacgucgugaccaccaagaucgcccucaagggcggguga

SEQ ID NO: 17999 - RNA, 5841 nt, Artificial Sequence
  SARS-CoV-2__MT706222.1__non-structural protein 3 (NSP3) CDS gc
auggcccccaccaaggugaccuucggcgacgacacggucaucgaggugcagggguacaagagcgugaacaucaccuucgagcuggacgagcgcaucgacaagguccucaacgagaagugcuccgccuacaccguggagcugggcaccgaggugaacgaguucgcgugcgucguggccgacgccgugaucaagacgcugcagccggucagcgagcuccugaccccccuggggaucgaccucgacgagugguccauggccaccuacuaccuguucgacgagagcggcgaguucaagcuggccucccacauguacugcagcuucuacccccccgacgaggacgaggaggagggggacugcgaggaggaggaguucgagccguccacccaguacgaguacggcacggaggacgacuaccagggcaagccccucgaguucggggcgaccagcgccgcccugcagcccgaggaggagcaggaggaggacuggcuggacgacgacucccagcagaccgugggccagcaggacgggagcgaggacaaccagaccacgaccauccagaccaucguggagguccagccccagcucgagauggagcugaccccgguggugcagacgaucgaggucaacuccuucagcggcuaccugaagcucaccgacaacguguacaucaagaacgccgacaucguggaggaggcgaagaaggucaagcccaccgugguggucaacgccgccaacguguaccugaagcacgggggcggcguggccggggcccugaacaaggcgaccaacaacgccaugcaggucgaguccgacgacuacaucgccacgaacggcccccucaagguggggggcagcugcguccuguccggccacaaccuggccaagcacugccuccacgugguggggcccaacgucaacaagggcgaggacauccagcugcugaagagcgccuacgagaacuucaaccagcacgaggugcuccuggcgccgcugcucuccgccgggaucuucggcgccgaccccauccacagccugcgggugugcgucgacaccgugcgcaccaacguguaccuggccgucuucgacaagaaccucuacgacaagcugguguccagcuuccuggagaugaagagcgagaagcagguggagcagaagaucgccgagauccccaaggaggaggucaagcccuucaucaccgaguccaagccgagcguggagcagcggaagcaggacgacaagaagaucaaggcgugcguggaggaggucacgaccacccucgaggagaccaaguuccugacggagaaccugcuccuguacaucgacaucaacgggaaccugcaccccgacuccgccacccucgugagcgacaucgacaucaccuuccugaagaaggacgcccccuacaucgugggcgacgucgugcaggagggcgugcugaccgccgucgugauccccacgaagaaggccgggggcaccaccgagaugcucgcgaaggcccugcgcaaggugccgaccgacaacuacaucacgaccuaccccgggcagggccugaacggguacaccgucgaggaggccaagaccgugcucaagaagugcaaguccgccuucuacauccugcccagcaucaucuccaacgagaagcaggagauccugggcaccgugagcuggaaccuccgggagaugcuggcgcacgccgaggagacgcgcaagcugaugcccgucugcguggagaccaaggccaucguguccaccauccagcggaaguacaagggcaucaagauccaggagggggucguggacuacggcgcccgcuucuacuucuacaccagcaagacgaccguggccucccugaucaacacccucaacgaccugaacgagacccuggucacgaugccgcucggguacgugacccacggccugaaccuggaggaggcggcccgguacaugcgcagccucaaggugcccgccaccgucuccgugagcucccccgacgccgugaccgccuacaacggguaccugacgagcuccagcaagacccuggaggagcacuucaucgagaccaucucccucgcgggcagcuacaaggacuggagcuacuccggccagagcacccagcuggggaucgaguuccugaagcggggcgacaaguccgucuacuacacgagcaaccccaccaccuuccaccucgacggggaggugaucaccuucgacaaccugaagacgcugcucucccugcgcgaggugcggaccaucaaggucuucaccaccguggacaacaucaaccugcacacgcagguggucgacaugagcaugaccuacggccagcaguucggcccgaccuaccucgacggggccgacgugaccaagaucaagccccacaacucccacgagggcaagacguucuacgugcugcccaacgacgacacccugcgcgucgaggccuucgaguacuaccacaccaccgacccgagcuuccucgggcgguacauguccgcccugaaccacacgaagaaguggaaguacccccaggugaacggccugaccagcaucaagugggccgacaacaacugcuaccucgcgaccgcccugcugacccuccagcagaucgagcugaaguucaacccccccgcccugcaggacgccuacuaccgcgcgcgggccggggaggccgccaacuucugcgcccucauccuggcguacugcaacaagacggugggcgagcugggcgacguccgcgagaccauguccuaccucuuccagcacgccaaccuggacagcugcaagcgggugcugaacgucgugugcaagaccugcgggcagcagcagaccacccucaagggcguggaggccgucauguacauggggacgcuguccuacgagcaguucaagaagggcgugcagaucccgugcaccugcgggaagcaggccaccaaguaccuggugcagcaggagagccccuucgucaugauguccgccccccccgcgcaguacgagcucaagcacggcaccuucacgugcgccagcgaguacaccggcaacuaccagugcgggcacuacaagcacaucaccuccaaggagacccuguacugcaucgacggcgcccugcucacgaagagcagcgaguacaaggggccgaucaccgacguguucuacaaggagaacuccuacaccaccacgaucaagcccgugaccuacaagcuggacggcgucgugugcaccgagaucgaccccaagcuggacaacuacuacaagaaggacaacagcuacuucaccgagcagcccaucgaccucgugccgaaccagcccuaccccaacgccuccuucgacaacuucaaguucgucugcgacaacaucaaguucgccgacgaccugaaccagcugacgggguacaagaagcccgcgagccgcgagcucaaggugaccuucuucccggaccugaacggcgacguggucgccaucgacuacaagcacuacacccccuccuucaagaagggcgccaagcugcuccacaagcccaucguguggcacgugaacaacgccaccaacaaggcgacguacaagcccaacaccuggugcauccggugccuguggagcaccaagccggucgagaccuccaacagcuucgacgugcugaaguccgaggacgcccaggggauggacaaccucgccugcgaggaccugaagcccgugagcgaggaggucguggagaaccccacgauccagaaggacgugcuggagugcaacgucaagaccaccgagguggugggcgacaucauccucaagcccgccaacaacucccugaagaucaccgaggaggucgggcacacggaccugauggccgcguacguggacaacagcucccucaccaucaagaagccgaacgagcugagccgcgugcugggccucaagacccuggccacccacgggcuggccgccgucaacuccgugcccugggacacgaucgccaacuacgcgaagcccuuccucaacaagguggucagcaccaccaccaacaucgugacgcgcugccugaaccgggugugcaccaacuacaugccguacuucuucacccugcuccugcagcugugcaccuucacccgcuccacgaacagccggaucaaggccuccaugcccaccaccaucgccaagaacaccgucaagagcgugggcaaguucugccucgaggccagcuucaacuaccugaagucccccaacuucagcaagcugaucaacaucaucaucugguuccuccugcuguccgugugccucggcagccugaucuacuccacggccgcgcuggggguccucaugagcaaccugggcaugcccuccuacugcaccggguaccgcgagggcuaccugaacagcaccaacgugaccaucgccacguacugcaccggcuccaucccgugcagcgugugccucuccgggcuggacagccuggacaccuaccccucccucgagaccauccagaucacgaucagcuccuucaagugggaccugaccgccuucggccuggucgccgagugguuccucgccuacauccuguucacccgguucuucuacgugcuggggcucgcggccaucaugcagcuguucuucagcuacuucgccgugcacuucaucuccaacagcuggcugauguggcugaucaucaaccucguccagauggcccccaucuccgcgauggugcgcauguacaucuucuucgccagcuucuacuacguguggaagagcuacguccacgugguggacggcugcaacuccagcaccugcaugaugugcuacaagcggaaccgcgccacgcgggucgagugcaccaccaucgugaacgggguccgccgguccuucuacguguacgccaacggcggcaagggguucugcaagcugcacaacuggaacugcgugaacugcgacaccuucugcgccggcagcacguucaucuccgacgaggucgcgcgcgaccugagccuccaguucaagcggcccaucaacccgaccgaccaguccagcuacaucguggacuccgugaccgucaagaacgggagcauccaccuguacuucgacaaggccggccagaagaccuacgagcgccacucccugagccacuucgugaaccucgacaaccugcgggccaacaacacgaaggggucccugcccaucaacgugaucgucuucgacggcaagagcaagugcgaggaguccagcgccaaguccgccagcguguacuacucccagcucaugugccagcccauccugcugcucgaccaggcgcuggugagcgacgucggcgacagcgccgagguggccgugaagauguucgacgccuacgucaacaccuucuccagcaccuucaacgugcccauggagaagcugaagacccucguggccacggcggaggccgagcuggccaagaacgucucccuggacaacgugcucagcaccuucaucuccgccgcgcgccagggguucguggacagcgacgucgagaccaaggacgugguggagugccugaagcugucccaccagagcgacaucgaggucaccggcgacuccugcaacaacuacaugcucacguacaacaagguggagaacaugaucccgcgggaccugggggccugcaucgacugcagcgcccgccacaucaacgcccagguggccaagucccacaacaucgcgcugaucuggaacgucaaggacuucaugagccucuccgagcagcugcggaagcagauccgcagcgccgccaagaagaacaaccugcccuucaagcucaccugcgccaccacccgccagguggugaacgucgugacgaccaagaucgcccugaagggcggguga

SEQ ID NO: 18000 - RNA, 5841 nt, Artificial Sequence
  SARS-CoV-2__MT706287.1__non-structural protein 3 (NSP3) CDS gc
auggcccccaccaaggugaccuucggcgacgacacggucaucgaggugcagggguacaagagcgugaacaucaccuucgagcuggacgagcgcaucgacaagguccucaacgagaagugcuccgccuacaccguggagcugggcaccgaggugaacgaguucgcgugcgucguggccgacgccgugaucaagacgcugcagccggucagcgagcuccugaccccccuggggaucgaccucgacgagugguccauggccaccuacuaccuguucgacgagagcggcgaguucaagcuggccucccacauguacugcagcuucuacccccccgacgaggacgaggaggagggggacugcgaggaggaggaguucgagccguccacccaguacgaguacggcacggaggacgacuaccagggcaagccccucgaguucggggcgaccagcgccgcccugcagcccgaggaggagcaggaggaggacuggcuggacgacgacucccagcagaccgugggccagcaggacgggagcgaggacaaccagaccacgaccauccagaccaucguggagguccagccccagcucgagauggagcugaccccgguggugcagacgaucgaggucaacuccuucagcggcuaccugaagcucaccgacaacguguacaucaagaacgccgacaucguggaggaggcgaagaaggucaagcccaccgugguggucaacgccgccaacguguaccugaagcacgggggcggcguggccggggcccugaacaaggcgaccaacaacgccaugcaggucgaguccgacgacuacaucgccacgaacggcccccucaagguggggggcagcugcguccuguccggccacaaccuggccaagcacugccuccacgugguggggcccaacgucaacaagggcgaggacauccagcugcugaagagcgccuacgagaacuucaaccagcacgaggugcuccuggcgccgcugcucuccgccgggaucuucggcgccgaccccauccacagccugcgggugugcgucgacaccgugcgcaccaacguguaccuggccgucuucgacaagaaccucuacgacaagcugguguccagcuuccuggagaugaagagcgagaagcagguggagcagaagaucgccgagauccccaaggaggaggucaagcccuucaucaccgaguccaagccgagcguggagcagcggaagcaggacgacaagaagaucaaggcgugcguggaggaggucacgaccacccucgaggagaccaaguuccugacggagaaccugcuccuguacaucgacaucaacgggaaccugcaccccgacuccgccacccucgugagcgacaucgacaucaccuuccugaagaaggacgcccccuacaucgugggcgacgucgugcaggagggcgugcugaccgccgucgugauccccacgaagaaggccgggggcaccaccgagaugcucgcgaaggcccugcgcaaggugccgaccgacaacuacaucacgaccuaccccgggcagggccugaacggguacaccgucgaggaggccaagaccgugcucaagaagugcaaguccgccuucuacauccugcccagcaucaucuccaacgagaagcaggagauccugggcaccgugagcuggaaccuccgggagaugcuggcgcacgccgaggagacgcgcaagcugaugcccgucugcguggagaccaaggccaucguguccaccauccagcggaaguacaagggcaucaagauccaggagggggucguggacuacggcgcccgcuucuacuucuacaccagcaagacgaccguggccucccugaucaacacccucaacgaccugaacgagacccuggucacgaugccgcucggguacgugacccacggccugaaccuggaggaggcggcccgguacaugcgcagccucaaggugcccgccaccgucuccgugagcucccccgacgccgugaccgccuacaacggguaccugacgagcuccagcaagacccccgaggagcacuucaucgagaccaucucccuggcgggcagcuacaaggacuggagcuacuccggccagagcacccagcucgggaucgaguuccugaagcggggcgacaaguccgucuacuacacgagcaacccgaccaccuuccaccuggacggggaggugaucaccuucgacaaccucaagacgcugcugucccuccgcgaggugcggaccaucaaggucuucaccaccguggacaacaucaaccugcacacgcagguggucgacaugagcaugaccuacggccagcaguucggccccaccuaccuggacggggccgacgugaccaagaucaagccccacaacucccacgagggcaagacguucuacgugcucccgaacgacgacacccugcgcgucgaggccuucgaguacuaccacaccaccgaccccagcuuccuggggcgguacauguccgcccucaaccacacgaagaaguggaaguacccccaggugaacggccugaccagcaucaagugggccgacaacaacugcuaccuggcgaccgcccuccugacccugcagcagaucgagcucaaguucaaccccccggcccugcaggacgccuacuaccgcgcgcgggccggggaggccgccaacuucugcgcccugauccucgcguacugcaacaagacggugggcgagcugggcgacguccgcgagaccauguccuaccuguuccagcacgccaaccucgacagcugcaagcgggugcugaacgucgugugcaagaccugcgggcagcagcagaccacccugaagggcguggaggccgucauguacauggggacgcucuccuacgagcaguucaagaagggcgugcagauccccugcaccugcgggaagcaggccaccaaguaccuggugcagcaggagagccccuucgucaugauguccgcccccccggcgcaguacgagcugaagcacggcaccuucacgugcgccagcgaguacaccggcaacuaccagugcgggcacuacaagcacaucaccuccaaggagacccucuacugcaucgacggcgcccugcugacgaagagcagcgaguacaaggggcccaucaccgacguguucuacaaggagaacuccuacaccaccacgaucaagcccgugaccuacaagcucgacggcgucgugugcaccgagaucgaccccaagcuggacaacuacuacaagaaggacaacagcuacuucaccgagcagccgaucgaccuggugcccaaccagcccuaccccaacgccuccuucgacaacuucaaguucgucugcgacaacaucaaguucgccgacgaccucaaccagcugacgggguacaagaagccggcgagccgcgagcugaaggugaccuucuuccccgaccucaacggcgacguggucgccaucgacuacaagcacuacacccccuccuucaagaagggcgccaagcugcugcacaagcccaucguguggcacgugaacaacgccaccaacaaggcgacguacaagccgaacaccuggugcauccggugccucuggagcaccaagcccgucgagaccuccaacagcuucgacgugcugaaguccgaggacgcccaggggauggacaaccuggccugcgaggaccucaagcccgugagcgaggaggucguggagaaccccacgauccagaaggacgugcuggagugcaacgucaagaccaccgagguggugggcgacaucauccugaagccggccaacaacucccucaagaucaccgaggaggucgggcacacggaccugauggccgcguacguggacaacagcucccugaccgugaagaagcccaacgagcucagccgcguccugggccugaagacccucgccacccacgggcuggccgccgugaacuccgugcccugggacacgaucgccaacuacgcgaagccguuccugaacaaggucgugagcaccaccaccaacaucgugacgcgcugccucaaccgggucugcaccaacuacaugcccuacuucuucacccugcugcuccagcugugcaccuucacccgcuccacgaacagccggaucaaggccuccaugcccaccaccaucgccaagaacaccgugaagagcgugggcaaguucugccuggaggccagcuucaacuaccucaagucccccaacuucagcaagcugaucaacaucaucaucugguuccugcuccuguccgucugccugggcagccucaucuacuccacggccgcgcugggggugcugaugagcaaccucggcaugccguccuacugcaccggguaccgcgagggcuaccugaacagcaccaacgugaccaucgccacguacugcaccggcuccauccccugcagcgucugccuguccgggcucgacagccuggacaccuaccccucccuggagaccauccagaucacgaucagcuccuucaagugggaccucaccgccuucggccugguggccgagugguuccuggccuacauccucuucacccgguucuucuacgugcuggggcuggcggccaucaugcagcucuucuucagcuacuucgccguccacuucaucuccaacagcuggcugauguggcugaucaucaaccuggugcagauggcccccaucuccgcgauggugcgcauguacaucuucuucgccagcuucuacuacgucuggaagagcuacgugcacguggucgacggcugcaacuccagcaccugcaugaugugcuacaagcggaaccgcgccacgcggguggagugcaccaccaucgucaacggggugcgccgguccuucuacguguacgccaacggcggcaagggguucugcaagcuccacaacuggaacugcgucaacugcgacaccuucugcgccggcagcacguucaucuccgacgagguggcgcgcgaccugagccugcaguucaagcggccgaucaaccccaccgaccaguccagcuacaucguggacuccgucaccgugaagaacgggagcauccaccucuacuucgacaaggccggccagaagaccuacgagcgccacucccugagccacuucgugaaccuggacaaccuccgggccaacaacacgaaggggucccugcccaucaacgucaucguguucgacggcaagagcaagugcgaggaguccagcgccaaguccgccagcguguacuacucccagcugaugugccagcccauccuccugcuggaccaggcgcucgucagcgacgugggcgacagcgccgagguggccgucaagauguucgacgccuacgugaacaccuucuccagcaccuucaacgugccgauggagaagcugaagacccuggucgccacggcggaggccgagcucgccaagaacgugucccuggacaacgugcugagcaccuucaucuccgccgcgcgccagggguucgucgacagcgacguggagaccaaggacguggucgagugccucaagcugucccaccagagcgacaucgaggugaccggcgacuccugcaacaacuacaugcugacguacaacaagguggagaacaugaccccccgggaccucggggccugcaucgacugcagcgcccgccacaucaacgcccaggucgccaagucccacaacaucgcgcugaucuggaacgugaaggacuucaugagccuguccgagcagcuccggaagcagauccgcagcgccgccaagaagaacaaccugcccuucaagcugaccugcgccaccacgcgccagguggucaacguggugaccaccaagaucgcccucaagggcggguga

SEQ ID NO: 18001 - RNA, 5841 nt, Artificial Sequence
  SARS-CoV-2__MT706289.1__non-structural protein 3 (NSP3) CDS gc
auggcccccaccaaggugaccuucggcgacgacacggucaucgaggugcagggguacaagagcgugaacaucaccuucgagcuggacgagcgcaucgacaagguccucaacgagaagugcuccgccuacaccguggagcugggcaccgaggugaacgaguucgcgugcgucguggccgacgccgugaucaagacgcugcagccggucagcgagcuccugaccccccuggggaucgaccucgacgagugguccauggccaccuacuaccuguucgacgagagcggcgaguucaagcuggccucccacauguacugcagcuucuacccccccgacgaggacgaggaggagggggacugcgaggaggaggaguucgagccguccacccaguacgaguacggcacggaggacgacuaccagggcaagccccucgaguucggggcgaccagcgccgcccugcagcccgaggaggagcaggaggaggacuggcuggacgacgacucccagcagaccgugggccagcaggacgggagcgaggacaaccagaccacgaccauccagaccaucguggagguccagccccagcucgagauggagcugaccccgguggugcagacgaucgaggucaacuccuucagcggcuaccugaagcucaccgacaacguguacaucaagaacgccgacaucguggaggaggcgaagaaggucaagcccaccgugguggucaacgccgccaacguguaccugaagcacgggggcggcguggccggggcccugaacaaggcgaccaacaacgccaugcaggucgaguccgacgacuacaucgccacgaacggcccccucaagguggggggcagcugcguccuguccggccacaaccuggccaagcacugccuccacgugguggggcccaacgucaacaagggcgaggacauccagcugcugaagagcgccuacgagaacuucaaccagcacgaggugcuccuggcgccgcugcucuccgccgggaucuucggcgccgaccccauccacagccugcgggugugcgucgacaccgugcgcaccaacguguaccuggccgucuucgacaagaaccucuacgacaagcugguguccagcuuccuggagaugaagagcgagaagcagguggagcagaagaucgccgagauccccaaggaggaggucaagcccuucaucaccgaguccaagccgagcguggagcagcggaagcaggacgacaagaagaucaaggcgugcguggaggaggucacgaccacccucgaggagaccaaguuccugacggagaaccugcuccuguacaucgacaucaacgggaaccugcaccccgacuccgccacccucgugagcgacaucgacaucaccuuccugaagaaggacgcccccuacaucgugggcgacgucgugcaggagggcgugcugaccgccgucgugauccccacgaagaaggccgggggcaccaccgagaugcucgcgaaggcccugcgcaaggugccgaccgacaacuacaucacgaccuaccccgggcagggccugaacggguacaccgucgaggaggccaagaccgugcucaagaagugcaaguccgccuucuacauccugcccagcaucaucuccaacgagaagcaggagauccugggcaccgugagcuggaaccuccgggagaugcuggcgcacgccgaggagacgcgcaagcugaugcccgucugcguggagaccaaggccaucguguccaccauccagcggaaguacaagggcaucaagauccaggagggggucguggacuacggcgcccgcuucuacuucuacaccagcaagacgaccguggccucccugaucaacacccucaacgaccugaacgagacccuggucacgaugccgcucggguacgugacccacggccugaaccuggaggaggcggcccgguacaugcgcagccucaaggugcccgccaccgucuccgugagcucccccgacgccgugaccgccuacaacggguaccugacgagcuccagcaagacccccgaggagcacuucaucgagaccaucucccuggcgggcagcuacaaggacuggagcuacuccggccagagcacccagcucgggaucgaguuccugaagcggggcgacaaguccgucuacuacacgagcaacccgaccaccuuccaccuggacggggaggugaucaccuucgacaaccucaagacgcugcugucccuccgcgaggugcggaccaucaaggucuucaccaccguggacaacaucaaccugcacacgcagguggucgacaugagcaugaccuacggccagcaguucggccccaccuaccuggacggggccgacgugaccaagaucaagccccacaacucccacgagggcaagacguucuacgugcucccgaacgacgacacccugcgcgucgaggccuucgaguacuaccacaccaccgaccccagcuuccuggggcgguacauguccgcccucaaccacacgaagaaguggaaguacccccaggugaacggccugaccagcaucaagugggccgacaacaacugcuaccuggcgaccgcccuccugacccugcagcagaucgagcucaaguucaaccccccggcccugcaggacgccuacuaccgcgcgcgggccggggaggccgccaacuucugcgcccugauccucgcguacugcaacaagacggugggcgagcugggcgacguccgcgagaccauguccuaccuguuccagcacgccaaccucgacagcugcaagcgggugcugaacgucgugugcaagaccugcgggcagcagcagaccacccugaagggcguggaggccgucauguacauggggacgcucuccuacgagcaguucaagaagggcgugcagauccccugcaccugcgggaagcaggccaccaaguaccuggugcagcaggagagccccuucgucaugauguccgcccccccggcgcaguacgagcugaagcacggcaccuucacgugcgccagcgaguacaccggcaacuaccagugcgggcacuacaagcacaucaccuccaaggagacccucuacugcaucgacggcgcccugcugacgaagagcagcgaguacaaggggcccaucaccgacguguucuacaaggagaacuccuacaccaccacgaucaagcccgugaccuacaagcucgacggcgucgugugcaccgagaucgaccccaagcuggacaacuacuacaagaaggacaacagcuacuucaccgagcagccgaucgaccuggugcccaaccagcccuaccccaacgccuccuucgacaacuucaaguucgucugcgacaacaucaaguucgccgacgaccucaaccagcugacgggguacaagaagccggcgagccgcgagcugaaggugaccuucuuccccgaccucaacggcgacguggucgccaucgacuacaagcacuacacccccuccuucaagaagggcgccaagcugcugcacaagcccaucguguggcacgugaacaacgccaccaacaaggcgacguacaagccgaacaccuggugcauccggugccucuggagcaccaagcccgucgagaccuccaacagcuucgacgugcugaaguccgaggacgcccaggggauggacaaccuggccugcgaggaccucaagcccgugagcgaggaggucguggagaaccccacgauccagaaggacgugcuggagugcaacgucaagaccaccgagguggugggcgacaucauccugaagccggccaacaacucccucaagaucaccgaggaggucgggcacacggaccugauggccgcguacguggacaacagcucccugaccaucaagaagcccaacgagcucagccgcgugcugggccugaagacccucgccacccacgggcuggccgccgucaacuccgugcccugggacacgaucgccaacuacgcgaagccguuccugaacaagguggucagcaccaccaccaacaucgugacgcgcugccucaaccgggugugcaccaacuacaugcccuacuucuucacccugcugcuccagcugugcaccuucacccgcuccacgaacagccggaucaaggccuccaugcccaccaccaucgccaagaacaccgucaagagcgugggcaaguucuuccuggaggccagcuucaacuaccucaagucccccaacuucagcaagcugaucaacaucaucaucugguuccugcuccuguccgugugccugggcagccucaucuacuccacggccgcgcuggggguccugaugagcaaccucggcaugccguccuacugcaccggguaccgcgagggcuaccugaacagcaccaacgugaccaucgccacguacugcaccggcuccauccccugcagcgugugccuguccgggcucgacagccuggacaccuaccccucccuggagaccauccagaucacgaucagcuccuucaagugggaccucaccgccuucggccuggucgccgagugguuccuggccuacauccucuucacccgguucuucuacgugcuggggcuggcggccaucaugcagcucuucuucagcuacuucgccgugcacuucaucuccaacagcuggcugauguggcugaucaucaaccugguccagauggcccccaucuccgcgauggugcgcauguacaucuucuucgccagcuucuacuacguguggaagagcuacguccacgugguggacggcugcaacuccagcaccugcaugaugugcuacaagcggaaccgcgccacgcgggucgagugcaccaccaucgugaacgggguccgccgguccuucuacguguacgccaacggcggcaagggguucugcaagcuccacaacuggaacugcgugaacugcgacaccuucugcgccggcagcacguucaucuccgacgaggucgcgcgcgaccugagccugcaguucaagcggccgaucaaccccaccgaccaguccagcuacaucguggacuccgugaccgucaagaacgggagcauccaccucuacuucgacaaggccggccagaagaccuacgagcgccacucccugagccacuucgugaaccuggacaaccuccgggccaacaacacgaaggggucccugcccaucaacgugaucgucuucgacggcaagagcaagugcgaggaguccagcgccaaguccgccagcguguacuacucccagcugaugugccagcccauccuccugcuggaccaggcgcucgugagcgacgucggcgacagcgccgagguggccgugaagauguucgacgccuacgucaacaccuucuccagcaccuucaacgugccgauggagaagcugaagacccugguggccacggcggaggccgagcucgccaagaacgucucccuggacaacgugcugagcaccuucaucuccgccgcgcgccagggguucguggacagcgacgucgagaccaaggacgugguggagugccucaagcugucccaccagagcgacaucgaggucaccggcgacuccugcaacaacuacaugcugacguacaacaagguggagaacaugaccccccgggaccucggggccugcaucgacugcagcgcccgccacaucaacgcccagguggccaagucccacaacaucgcgcugaucuggaacgucaaggacuucaugagccuguccgagcagcuccggaagcagauccgcagcgccgccaagaagaacaaccugcccuucaagcugaccugcgccaccacgcgccagguggugaacgucgugaccaccaagaucgcccucaagggcggguga

SEQ ID NO: 18002 - RNA, 5841 nt, Artificial Sequence
  SARS-CoV-2__MT706341.1__non-structural protein 3 (NSP3) CDS gc
auggcccccaccaaggugaccuucggcgacgacacggucaucgaggugcagggguacaagagcgugaacaucaccuucgagcuggacgagcgcaucgacaagguccucaacgagaagugcuccgccuacaccguggagcugggcaccgaggugaacgaguucgcgugcgucguggccgacgccgugaucaagacgcugcagccggucagcgagcuccugaccccccuggggaucgaccucgacgagugguccauggccaccuacuaccuguucgacgagagcggcgaguucaagcuggccucccacauguacugcagcuucuacccccccgacgaggacgaggaggagggggacugcgaggaggaggaguucgagccguccacccaguacgaguacggcacggaggacgacuaccagggcaagccccucgaguucggggcgaccagcgccgcccugcagcccgaggaggagcaggaggaggacuggcuggacgacgacucccagcagaccgugggccagcaggacgggagcgaggacaaccagaccacgaccauccagaccaucguggagguccagccccagcucgagauggagcugaccccgguggugcagacgaucgaggucaacuccuucagcggcuaccugaagcucaccgacaacguguacaucaagaacgccgacaucguggaggaggcgaagaaggucaagcccaccgugguggucaacgccgccaacguguaccugaagcacgggggcggcguggccggggcccugaacaaggcgaccaacaacgccaugcaggucgaguccgacgacuacaucgccacgaacggcccccucaagguggggggcagcugcguccuguccggccacaaccuggccaagcacugccuccacgugguggggcccaacgucaacaagggcgaggacauccagcugcugaagagcgccuacgagaacuucaaccagcacgaggugcuccuggcgccgcugcucuccgccgggaucuucggcgccgaccccauccacagccugcgggugugcgucgacaccgugcgcaccaacguguaccuggccgucuucgacaagaaccucuacgacaagcugguguccagcuuccuggagaugaagagcgagaagcagguggagcagaagaucgccgagauccccaaggaggaggucaagcccuucaucaccgaguccaagccgagcguggagcagcggaagcaggacgacaagaagaucaaggcgugcguggaggaggucacgaccacccucgaggagaccaaguuccugacggagaaccugcuccuguacaucgacaucaacgggaaccugcaccccgacuccgccacccucgugagcgacaucgacaucaccuuccugaagaaggacgcccccuacaucgugggcgacgucgugcaggagggcgugcugaccgccgucgugauccccacgaagaaggccgggggcaccaccgagaugcucgcgaaggcccugcgcaaggugccgaccgacaacuacaucacgaccuaccccgggcagggccugaacggguacaccgucgaggaggccaagaccgugcucaagaagugcaaguccgccuucuacauccugcccagcaucaucuccaacgagaagcaggagauccugggcaccgugagcuggaaccuccgggagaugcuggcgcacgccgaggagacgcgcaagcugaugcccgucugcguggagaccaaggccaucguguccaccauccagcggaaguacaagggcaucaagauccaggagggggucguggacuacggcgcccgcuucuacuucuacaccagcaagacgaccguggccucccugaucaacacccucaacgaccugaacgagacccuggucacgaugccgcucggguacgugacccacggccugaaccuggaggaggcggcccgguacaugcgcagccucaaggugcccgccaccgucuccgugagcucccccgacgccgugaccgccuacaacggguaccugacgagcuccagcaagacccccgaggagcacuucaucgagaccaucucccuggcgggcagcuacaaggacuggagcuacuccggccagagcacccagcucgggaucgaguuccugaagcggggcgacaaguccgucuacuacacgagcaacccgaccaccuuccaccuggacggggaggugaucaccuucgacaaccucaagacgcugcugucccuccgcgaggugcggaccaucaaggucuucaccaccguggacaacaucaaccugcacacgcagguggucgacaugagcaugaccuacggccagcaguucggccccaccuaccuggacggggccgacgugaccaagaucaagccccacaacucccacgagggcaagacguucuacgugcucccgaacgacgacacccugcgcgucgaggccuucgaguacuaccacaccaccgaccccagcuuccuggggcgguacauguccgcccucaaccacacgaagaaguggaaguacccccaggugaacggccugaccagcaucaagugggccgacaacaacugcuaccuggcgaccgcccuccugacccugcagcagaucgagcucaaguucaaccccccggcccugcaggacgccuacuaccgcgcgcgggccggggaggccgccaacuucugcgcccugauccucgcguacugcaacaagacggugggcgagcugggcgacguccgcgagaccauguccuaccuguuccagcacgccaaccucgacagcugcaagcgggugcugaacgucgugugcaagaccugcgggcagcagcagaccacccugaagggcguggaggccgucauguacauggggacgcucuccuacgagcaguucaagaagggcgugcagauccccugcaccugcgggaagcaggccaccaaguaccuggugcagcaggagagccccuucgucaugauguccgcccccccggcgcaguacgagcugaagcacggcaccuucacgugcgccagcgaguacaccggcaacuaccagugcgggcacuacaagcacaucaccuccaaggagacccucuacugcaucgacggcgcccugcugacgaagagcagcgaguacaaggggcccaucaccgacguguucuacaaggagaacuccuacaccaccacgaucaagcccgugaccuacaagcucgacggcgucgugugcaccgagaucgaccccaagcuggacaacuacuacaagaaggacaacagcuacuucaccgagcagccgaucgaccuggugcccaaccagcccuaccccaacgccuccuucgacaacuucaaguucgucugcgacaacaucaaguucgccgacgaccucaaccagcugacgggguacaagaagccggcgagccgcgagcugaaggugaccuucuuccccgaccucaacggcgacguggucgccaucgacuacaagcacuacacccccuccuucaagaagggcgccaagcugcugcacaagcccaucguguggcacgugaacaacgccaccaacaaggcgacguacaagccgaacaccuggugcauccggugccucuggagcaccaagcccgucgagaccuccaacagcuucaacgugcugaaguccgaggacgcccaggggauggacaaccuggccugcgaggaccucaagcccgugagcgaggaggucguggagaaccccacgauccagaaggacgugcuggagugcaacgucaagaccaccgagguggugggcgacaucauccugaagccggccaacaacucccucaagaucaccgaggaggucgggcacacggaccugauggccgcguacguggacaacagcucccugaccaucaagaagcccaacgagcucagccgcgugcugggccugaagacccucgccacccacgggcuggccgccgucaacuccgugcccugggacacgaucgccaacuacgcgaagccguuccugaacaagguggucagcaccaccaccaacaucgugacgcgcugccucaaccgggugugcaccaacuacaugcccuacuucuucacccugcugcuccagcugugcaccuucacccgcuccacgaacagccggaucaaggccuccaugcccaccaccaucgccaagaacaccgucaagagcgugggcaaguucugccuggaggccagcuucaacuaccucaagucccccaacuucagcaagcugaucaacaucaucaucugguuccugcuccuguccgugugccugggcagccucaucuacuccacggccgcgcuggggguccugaugagcaaccucggcaugccguccuacugcaccggguaccgcgagggcuaccugaacagcaccaacgugaccaucgccacguacugcaccggcuccauccccugcagcgugugccuguccgggcucgacagccuggacaccuaccccucccuggagaccauccagaucacgaucagcuccuucaagugggaccucaccgccuucggccuggucgccgagugguuccuggccuacauccucuucacccgguucuucuacgugcuggggcuggcggccaucaugcagcucuucuucagcuacuucgccgugcacuucaucuccaacagcuggcugauguggcugaucaucaaccugguccagauggcccccaucuccgcgauggugcgcauguacaucuucuucgccagcuucuacuacguguggaagagcuacguccacgugguggacggcugcaacuccagcaccugcaugaugugcuacaagcggaaccgcgccacgcgggucgagugcaccaccaucgugaacgggguccgccgguccuucuacguguacgccaacggcggcaagggguucugcaagcuccacaacuggaacugcgugaacugcgacaccuucugcgccggcagcacguucaucuccgacgaggucgcgcgcgaccugagccugcaguucaagcggccgaucaaccccaccgaccaguccagcuacaucguggacuccgugaccgucaagaacgggagcauccaccucuacuucgacaaggccggccagaagaccuacgagcgccacucccugagccacuucgugaaccuggacaaccuccgggccaacaacacgaaggggucccugcccaucaacgugaucgucuucgacggcaagagcaagugcgaggaguccagcgccaaguccgccagcguguacuacucccagcugaugugccagcccauccuccugcuggaccaggcgcucgugagcgacgucggcgacagcgccgagguggccgugaagauguucgacgccuacgucaacaccuucuccagcaccuucaacgugccgauggagaagcugaagacccugguggccacggcggaggccgagcucgccaagaacgucucccuggacaacgugcugagcaccuucaucuccgccgcgcgccagggguucguggacagcgacgucgagaccaaggacgugguggagugccucaagcugucccaccagagcgacaucgaggucaccggcgacuccugcaacaacuacaugcugacguacaacaagguggagaacaugaccccccgggaccucggggccugcaucgacugcagcgcccgccacaucaacgcccagguggccaagucccacaacaucgcgcugaucuggaacgucaaggacuucaugagccuguccgagcagcuccggaagcagauccgcagcgccgccaagaagaacaaccugcccuucaagcugaccugcgccaccacgcgccagguggugaacgucgugaccaccaagaucgcccucaagggcggguga

SEQ ID NO: 18003 - RNA, 5841 nt, Artificial Sequence
  SARS-CoV-2__MT706356.1__non-structural protein 3 (NSP3) CDS gc
auggcccccaccaaggugaccuucggcgacgacacggucaucgaggugcagggguacaagagcgugaacaucaccuucgagcuggacgagcgcaucgacaagguccucaacgagaagugcuccgccuacaccguggagcugggcaccgaggugaacgaguucgcgugcgucguggccgacgccgugaucaagacgcugcagccggucagcgagcuccugaccccccuggggaucgaccucgacgagugguccauggccaccuacuaccuguucgacgagagcggcgaguucaagcuggccucccacauguacugcagcuucuacccccccgacgaggacgaggaggagggggacugcgaggaggaggaguucgagccguccacccaguacgaguacggcacggaggacgacuaccagggcaagccccucgaguucggggcgaccagcgccgcccugcagcccgaggaggagcaggaggaggacuggcuggacgacgacucccagcagaccgugggccagcaggacgggagcgaggacaaccagaccacgaccauccagaccaucguggagguccagccccagcucgagauggagcugaccccgguggugcagacgaucgaggucaacuccuucagcggcuaccugaagcucaccgacaacguguacaucaagaacgccgacaucguggaggaggcgaagaaggucaagcccaccgugguggucaacgccgccaacguguaccugaagcacgggggcggcguggccggggcccugaacaaggcgaccaacaacgccaugcaggucgaguccgacgacuacaucgccacgaacggcccccucaagguggggggcagcugcguccuguccggccacaaccuggccaagcacugccuccacgugguggggcccaacgucaacaagggcgaggacauccagcugcugaagagcgccuacgagaacuucaaccagcacgaggugcuccuggcgccgcugcucuccgccgggaucuucggcgccgaccccauccacagccugcgggugugcgucgacaccgugcgcaccaacguguaccuggccgucuucgacaagaaccucuacgacaagcugguguccagcuuccuggagaugaagagcgagaagcagguggagcagaagaucgccgagauccccaaggaggaggucaagcccuucaucaccgaguccaagccgagcguggagcagcggaagcaggacgacaagaagaucaaggcgugcguggaggaggucacgaccacccucgaggagaccaaguuccugacggagaaccugcuccuguacaucgacaucaacgggaaccugcaccccgacuccgccacccucgugagcgacaucgacaucaccuuccugaagaaggacgcccccuacaucgugggcgacgucgugcaggagggcgugcugaccgccgucgugauccccacgaagaaggccgggggcaccaccgagaugcucgcgaaggcccugcgcaaggugccgaccgacaacuacaucacgaccuaccccgggcagggccugaacggguacaccgucgaggaggccaagaccgugcucaagaagugcaaguccgccuucuacauccugcccagcaucaucuccaacgagaagcaggagauccugggcaccgugagcuggaaccuccgggagaugcuggcgcacgccgaggagacgcgcaagcugaugcccgucugcguggagaccaaggccaucguguccaccauccagcggaaguacaagggcaucaagauccaggagggggucguggacuacggcgcccgcuucuacuucuacaccagcaagacgaccguggccucccugaucaacacccucaacgaccugaacgagacccuggucacgaugccgcucggguacgugacccacggccugaaccuggaggaggcggcccgguacaugcgcagccucaaggugcccgccaccgucuccgugagcucccccgacgccgugaccgccuacaacggguaccugacgagcuccagcaagacccccgaggagcacuucaucgagaccaucucccuggcgggcagcuacaaggacuggagcuacuccggccagagcacccagcucgggaucgaguuccugaagcggggcgacaaguccgucuacuacacgagcaacccgaccaccuuccaccuggacggggaggugaucaccuucgacaaccucaagacgcugcugucccuccgcgaggugcggaccaucaaggucuucaccaccguggacaacaucaaccugcacacgcagguggucgacaugagcaugaccuacggccagcaguucggccccaccuaccuggacggggccgacgugaccaagaucaagccccacaacucccacgagggcaagacguucuacgugcucccgaacgacgacacccugcgcgucgaggccuucgaguacuaccacaccaccgaccccagcuuccuggggcgguacauguccgcccucaaccacacgaagaaguggaaguacccccaggugaacggccugaccagcaucaagugggccgacaacaacugcuaccuggcgaccgcccuccugacccugcagcagaucgagcucaaguucaaccccccggcccugcaggacgccuacuaccgcgcgcgggccggggaggccgccaacuucugcgcccugauccucgcguacugcaacaagacggugggcgagcugggcgacguccgcgagaccauguccuaccuguuccagcacgccaaccucgacagcugcaagcgggugcugaacgucgugugcaagaccugcgggcagcagcagaccacccugaagggcguggaggccgucauguacauggggacgcucuccuacgagcaguucaagaagggcgugcagauccccugcaccugcgggaagcaggccaccaaguaccuggugcagcaggagagccccuucgucaugauguccgcccccccggcgcaguacgagcugaagcacggcaccuucacgugcgccagcgaguacaccggcaacuaccagugcgggcacuacaagcacaucaccuccaaggagacccucuacugcaucgacggcgcccugcugacgaagagcagcgaguacaaggggcccaucaccgacguguucuacaaggagaacuccuacaccaccacgaucaagcccgugaccuacaagcucgacggcgucgugugcaccgagaucgaccccaagcuggacaacuacuacaagaaggacaacagcuacuucaccgagcagccgaucgaccuggugcccaaccagcccuaccccaacgccuccuucgacaacuucaaguucgucugcgacaacaucaaguucgccgacgaccucaaccagcugacgggguacaagaagccggcgagccgcgagcugaaggugaccuucuuccccgaccucaacggcgacguggucgccaucgacuacaagcacuacacccccuccuucaagaagggcgccaagcugcugcacaagcccaucguguggcacgugaacaacgccaccaacaaggcgacguacaagccgaacaccuggugcauccggugccucuggagcaccaagcccgucgagaccuccaacagcuucgacgugcugaaguccgaggacgcccaggggauggacaaccuggccugcgaggaccucaagcccgugagcgaggaggucguggagaaccccacgauccagaaggacgugcuggagugcaacgucaagaccaccgagguggugggcgacaucauccugaagccggccaacaacucccucaagaucaccgaggaggucgggcacacggaccugauggccgcguacguggacaacagcucccugaccaucaagaagcccaacgagcucagccgcgugcugggccugaagacccucgccacccacgggcuggccgccgucaacuccgugcccugggacacgaucgccaacuacgcgaagccguuccugaacaagguggucagcaccaccaccaacaucgugacgcgcugccucaaccgggugugcaccaacuacaugcccuacuucuucacccugcugcuccagcugugcaccuucacccgcuccacgaacagccggaucaaggccuccaugcccaccaccaucgccaagaacaccgucaagagcgugggcaaguucugccuggaggccagcuucaacuaccucaagucccccaacuucagcaagcugaucaacaucaucaucugguuccugcuccuguccgugugccugggcagccucaucuacuccacggccgcgcuggggguccugaugagcaaccucggcaugccguccuacugcaccggguaccgcgagggcuaccugaacagcaccaacgugaccaucgccacguacugcaccggcuccauccccugcagcgugugccuguccgggcucgacagccuggacaccuaccccucccuggagaccauccagaucacgaucagcuccuucaagugggaccucaccgccuucggccuggucgccgagugguuccuggccuacauccucuucacccgguucuucuacgugcuggggcuggcggccaucaugcagcucuuccugagcuacuucgccgugcacuucaucuccaacagcuggcugauguggcugaucaucaaccucguccagauggcccccaucuccgcgauggugcgcauguacaucuucuucgccagcuucuacuacguguggaagagcuacguccacgugguggacggcugcaacuccagcaccugcaugaugugcuacaagcggaaccgcgccacgcgggucgagugcaccaccaucgugaacgggguccgccgguccuucuacguguacgccaacggcggcaagggguucugcaagcugcacaacuggaacugcgugaacugcgacaccuucugcgccggcagcacguucaucuccgacgaggucgcgcgcgaccugagccuccaguucaagcggccgaucaaccccaccgaccaguccagcuacaucguggacuccgugaccgucaagaacgggagcauccaccuguacuucgacaaggccggccagaagaccuacgagcgccacucccugagccacuucgugaaccucgacaaccugcgggccaacaacacgaaggggucccugcccaucaacgugaucgucuucgacggcaagagcaagugcgaggaguccagcgccaaguccgccagcguguacuacucccagcucaugugccagcccauccugcugcucgaccaggcgcuggugagcgacgucggcgacagcgccgagguggccgugaagauguucgacgccuacgucaacaccuucuccagcaccuucaacgugccgauggagaagcugaagacccucguggccacggcggaggccgagcuggccaagaacgucucccuggacaacgugcucagcaccuucaucuccgccgcgcgccagggguucguggacagcgacgucgagaccaaggacgugguggagugccugaagcugucccaccagagcgacaucgaggucaccggcgacuccugcaacaacuacaugcucacguacaacaagguggagaacaugaccccccgggaccugggggccugcaucgacugcagcgcccgccacaucaacgcccagguggccaagucccacaacaucgcgcugaucuggaacgucaaggacuucaugagccucuccgagcagcugcggaagcagauccgcagcgccgccaagaagaacaaccugcccuucaagcucaccugcgccaccacgcgccagguggugaacgucgugaccaccaagaucgcccugaagggcggguga

SEQ ID NO: 18004 - RNA, 5841 nt, Artificial Sequence
  SARS-CoV-2__MT706369.1__non-structural protein 3 (NSP3) CDS gc
auggcccccaccaaggugaccuucggcgacgacacggucaucgaggugcagggguacaagagcgugaacaucaccuucgagcuggacgagcgcaucgacaagguccucaacgagaagugcuccgccuacaccguggagcugggcaccgaggugaacgaguucgcgugcgucguggccgacgccgugaucaagacgcugcagccggucagcgagcuccugaccccccuggggaucgaccucgacgagugguccauggccaccuacuaccuguucgacgagagcggcgaguucaagcuggccucccacauguacugcagcuucuacccccccgacgaggacgaggaggagggggacugcgaggaggcggaguucgagccguccacccaguacgaguacggcacggaggacgacuaccagggcaagccccucgaguucggggccaccagcgccgcccugcagcccgaggaggagcaggaggaggacuggcuggacgacgacucccagcagaccgugggccagcaggacgggagcgaggacaaccagaccacgaccauccagaccaucguggagguccagccccagcucgagauggagcugaccccgguggugcagacgaucgaggucaacuccuucagcggcuaccugaagcucaccgacaacguguacaucaagaacgcggacaucguggaggaggccaagaaggucaagcccaccgugguggucaacgccgccaacguguaccugaagcacgggggcggcguggccggggcgcugaacaaggccaccaacaacgccaugcaggucgaguccgacgacuacaucgccacgaacggcccccucaagguggggggcagcugcguccuguccggccacaaccuggccaagcacugccuccacgugguggggcccaacgucaacaagggcgaggacauccagcugcugaagagcgcguacgagaacuucaaccagcacgaggugcuccuggccccgcugcucuccgccgggaucuucggcgccgaccccauccacagccugcgggugugcgucgacaccgugcgcaccaacguguaccuggccgucuucgacaagaaccucuacgacaagcugguguccagcuuccuggagaugaagagcgagaagcagguggagcagaagaucgcggagauccccaaggaggaggucaagcccuucaucaccgaguccaagccgagcguggagcagcggaagcaggacgacaagaagaucaaggccugcguggaggaggucacgaccacccucgaggagaccaaguuccugacggagaaccugcuccuguacaucgacaucaacgggaaccugcaccccgacuccgccacccucgugagcgacaucgacaucaccuuccugaagaaggacgcccccuacaucgugggcgacgucgugcaggagggcgugcugaccgccgucgugauccccacgaagaaggcggggggcaccaccgagaugcucgccaaggcccugcgcaaggugccgaccgacaacuacaucacgaccuaccccgggcagggccugaacggguacaccgucgaggaggccaagaccgugcucaagaagugcaaguccgcguucuacauccugcccagcaucaucuccaacgagaagcaggagauccugggcaccgugagcuggaaccuccgggagaugcuggcccacgccgaggagacgcgcaagcugaugcccgucugcguggagaccaaggccaucguguccaccauccagcggaaguacaagggcaucaagauccaggagggggucguggacuacggcgcccgcuucuacuucuacaccagcaagacgaccguggcgucccugaucaacacccucaacgaccugaacgagacccuggucacgaugccgcucggguacgugacccacggccugaaccuggaggaggccgcccgguacaugcgcagccucaaggugcccgccaccgucuccgugagcucccccgacgccgugaccgcguacaacggguaccugacgagcuccagcaagacccccgaggagcacuucaucgagaccaucucccuggccggcagcuacaaggacuggagcuacuccggccagagcacccagcucgggaucgaguuccugaagcggggcgacaaguccgucuacuacacgagcaacccgaccaccuuccaccuggacggggaggugaucaccuucgacaaccucaagacgcugcugucccuccgcgaggugcggaccaucaaggucuucaccaccguggacaacaucaaccugcacacgcagguggucgacaugagcaugaccuacggccagcaguucggccccaccuaccuggacggggccgacgugaccaagaucaagccccacaacucccacgagggcaagacguucuacgugcucccgaacgacgacacccugcgcgucgaggccuucgaguacuaccacaccaccgaccccagcuuccuggggcgguacauguccgcccucaaccacacgaagaaguggaaguacccccaggugaacggccugaccagcaucaagugggcggacaacaacugcuaccuggccaccgcccuccugacccugcagcagaucgagcucaaguucaaccccccggcccugcaggacgcguacuaccgcgcccgggccggggaggccgccaacuucugcgcgcugauccucgccuacugcaacaagacggugggcgagcugggcgacguccgcgagaccauguccuaccuguuccagcacgccaaccucgacagcugcaagcgggugcugaacgucgugugcaagaccugcgggcagcagcagaccacccugaagggcguggaggccgucauguacauggggacgcucuccuacgagcaguucaagaagggcgugcagauccccugcaccugcgggaagcaggccaccaaguaccuggugcagcaggagagccccuucgucaugauguccgcgcccccggcccaguacgagcugaagcacggcaccuucacgugcgccagcgaguacaccggcaacuaccagugcgggcacuacaagcacaucaccuccaaggagacccucuacugcaucgacggcgcccugcugacgaagagcagcgaguacaaggggcccaucaccgacguguucuacaaggagaacuccuacaccaccacgaucaagcccgugaccuacaagcucgacggcgucgugugcaccgagaucgaccccaagcuggacaacuacuacaagaaggacaacagcuacuucaccgagcagccgaucgaccuggugcccaaccagcccuaccccaacgccuccuucgacaacuucaaguucgucugcgacaacaucaaguucgcggacgaccucaaccagcugacgggguacaagaagccggccagccgcgagcugaaggugaccuucuuccccgaccucaacggcgacguggucgccaucgacuacaagcacuacacccccuccuucaagaagggcgccaagcugcugcacaagcccaucguguggcacgugaacaacgcgaccaacaaggccacguacaagccgaacaccuggugcauccggugccucuggagcaccaagcccgucgagaccuccaacagcuucgacgugcugaaguccgaggacgcccaggggauggacaaccuggccugcgaggaccucaagcccgugagcgaggaggucguggagaaccccacgauccagaaggacgugcuggagugcaacgucaagaccaccgagguggugggcgacaucauccugaagccggccaacaacucccucaagaucaccgaggaggucgggcacacggaccugauggcggccuacguggacaacagcucccugaccaucaagaagcccaacgagcucagccgcgugcugggccugaagacccucgccacccacgggcuggccgccgucaacuccgugcccugggacacgaucgcgaacuacgccaagccguuccugaacaagguggucagcaccaccaccaacaucgugacgcgcugccucaaccgggugugcaccaacuacaugcccuacuucuucacccugcugcuccagcugugcaccuucacccgcuccacgaacagccggaucaaggccuccaugcccaccaccaucgccaagaacaccgucaagagcgugggcaaguucugccuggaggccagcuucaacuaccucaagucccccaacuucagcaagcugaucaacaucaucaucugguuccugcuccuguccgugugccugggcagccucaucuacuccacggcggcccuggggguccugaugagcaaccucggcaugccguccuacugcaccggguaccgcgagggcuaccugaacagcaccaacgugaccaucgccacguacugcaccggcuccauccccugcagcgugugccuguccgggcucgacagccuggacaccuaccccucccuggagaccauccagaucacgaucagcuccuucaagugggaccucaccgccuucggccuggucgccgagugguuccuggcguacauccucuucacccgguucuucuacgugcuggggcuggccgccaucaugcagcucuucuucagcuacuucgccgugcacuucaucuccaacagcuggcugauguggcugaucaucaaccugguccagauggcgcccaucuccgccauggugcgcauguacaucuucuucgccagcuucuacuacguguggaagagcuacguccacgugguggacggcugcaacuccagcaccugcaugaugugcuacaagcggaaccgcgccacgcgggucgagugcaccaccaucgugaacgggguccgccgguccuucuacguguacgccaacggcggcaagggguucugcaagcuccacaacuggaacugcgugaacugcgacaccuucugcgcgggcagcacguucaucuccgacgaggucgcccgcgaccugagccugcaguucaagcggccgaucaaccccaccgaccaguccagcuacaucguggacuccgugaccgucaagaacgggagcauccaccucuacuucgacaaggccggccagaagaccuacgagcgccacucccugagccacuucgugaaccuggacaaccuccgggccaacaacacgaaggggucccugcccaucaacgugaucgucuucgacggcaagagcaagugcgaggaguccagcgccaaguccgcgagcguguacuacucccagcugaugugccagcccauccuccugcuggaccaggcccucgugagcgacgucggcgacagcgccgagguggccgugaagauguucgacgccuacgucaacaccuucuccagcaccuucaacgugccgauggagaagcugaagacccugguggcgacggccgaggccgagcucgccaagaacgucucccuggacaacgugcugagcaccuucaucuccgcggcccgccagggguucguggacagcgacgucgagaccaaggacgugguggagugccucaagcugucccaccagagcgacaucgaggucaccggcgacuccugcaacaacuacaugcugacguacaacaagguggagaacaugaccccccgggaccucggggccugcaucgacugcagcgcccgccacaucaacgcccagguggcgaagucccacaacaucgcccugaucuggaacgucaaggacuucaugagccuguccgagcagcuccggaagcagauccgcagcgccgccaagaagaacaaccugcccuucaagcugaccugcgccaccacgcgccagguggugaacgucgugaccaccaagaucgcgcucaagggcggguga

SEQ ID NO: 18005 - RNA, 5841 nt, Artificial Sequence
  SARS-CoV-2__MT706386.1__non-structural protein 3 (NSP3) CDS gc
auggcccccaccaaggugaccuucggcgacgacacggucaucgaggugcagggguacaagagcgugaacaucaccuucgagcuggacgagcgcaucgacaagguccucaacgagaagugcuccgccuacaccguggagcugggcaccgaggugaacgaguucgcgugcgucguggccgacgccgugaucaagacgcugcagccggucagcgagcuccugaccccccuggggaucgaccucgacgagugguccauggccaccuacuaccuguucgacgagagcggcgaguucaagcuggccucccacauguacugcagcuucuacccccccgacgaggacgaggaggagggggacugcgaggaggaggaguucgagccguccacccaguacgaguacggcacggaggacgacuaccagggcaagccccucgaguucggggcgaccagcgccgcccugcagcccgaggaggagcaggaggaggacuggcuggacgacgacucccagcagaccgugggccagcaggacgggagcgaggacaaccagaccacgaccauccagaccaucguggagguccagccccagcucgagauggagcugaccccgguggugcagacgaucgaggucaacuccuucagcggcuaccugaagcucaccgacaacguguacaucaagaacgccgacaucguggaggaggcgaagaaggucaagcccaccgugguggucaacgccgccaacguguaccugaagcacgggggcggcguggccggggcccugaacaaggcgaccaacaacgccaugcaggucgaguccgacgacuacaucgccacgaacggcccccucaagguggggggcagcugcguccuguccggccacaaccuggccaagcacugccuccacgugguggggcccaacgucaacaagggcgaggacauccagcugcugaagagcgccuacgagaacuucaaccagcacgaggugcuccuggcgccgcugcucuccgccgggaucuucggcgccgaccccauccacagccugcgggugugcgucgacaccgugcgcaccaacguguaccuggccgucuucgacaagaaccucuacgacaagcugguguccagcuuccuggagaugaagagcgagaagcagguggagcagaagaucgccgagauccccaaggaggaggucaagcccuucaucaccgaguccaagccgagcguggagcagcggaagcaggacgacaagaagaucaaggcgugcguggaggaggucacgaccacccucgaggagaccaaguuccugacggagaaccugcuccuguacaucgacaucaacgggaaccugcaccccgacuccgccacccucgugagcgacaucgacaucaccuuccugaagaaggacgcccccuacaucgugggcgacgucgugcaggagggcgugcugaccgccgucgugauccccacgaagaaggccgggggcaccaccgagaugcucgcgaaggcccugcgcaaggugccgaccgacaacuacaucacgaccuaccccgggcagggccugaacggguacaccgucgaggaggccaagaccgugcucaagaagugcaaguccgccuucuacauccugcccagcaucaucuccaacgagaagcaggagauccugggcaccgugagcuggaaccuccgggagaugcuggcgcacgccgaggagacgcgcaagcugaugcccgucugcguggagaccaaggccaucguguccaccauccagcggaaguacaagggcaucaagauccaggagggggucguggacuacggcgcccgcuucuacuucuacaccagcaagacgaccguggccucccugaucaacacccucaacgaccugaacgagacccuggucacgaugccgcucggguacgugacccacggccugaaccuggaggaggcggcccgguacaugcgcagccucaaggugcccgccaccgucuccgugagcucccccgacgccgugaccgccuacaacggguaccugacgagcuccagcaagacccccgaggagcacuucaucgagaccaucucccuggcgggcagcuacaaggacuggagcuacuccggccagagcacccagcucggggucgaguuccugaagcggggcgacaaguccguguacuacacgagcaacccgaccaccuuccaccuggacggggaggugaucaccuucgacaaccucaagacgcugcugucccuccgcgagguccggaccaucaagguguucaccaccguggacaacaucaaccugcacacgcaggucguggacaugagcaugaccuacggccagcaguucggccccaccuaccuggacggggccgacgugaccaagaucaagccccacaacucccacgagggcaagacguucuacguccucccgaacgacgacacccugcgcguggaggccuucgaguacuaccacaccaccgaccccagcuuccuggggcgguacauguccgcccucaaccacacgaagaaguggaaguacccccaggugaacggccugaccagcaucaagugggccgacaacaacugcuaccuggcgaccgcccuccugacccugcagcagaucgagcucaaguucaaccccccggcccugcaggacgccuacuaccgcgcgcgggccggggaggccgccaacuucugcgcccugauccucgcguacugcaacaagacggucggcgagcugggcgacgugcgcgagaccauguccuaccuguuccagcacgccaaccucgacagcugcaagcggguccugaacguggugugcaagaccugcgggcagcagcagaccacccugaagggcgucgaggccgugauguacauggggacgcucuccuacgagcaguucaagaagggcgugcagauccccugcaccugcgggaagcaggccaccaaguaccugguccagcaggagagccccuucgugaugauguccgcccccccggcgcaguacgagcugaagcacggcaccuucacgugcgccagcgaguacaccggcaacuaccagugcgggcacuacaagcacaucaccuccaaggagacccucuacugcaucgacggcgcccugcugacgaagagcagcgaguacaaggggcccaucaccgacguguucuacaaggagaacuccuacaccaccacgaucaagcccgucaccuacaagcucgacggcguggugugcaccgagaucgaccccaagcuggacaacuacuacaagaaggacaacagcuacuucaccgagcagccgaucgaccugguccccaaccagcccuaccccaacgccuccuucgacaacuucaaguucgugugcgacaacaucaaguucgccgacgaccucaaccagcugacgggguacaagaagccggcgagccgcgagcugaaggugaccuucuuccccgaccucaacggcgacgucguggccaucgacuacaagcacuacacccccuccuucaagaagggcgccaagcugcugcacaagcccaucguguggcacgucaacaacgccaccaacaaggcgacguacaagccgaacaccuggugcauccggugccucuggagcaccaagcccguggagaccuccaacagcuucgacgugcugaaguccgaggacgcccaggggauggacaaccuggccugcgaggaccucaagcccgucagcgaggaggugguggagaaccccacgauccagaaggacguccuggagugcaacgugaagaccaccgagguggucggcgacaucauccugaagccggccaacaacucccucaagaucaccgaggagguggggcacacggaccugauggccgcguacguggacaacagcucccugaccaucaagaagcccaacgagcucagccgcguccugggccugaagacccucgccacccacgggcuggccgccgugaacuccgugcccugggacacgaucgccaacuacgcgaagccguuccugaacaaggucgugagcaccaccaccaacaucgugacgcgcugccucaaccgggucugcaccaacuacaugcccuacuucuucacccugcugcuccagcugugcaccuucacccgcuccacgaacagccggaucaaggccuccaugcccaccaccaucgccaagaacaccgugaagagcgugggcaaguucugccuggaggccagcuucaacuaccucaagucccccaacuucagcaagcugaucaacaucaucaucugguuccugcuccuguccgucugccugggcagccucaucuacuccacggccgcgcugggggugcugaugagcaaccucggcaugccguccuacugcaccggguaccgcgagggcuaccugaacagcaccaacgugaccaucgccacguacugcaccggcuccauccccugcagcgucugccuguccgggcucgacagccuggacaccuaccccucccuggagaccauccagaucacgaucagcuccuucaagugggaccucaccgccuucggccugguggccgagugguuccuggccuacauccucuucacccgguucuucuacgugcuggggcuggcggccaucaugcagcucuucuucagcuacuucgccguccacuucaucuccaacagcuggcugauguggcugaucaucaaccuggugcagauggcccccaucuccgcgauggugcgcauguacaucuucuucgccagcuucuacuacgucuggaagagcuacgugcacguggucgacggcugcaacuccagcaccugcaugaugugcuacaagcggaaccgcgccacgcggguggagugcaccaccaucgucaacggggugcgccgguccuucuacguguacgccaacggcggcaagggguucugcaagcuccacaacuggaacugcgucaacugcgacaccuucugcgccggcagcacguucaucuccgacgagguggcgcgcgaccugagccugcaguucaagcggccgaucaaccccaccgaccaguccagcuacaucguggacuccgucaccgugaagaacgggagcauccaccucuacuucgacaaggccggccagaagaccuacgagcgccacucccugagccacuucgugaaccuggacaaccuccgggccaacaacacgaaggggucccugcccaucaacgucaucguguucgacggcaagagcaagugcgaggaguccagcgccaaguccgccagcguguacuacucccagcugaugugccagcccauccuccugcuggaccaggcgcucgucagcgacgugggcgacagcgccgagguggccgucaagauguucgacgccuacgugaacaccuucuccagcaccuucaacgugccgauggagaagcugaagacccuggucgccacggcggaggccgagcucgccaagaacgugucccuggacaacgugcugagcaccuucaucuccgccgcgcgccagggguucgucgacagcgacguggagaccaaggacguggucgagugccucaagcugucccaccagagcgacaucgaggugaccggcgacuccugcaacaacuacaugcugacguacaacaagguggagaacaugaccccccgggaccucggggccugcaucgacugcagcgcccgccacaucaacgcccaggucgccaagucccacaacaucgcgcugaucuggaacgugaaggacuucaugagccuguccgagcagcuccggaagcagauccgcagcgccgccaagaagaacaaccugcccuucaagcugaccugcgccaccacgcgccagguggucaacguggugaccaccaagaucgcccucaagggcggguga

SEQ ID NO: 18006 - RNA, 5841 nt, Artificial Sequence
  SARS-CoV-2__MT706389.1__non-structural protein 3 (NSP3) CDS gc
auggcccccaccaaggugaccuucggcgacgacacggucaucgaggugcagggguacaagagcgugaacaucaccuucgagcuggacgagcgcaucgacaagguccucaacgagaagugcuccgccuacaccguggagcugggcaccgaggugaacgaguucgcgugcgucguggccgacgccgugaucaagacgcugcagccggucagcgagcuccugaccccccuggggaucgaccucgacgagugguccauggccaccuacuaccuguucgacgagagcggcgaguucaagcuggccucccacauguacugcagcuucuacccccccgacgaggacgaggaggagggggacugcgaggaggaggaguucgagccguccacccaguacgaguacggcacggaggacgacuaccagggcaagccccucgaguucggggcgaccagcgccgcccugcagcccgaggaggagcaggaggaggacuggcuggacgacgacucccagcagaccgugggccagcaggacgggagcgaggacaaccagaccacgaccauccagaccaucguggagguccagccccagcucgagauggagcugaccccgguggugcagacgaucgaggucaacuccuucagcggcuaccugaagcucaccgacaacguguacaucaagaacgccgacaucguggaggaggcgaagaaggucaagcccaccgugguggucaacgccgccaacguguaccugaagcacgggggcggcguggccggggcccugaacaaggcgaccaacaacgccaugcaggucgaguccgacgacuacaucgccacgaacggcccccucaagguggggggcagcugcguccuguccggccacaaccuggccaagcacugccuccacgugguggggcccaacgucaacaagggcgaggacauccagcugcugaagagcgccuacgagaacuucaaccagcacgaggugcuccuggcgccgcugcucuccgccgggaucuucggcgccgaccccauccacagccugcgggugugcgucgacaccgugcgcaccaacguguaccuggccgucuucgacaagaaccucuacgacaagcugguguccagcuuccuggagaugaagagcgagaagcagguggagcagaagaucgccgagauccccaaggaggaggucaagcccuucaucaccgaguccaagccgagcguggagcagcggaagcaggacgacaagaagaucaaggcgugcguggaggaggucacgaccacccucgaggagaccaaguuccugacggagaaccugcuccuguacaucgacaucaacgggaaccugcaccccgacuccgccacccucgugagcgacaucgacaucaccuuccugaagaaggacgcccccuacaucgugggcgacgucgugcaggagggcgugcugaccgccgucgugauccccacgaagaaggccgggggcaccaccgagaugcucgcgaaggcccugcgcaaggugccgaccgacaacuacaucacgaccuaccccgggcagggccugaacggguacaccgucgaggaggccaagaccgugcucaagaagugcaaguccgccuucuacauccugcccagcaucaucuccaacgagaagcaggagauccugggcaccgugagcuggaaccuccgggagaugcuggcgcacgccgaggagacgcgcaagcugaugcccgucugcguggagaccaaggccaucguguccaccauccagcggaaguacaagggcaucaagauccaggagggggucguggacuacggcgcccgcuucuacuucuacaccagcaagacgaccguggccucccugaucaacacccucaacgaccugaacgagacccuggucacgaugccgcucggguacgugacccacggccugaaccuggaggaggcggcccgguacaugcgcagccucaaggugcccgccaccgucuccgugagcucccccgacgccgugaccgccuacaacggguaccugacgagcuccagcaagacccccgaggagcacuucaucgagaccaucucccuggcgggcagcuacaaggacuggagcuacuccggccagagcacccagcucggggucgaguuccugaagcggggcgacaaguccguguacuacacgagcaacccgaccaccuuccaccuggacggggaggugaucaccuucgacaaccucaagacgcugcugucccuccgcgagguccggaccaucaagguguucaccaccguggacaacaucaaccugcacacgcaggucguggacaugagcaugaccuacggccagcaguucggccccaccuaccuggacggggccgacgugaccaagaucaagccccacaacucccacgagggcaagacguucuacguccucccgaacgacgacacccugcgcguggaggccuucgaguacuaccacaccaccgaccccagcuuccuggggcgguacauguccgcccucaaccacacgaagaaguggaaguacccccaggugaacggccugaccagcaucaagugggccgacaacaacugcuaccuggcgaccgcccuccugacccugcagcagaucgagcucaaguucaaccccccggcccugcaggacgccuacuaccgcgcgcgggccggggaggccgccaacuucugcgcccugauccucgcguacugcaacaagacggucggcgagcugggcgacgugcgcgagaccauguccuaccuguuccagcacgccaaccucgacagcugcaagcggguccugaacguggugugcaagaccugcgggcagcagcagaccacccugaagggcgucgaggccgugauguacauggggacgcucuccuacgagcaguucaagaagggcgugcagauccccugcaccugcgggaagcaggccaccaaguaccugguccagcaggagagccccuucgugaugauguccgcccccccggcgcaguacgagcugaagcacggcaccuucacgugcgccagcgaguacaccggcaacuaccagugcgggcacuacaagcacaucaccuccaaggagacccucuacugcaucgacggcgcccugcugacgaagagcagcgaguacaaggggcccaucaccgacguguucuacaaggagaacuccuacaccaccacgaucaagcccgucaccuacaagcucgacggcguggugugcaccgagaucgaccccaagcuggacaacuacuacaagaaggacaacagcuacuucaccgagcagccgaucgaccugguccccaaccagcccuaccccaacgccuccuucgacaacuucaaguucgugugcgacaacaucaaguucgccgacgaccucaaccagcugacgggguacaagaagccggcgagccgcgagcugaaggugaccuucuuccccgaccucaacggcgacgucguggccaucgacuacaagcacuacacccccuccuucaagaagggcgccaagcugcugcacaagcccaucguguggcacgucaacaacgccaccaacaaggcgacguacaagccgaacaccuggugcauccggugccucuggagcaccaagcccguggagaccuccaacagcuucgacgugcugaaguccgaggacgcccaggggauggacaaccuggccugcgaggaccucaagcccgucagcgaggaggugguggagaaccccacgauccagaaggacguccuggagugcaacgugaagaccaccgagguggucggcgacaucauccugaagccggccaacaacucccucaagaucaccgaggagguggggcacacggaccugauggccgcguacguggacaacagcucccugaccaucaagaagcccaacgagcucagccgcguccugggccugaagacccucgccacccacgggcuggccgccgugaacuccgugcccugggacacgaucgccaacuacgcgaagccguuccugaacaaggucgugagcaccaccaccaacaucgugacgcgcugccucaaccgggucugcaccaacuacaugcccuacuucuucacccugcugcuccagcugugcaccuucacccgcuccacgaacagccggaucaaggccuccaugcccaccaccaucgccaagaacaccgugaagagcgugggcaaguucugccuggaggccagcuucaacuaccucaagucccccaacuucagcaagcugaucaacaucaucaucugguuccugcuccuguccgucugccugggcagccucaucuacuccacggccgcgcugggggugcugaugagcaaccucggcaugccguccuacugcaccggguaccgcgagggcuaccugaacagcaccaacgugaccaucgccacguacugcaccggcuccauccccugcagcgucugccuguccgggcucgacagccuggacaccuaccccucccuggagaccauccagaucacgaucagcuccuucaagugggaccucaccgccuucggccugguggccgagugguuccuggccuacauccucuucacccgguucuucuacgugcuggggcuggcggccaucaugcagcucuucuucagcuacuucgccguccacuucaucuccaacagcuggcugauguggcugaucaucaaccuggugcagauggcccccaucuccgcgauggugcgcauguacaucuucuucgccagcuucuacuacgucuggaagagcuacgugcacguggucgacggcugcaacuccagcaccugcaugaugugcuacaagcggaaccgcgccacgcggguggagugcaccaccaucgucaacggggugcgccgguccuucuacguguacgccaacggcggcaagggguucugcaagcuccacaacuggaacugcgucaacugcgacaccuucugcgccggcagcacguucaucuccgacgagguggcgcgcgaccugagccugcaguucaagcggccgaucaaccccaccgaccaguccagcuacaucguggacuccgucaccgugaagaacgggagcauccaccucuacuucgacaaggccggccagaagaccuacgagcgccacucccugagccacuucgugaaccuggacaaccuccgggccaacaacacgaaggggucccugcccaucaacgucaucguguucgacggcaagagcaagugcgaggaguccagcgccaaguccgccagcguguacuacucccagcugaugugccagcccauccuccugcuggaccaggcgcucgucagcgacgugggcgacagcgccgagguggccgucaagauguucgacgccuacgugaacaccuucuccagcaccuucaacgugccgauggagaagcugaagacccuggucgccacggcggaggccgagcucgccaagaacgugucccuggacaacgugcugagcaccuucaucuccgccgcgcgccagggguucgucgacagcgacguggagaccaaggacguggucgagugccucaagcugucccaccagagcgacaucgaggugaccggcgacuccugcaacaacuacaugcugacguacaacaagguggagaacaugaccccccgggaccucggggccugcaucgacugcagcgcccgccacaucaacgcccaggucgccaagucccacaacaccgcgcugaucuggaacgugaaggacuucaugagccuguccgagcagcuccggaagcagauccgcagcgccgccaagaagaacaaccugcccuucaagcugaccugcgccacgacccgccagguggucaacguggugaccaccaagaucgcccucaagggcggguga

SEQ ID NO: 18007 - RNA, 5841 nt, Artificial Sequence
  SARS-CoV-2__MT706390.1__non-structural protein 3 (NSP3) CDS gc
auggcccccaccaaggugaccuucggcgacgacacggucaucgaggugcagggguacaagagcgugaacaucaccuucgagcuggacgagcgcaucgacaagguccucaacgagaagugcuccgccuacaccguggagcugggcaccgaggugaacgaguucgcgugcgucguggccgacgccgugaucaagacgcugcagccggucagcgagcuccugaccccccuggggaucgaccucgacgagugguccauggccaccuacuaccuguucgacgagagcggcgaguucaagcuggccucccacauguacugcagcuucuacccccccgacgaggacgaggaggagggggacugcgaggaggaggaguucgagccguccacccaguacgaguacggcacggaggacgacuaccagggcaagccccucgaguucggggcgaccagcgccgcccugcagcccgaggaggagcaggaggaggacuggcuggacgacgacucccagcagaccgugggccagcaggacgggagcgaggacaaccagaccacgaccauccagaccaucguggagguccagccccagcucgagauggagcugaccccgguggugcagacgaucgaggucaacuccuucagcggcuaccugaagcucaccgacaacguguacaucaagaacgccgacaucguggaggaggcgaagaaggucaagcccaccgugguggucaacgccgccaacguguaccugaagcacgggggcggcguggccggggcccugaacaaggcgaccaacaacgccaugcaggucgaguccgacgacuacaucgccacgaacggcccccucaagguggggggcagcugcguccuguccggccacaaccuggccaagcacugccuccacgugguggggcccaacgucaacaagggcgaggacauccagcugcugaagagcgccuacgagaacuucaaccagcacgaguuccuccuggcgccgcugcucuccgccgggaucuucggcgccgaccccauccacagccugcgggugugcguggacaccguccgcaccaacguguaccuggccguguucgacaagaaccucuacgacaagcuggucuccagcuuccuggagaugaagagcgagaagcagguggagcagaagaucgccgagauccccaaggaggaggugaagcccuucaucaccgaguccaagccgagcgucgagcagcggaagcaggacgacaagaagaucaaggcgugcguggaggaggugacgaccacccucgaggagaccaaguuccugacggagaaccugcuccuguacaucgacaucaacgggaaccugcaccccgacuccgccacccucgucagcgacaucgacaucaccuuccugaagaaggacgcccccuacaucgugggcgacgugguccaggagggcgugcugaccgccguggucauccccacgaagaaggccgggggcaccaccgagaugcucgcgaaggcccugcgcaaggugccgaccgacaacuacaucacgaccuaccccgggcagggccugaacggguacaccguggaggaggccaagaccguccucaagaagugcaaguccgccuucuacauccugcccagcaucaucuccaacgagaagcaggagauccugggcaccgugagcuggaaccuccgggagaugcuggcgcacgccgaggagacgcgcaagcugaugcccgugugcgucgagaccaaggccaucguguccaccauccagcggaaguacaagggcaucaagauccaggaggggguggucgacuacggcgcccgcuucuacuucuacaccagcaagacgaccguggccucccugaucaacacccucaacgaccugaacgagacccuggugacgaugccgcucggguacgucacccacggccugaaccuggaggaggcggcccgguacaugcgcagccucaaggugcccgccaccguguccgucagcucccccgacgccgugaccgccuacaacggguaccugacgagcuccagcaagacccccgaggagcacuucaucgagaccaucucccuggcgggcagcuacaaggacuggagcuacuccggccagagcacccagcucgggguggaguuccugaagcggggcgacaaguccgucuacuacacgagcaacccgaccaccuuccaccuggacggggaggugaucaccuucgacaaccucaagacgcugcugucccuccgcgaggugcggaccaucaaggucuucaccaccguggacaacaucaaccugcacacgcagguggucgacaugagcaugaccuacggccagcaguucggccccaccuaccuggacggggccgacgugaccaagaucaagccccacaacucccacgagggcaagacguucuacgugcucccgaacgacgacacccugcgcgucgaggccuucgaguacuaccacaccaccgaccccagcuuccuggggcgguacauguccgcccucaaccacacgaagaaguggaaguacccccaggugaacggccugaccagcaucaagugggccgacaacaacugcuaccuggcgaccgcccuccugacccugcagcagaucgagcucaaguucaaccccccggcccugcaggacgccuacuaccgcgcgcgggccggggaggccgccaacuucugcgcccugauccucgcguacugcaacaagacggugggcgagcugggcgacguccgcgagaccauguccuaccuguuccagcacgccaaccucgacagcugcaagcgggugcugaacgucgugugcaagaccugcgggcagcagcagaccacccugaagggcguggaggccgucauguacauggggacgcucuccuacgagcaguucaagaagggcgugcagauccccugcaccugcgggaagcaggccaccaaguaccuggugcagcaggagagccccuucgucaugauguccgcccccccggcgcaguacgagcugaagcacggcaccuucacgugcgccagcgaguacaccggcaacuaccagugcgggcacuacaagcacaucaccuccaaggagacccucuacugcaucgacggcgcccugcugacgaagagcagcgaguacaaggggcccaucaccgacguguucuacaaggagaacuccuacaccaccacgaucaagcccgugaccuacaagcucgacggcgucgugugcaccgagaucgaccccaagcuggacaacuacuacaagaaggacaacagcuacuucaccgagcagccgaucgaccuggugcccaaccagcccuaccccaacgccuccuucgacaacuucaaguucgucugcgacaacaucaaguucgccgacgaccucaaccagcugacgggguacaagaagccggcgagccgcgagcugaaggugaccuucuuccccgaccucaacggcgacguggucgccaucgacuacaagcacuacacccccuccuucaagaagggcgccaagcugcugcacaagcccaucguguggcacgugaacaacgccaccaacaaggcgacguacaagccgaacaccuggugcauccggugccucuggagcaccaagcccgucgagaccuccaacagcuucgacgugcugaaguccgaggacgcccaggggauggacaaccuggccugcgaggaccucaagcccgugagcgaggaggucguggagaaccccacgauccagaaggacgugcuggagugcaacgucaagaccaccgagguggugggcgacaucauccugaagccggccaacaacucccucaagaucaccgaggaggucgggcacacggaccugauggccgcguacguggacaacagcucccugaccaucaagaagcccaacgagcucagccgcgugcugggccugaagacccucgccacccacgggcuggccgccgucaacuccgugcccugggacacgaucgccaacuacgcgaagccguuccugaacaagguggucagcaccaccaccaacaucgugacgcgcugccucaaccgggugugcaccaacuacaugcccuacuucuucacccugcugcuccagcugugcaccuucacccgcuccacgaacagccggaucaaggccuccaugcccaccaccaucgccaagaacaccgucaagagcgugggcaaguucugccuggaggccagcuucaacuaccucaagucccccaacuucagcaagcugaucaacaucaucaucugguuccugcuccuguccgugugccugggcagccucaucuacuccacggccgcgcuggggguccugaugagcaaccucggcaugccguccuacugcaccggguaccgcgagggcuaccugaacagcaccaacgugaccaucgccacguacugcaccggcuccauccccugcagcgugugccuguccgggcucgacagccuggacaccuaccccucccuggagaccauccagaucacgaucagcuccuucaagugggaccucaccgccuucggccuggucgccgagugguuccuggccuacauccucuucacccgguucuucuacgugcuggggcuggcggccaucaugcagcucuucuucagcuacuucgccgugcacuucaucuccaacagcuggcugauguggcugaucaucaaccugguccagauggcccccaucuccgcgauggugcgcauguacaucuucuucgccagcuucuacuacguguggaagagcuacguccacgugguggacggcugcaacuccagcaccugcaugaugugcuacaagcggaaccgcgccacgcgggucgagugcaccaccaucgugaacgggguccgccgguccuucuacguguacgccaacggcggcaagggguucugcaagcuccacaacuggaacugcgugaacugcgacaccuucugcgccggcagcacguucaucuccgacgaggucgcgcgcgaccugagccugcaguucaagcggccgaucaaccccaccgaccaguccagcuacaucguggacuccgugaccgucaagaacgggagcauccaccucuacuucgacaaggccggccagaagaccuacgagcgccacucccugagccacuucgugaaccuggacaaccuccgggccaacaacacgaaggggucccugcccaucaacgugaucgucuucgacggcaagagcaagugcgaggaguccagcgccaaguccgccagcguguacuacucccagcugaugugccagcccauccuccugcuggaccaggcgcucgugagcgacgucggcgacagcgccgagguggccgugaagauguucgacgccuacgucaacaccuucuccagcaccuucaacgugccgauggagaagcugaagacccugguggccacggcggaggccgagcucgccaagaacgucucccuggacaacgugcugagcaccuucaucuccgccgcgcgccagggguucguggacagcgacgucgagaccaaggacgugguggagugccucaagcugucccaccagagcgacaucgaggucaccggcgacuccugcaacaacuacaugcugacguacaacaagguggagaacaugaccccccgggaccucggggccugcaucgacugcagcgcccgccacaucaacgcccagguggccaagucccacaacaucgcgcugaucuggaacgucaaggacuucaugagccuguccgagcagcuccggaagcagauccgcagcgccgccaagaagaacaaccugcccuucaagcugaccugcgccaccacgcgccagguggugaacgucgugaccaccaagaucgcccucaagggcggguga

SEQ ID NO: 18008 - RNA, 5841 nt, Artificial Sequence
  SARS-CoV-2__MT706403.1__non-structural protein 3 (NSP3) CDS gc
auggcccccaccaaggugaccuucggcgacgacacggucaucgaggugcagggguacaagagcgugaacaucaccuucgagcuggacgagcgcaucgacaagguccucaacgagaagugcuccgccuacaccguggagcugggcaccgaggugaacgaguucgcgugcgucguggccgacgccgugaucaagacgcugcagccggucagcgagcuccugaccccccuggggaucgaccucgacgagugguccauggccaccuacuaccuguucgacgagagcggcgaguucaagcuggccucccacauguacugcagcuucuacccccccgacgaggacgaggaggagggggacugcgaggaggaggaguucgagccguccacccaguacgaguacggcacggaggacgacuaccagggcaagccccucgaguucggggcgaccagcgccgcccugcagcccgaggaggagcaggaggaggacuggcuggacgacgacucccagcagaccgugggccagcaggacgggagcgaggacaaccagaccacgaccauccagaccaucguggagguccagccccagcucgagauggagcugaccccgguggugcagacgaucgaggucaacuccuucagcggcuaccugaagcucaccgacaacguguacaucaagaacgccgacaucguggaggaggcgaagaaggucaagcccaccgugguggucaacgccgccaacguguaccugaagcacgggggcggcguggccggggcccugaacaaggcgaccaacaacgccaugcaggucgaguccgacgacuacaucgccacgaacggcccccucaagguggggggcagcugcguccuguccggccacaaccuggccaagcacugccuccacgugguggggcccaacgucaacaagggcgaggacauccaguuccugaagagcgccuacgagaacuucaaccagcacgaggugcugcucgcgccgcugcuguccgccgggaucuucggcgccgaccccauccacagccuccgggugugcgucgacaccgugcgcaccaacguguaccuggccgucuucgacaagaaccuguacgacaagcucguguccagcuuccuggagaugaagagcgagaagcagguggagcagaagaucgccgagauccccaaggaggaggucaagcccuucaucaccgaguccaagccgagcguggagcagcggaagcaggacgacaagaagaucaaggcgugcguggaggaggucacgaccacccuggaggagaccaaguuccucacggagaaccugcugcucuacaucgacaucaacgggaaccugcaccccgacuccgccacccuggugagcgacaucgacaucaccuuccucaagaaggacgcccccuacaucgugggcgacgucgugcaggagggcgugcugaccgccgucgugauccccacgaagaaggccgggggcaccaccgagaugcuggcgaaggcccuccgcaaggugccgaccgacaacuacaucacgaccuaccccgggcagggccugaacggguacaccgucgaggaggccaagaccgugcugaagaagugcaaguccgccuucuacauccuccccagcaucaucuccaacgagaagcaggagauccugggcaccgugagcuggaaccugcgggagaugcucgcgcacgccgaggagacgcgcaagcugaugcccgucugcguggagaccaaggccaucguguccaccauccagcggaaguacaagggcaucaagauccaggagggggucguggacuacggcgcccgcuucuacuucuacaccagcaagacgaccguggccucccugaucaacacccugaacgaccucaacgagacccuggucacgaugccgcugggguacgugacccacggccucaaccuggaggaggcggcccgguacaugcgcagccugaaggugcccgccaccgucuccgugagcucccccgacgccgugaccgccuacaacggguaccucacgagcuccagcaagacccccgaggagcacuucaucgagaccaucucccuggcgggcagcuacaaggacuggagcuacuccggccagagcacccagcuggggaucgaguuccucaagcggggcgacaaguccgucuacuacacgagcaacccgaccaccuuccaccuggacggggaggugaucaccuucgacaaccugaagacgcuccugucccugcgcgaggugcggaccaucaaggucuucaccaccguggacaacaucaaccuccacacgcagguggucgacaugagcaugaccuacggccagcaguucggccccaccuaccuggacggggccgacgugaccaagaucaagccccacaacucccacgagggcaagacguucuacgugcugccgaacgacgacacccuccgcgucgaggccuucgaguacuaccacaccaccgaccccagcuuccuggggcgguacauguccgcccugaaccacacgaagaaguggaaguacccccaggugaacggccucaccagcaucaagugggccgacaacaacugcuaccuggcgaccgcccugcucacccugcagcagaucgagcugaaguucaaccccccggcccuccaggacgccuacuaccgcgcgcgggccggggaggccgccaacuucugcgcccugauccuggcguacugcaacaagacggugggcgagcucggcgacguccgcgagaccauguccuaccuguuccagcacgccaaccuggacagcugcaagcgggugcucaacgucgugugcaagaccugcgggcagcagcagaccacccugaagggcguggaggccgucauguacauggggacgcuguccuacgagcaguucaagaagggcgugcagauccccugcaccugcgggaagcaggccaccaaguaccucgugcagcaggagagccccuucgucaugauguccgcccccccggcgcaguacgagcugaagcacggcaccuucacgugcgccagcgaguacaccggcaacuaccagugcgggcacuacaagcacaucaccuccaaggagacccuguacugcaucgacggcgcccuccugacgaagagcagcgaguacaaggggcccaucaccgacguguucuacaaggagaacuccuacaccaccacgaucaagcccgugaccuacaagcuggacggcgucgugugcaccgagaucgaccccaagcucgacaacuacuacaagaaggacaacagcuacuucaccgagcagccgaucgaccuggugcccaaccagcccuaccccaacgccuccuucgacaacuucaaguucgucugcgacaacaucaaguucgccgacgaccugaaccagcucacgggguacaagaagccggcgagccgcgagcugaaggugaccuucuuccccgaccugaacggcgacguggucgccaucgacuacaagcacuacacccccuccuucaagaagggcgccaagcuccugcacaagcccaucguguggcacgugaacaacgccaccaacaaggcgacguacaagccgaacaccuggugcauccggugccuguggagcaccaagcccgucgagaccuccaacagcuucgacgugcucaaguccgaggacgcccaggggauggacaaccuggccugcgaggaccugaagcccgugagcgaggaggucguggagaaccccacgauccagaaggacgugcucgagugcaacgucaagaccaccgagguggugggcgacaucauccugaagccggccaacaacucccugaagaucaccgaggaggucgggcacacggaccucauggccgcguacguggacaacagcucccugaccaucaagaagcccaacgagcugagccgcgugcucggccugaagacccuggccacccacgggcucgccgccgucaacuccgugcccugggacacgaucgccaacuacgcgaagccguuccugaacaagguggucagcaccaccaccaacaucgugacgcgcugccugaaccgggugugcaccaacuacaugcccuacuucuucacccuccugcugcagcucugcaccuucacccgcuccacgaacagccggaucaaggccuccaugcccaccaccaucgccaagaacaccgucaagagcgugggcaaguucugccuggaggccagcuucaacuaccugaagucccccaacuucagcaagcucaucaacaucaucaucugguuccugcugcucuccgugugccugggcagccugaucuacuccacggccgcgcucgggguccugaugagcaaccugggcaugccguccuacugcaccggguaccgcgagggcuaccucaacagcaccaacgugaccaucgccacguacugcaccggcuccauccccugcagcgugugccuguccgggcuggacagccucgacaccuaccccucccuggagaccauccagaucacgaucagcuccuucaagugggaccugaccgccuucggccucgucgccgagugguuccuggccuacauccuguucacccgguucuucuacgugcucgggcuggcggccaucaugcagcuguucuucagcuacuucgccgugcacuucaucuccaacagcuggcucauguggcugaucaucaaccugguccagauggcccccaucuccgcgauggugcgcauguacaucuucuucgccagcuucuacuacguguggaagagcuacguccacgugguggacggcugcaacuccagcaccugcaugaugugcuacaagcggaaccgcgccacgcgggucgagugcaccaccaucgugaacgggguccgccgguccuucuacguguacgccaacggcggcaagggguucugcaagcugcacaacuggaacugcgugaacugcgacaccuucugcgccggcagcacguucaucuccgacgaggucgcgcgcgaccucagccugcaguucaagcggccgaucaaccccaccgaccaguccagcuacaucguggacuccgugaccgucaagaacgggagcauccaccuguacuucgacaaggccggccagaagaccuacgagcgccacucccucagccacuucgugaaccuggacaaccugcgggccaacaacacgaaggggucccuccccaucaacgugaucgucuucgacggcaagagcaagugcgaggaguccagcgccaaguccgccagcguguacuacucccagcugaugugccagcccauccugcuccuggaccaggcgcuggugagcgacgucggcgacagcgccgagguggccgugaagauguucgacgccuacgucaacaccuucuccagcaccuucaacgugccgauggagaagcucaagacccugguggccacggcggaggccgagcuggccaagaacgucucccucgacaacgugcugagcaccuucaucuccgccgcgcgccagggguucguggacagcgacgucgagaccaaggacgugguggagugccugaagcucucccaccagagcgacaucgaggucaccggcgacuccugcaacaacuacaugcugacguacaacaagguggagaacaugaccccccgggaccugggggccugcaucgacugcagcgcccgccacaucaacgcccagguggccaagucccacaacaucgcgcucaucuggaacgucaaggacuucaugagccuguccgagcagcugcggaagcagauccgcagcgccgccaagaagaacaaccuccccuucaagcugaccugcgccaccacgcgccagguggugaacgucgugaccaccaagaucgcccugaagggcggguga

SEQ ID NO: 18009 - RNA, 5841 nt, Artificial Sequence
  SARS-CoV-2__MT706406.1__non-structural protein 3 (NSP3) CDS gc
auggcccccaccaaggugaccuucggcgacgacacggucaucgaggugcagggguacaagagcgugaacaucaccuucgagcuggacgagcgcaucgacaagguccucaacgagaagugcuccgccuacaccguggagcugggcaccgaggugaacgaguucgcgugcgucguggccgacgccgugaucaagacgcugcagccggucagcgagcuccugaccccccuggggaucgaccucgacgagugguccauggccaccuacuaccuguucgacgagagcggcgaguucaagcuggccucccacauguacugcagcuucuacccccccgacgaggacgaggaggagggggacugcgaggaggaggaguucgagccguccacccaguacgaguacggcacggaggacgacuaccagggcaagccccucgaguucggggcgaccagcgccgcccugcagcccgaggaggagcaggaggaggacuggcuggacgacgacucccagcagaccgugggccagcaggacgggagcgaggacaaccagaccacgaccauccagaccaucguggagguccagccccagcucgagauggagcugaccccgguggugcagacgaucgaggucaacuccuucagcggcuaccugaagcucaccgacaacguguacaucaagaacgccgacaucguggaggaggcgaagaaggucaagcccaccgugguggucaacgccgccaacguguaccugaagcacgggggcggcguggccggggcccugaacaaggcgaccaacaacgccaugcaggucgaguccgacgacuacaucgccacgaacggcccccucaagguggggggcagcugcguccuguccggccacaaccuggccaagcacugccuccacgugguggggcccaacgucaacaagggcgaggacauccagcugcugaagagcgccuacgagaacuucaaccagcacgaggugcuccuggcgccgcugcucuccgccgggaucuucggcgccgaccccauccacagccugcgggugugcgucgacaccgugcgcaccaacguguaccuggccgucuucgacaagaaccucuacgacaagcugguguccagcuuccuggagaugaagagcgagaagcagguggagcagaagaucgccgagauccccaaggaggaggucaagcccuucaucaccgaguccaagccgagcguggagcagcggaagcaggacgacaagaagaucaaggcgugcguggaggaggucacgaccacccucgaggagaccaaguuccugacggagaaccugcuccuguacaucgacaucaacgggaaccugcaccccgacuccgccacccucgugagcgacaucgacaucaccuuccugaagaaggacgcccccuacaucgugggcgacgucgugcaggagggcgugcugaccgccgucgugauccccacgaagaaggccgggggcaccaccgagaugcucgcgaaggcccugcgcaaggugccgaccgacaacuacaucacgaccuaccccgggcagggccugaacggguacaccgucgaggaggccaagaccgugcucaagaagugcaaguccgccuucuacauccugcccagcaucaucuccaacgagaagcaggagauccugggcaccgugagcuggaaccuccgggagaugcuggcgcacgccgaggagacgcgcaagcugaugcccgucugcguggagaccaaggccaucguguccaccauccagcggaaguacaagggcaucaagauccaggagggggucguggacuacggcgcccgcuucuacuucuacaccagcaagacgaccguggccucccugaucaacacccucaacgaccugaacgagacccuggucacgaugccgcucggguacgugacccacggccugaaccuggaggaggcggcccgguacaugcgcagccucaaggugcccgccaccgucuccgugagcucccccgacgccgugaccgccuacaacggguaccugacgagcuccagcaagacccccgaggagcacuucaucgagaccaucucccuggcgggcagcuacaaggacuggagcuacuccggccagagcacccagcucggggucgaguuccugaagcggggcgacaaguccguguacuacacgagcaacccgaccaccuuccaccuggacggggaggugaucaccuucgacaaccucaagacgcugcugucccuccgcgagguccggaccaucaagguguucaccaccguggacaacaucaaccugcacacgcaggucguggacaugagcaugaccuacggccagcaguucggccccaccuaccuggacggggccgacgugaccaagaucaagccccacaacucccacgagggcaagacguucuacguccucccgaacgacgacacccugcgcguggaggccuucgaguacuaccacaccaccgaccccagcuuccuggggcgguacauguccgcccucaaccacacgaagaaguggaaguacccccaggugaacggccugaccagcaucaagugggccgacaacaacugcuaccuggcgaccgcccuccugacccugcagcagaucgagcucaaguucaaccccccggcccugcaggacgccuacuaccgcgcgcgggccggggaggccgccaacuucugcgcccugauccucgcguacugcaacaagacggucggcgagcugggcgacgugcgcgagaccauguccuaccuguuccagcacgccaaccucgacagcugcaagcggguccugaacguggugugcaagaccugcgggcagcagcagaccacccugaagggcgucgaggccgugauguacauggggacgcucuccuacgagcaguucaagaagggcgugcagauccccugcaccugcgggaagcaggccaccaaguaccugguccagcaggagagccccuucgugaugauguccgcccccccggcgcaguacgagcugaagcacggcaccuucacgugcgccagcgaguacaccggcaacuaccagugcgggcacuacaagcacaucaccuccaaggagacccucuacugcaucgacggcgcccugcugacgaagagcagcgaguacaaggggcccaucaccgacguguucuacaaggagaacuccuacaccaccacgaucaagcccgucaccuacaagcucgacggcguggugugcaccgagaucgaccccaagcuggacaacuacuacaagaaggacaacagcuacuucaccgagcagccgaucgaccugguccccaaccagcccuaccccaacgccuccuucgacaacuucaaguucgugugcgacaacaucaaguucgccgacgaccucaaccagcugacgggguacaagaagccggcgagccgcgagcugaaggugaccuucuuccccgaccucaacggcgacgucguggccaucgacuacaagcacuacacccccuccuucaagaagggcgccaagcugcugcacaagcccaucguguggcacgucaacaacgccaccaacaaggcgacguacaagccgaacaccuggugcauccggugccucuggagcaccaagcccguggagaccuccaacagcuucgacgugcugaaguccgaggacgcccaggggauggacaaccuggccugcgaggaccucaagcccgucagcgaggaggugguggagaaccccacgauccagaaggacguccuggagugcaacgugaagaccaccgagguggucggcgacaucauccugaagccggccaacaacucccucaagaucaccgaggagguggggcacacggaccugauggccgcguacguggacaacagcucccugaccaucaagaagcccaacgagcucagccgcguccugggccugaagacccucgccacccacgggcuggccgccgugaacuccgugcccugggacacgaucgccaacuacgcgaagccguuccugaacaaggucgugagcaccaccaccaacaucgugacgcgcugccucaaccgggucugcaccaacuacaugcccuacuucuucacccugcugcuccagcugugcaccuucacccgcuccacgaacagccggaucaaggccuccaugcccaccaccaucgccaagaacaccgugaagagcgugggcaaguucugccuggaggccagcuucaacuaccucaagucccccaacuucagcaagcugaucaacaucaucaucugguuccugcuccuguccgucugccugggcagccucaucuacuccacggccgcgcugggggugcugaugagcaaccucggcaugccguccuacugcaccggguaccgcgagggcuaccugaacagcaccaacgugaccaucgccacguacugcaccggcuccauccccugcagcgucugccuguccgggcucgacagccuggacaccuaccccucccuggagaccauccagaucacgaucagcuccuucaagugggaccucaccgccuucggccugguggccgagugguuccuggccuacauccucuucacccgguucuucuacgugcuggggcuggcggccaucaugcagcucuucuucagcuacuucgccguccacuucaucuccaacagcuggcugauguggcugaucaucaaccuggugcagauggcccccaucuccgcgauggugcgcauguacaucuucuucgccagcuucuacuacgucuggaagagcuacgugcacguggucgacggcugcaacuccagcaccugcaugaugugcuacaagcggaaccgcgccacgcggguggagugcaccaccaucgucaacggggugcgccgguccuucuacguguacgccaacggcggcaagggguucugcaagcuccacaacuggaacugcgucaacugcgacaccuucugcgccggcagcacguucaucuccgacgagguggcgcgcgaccugagccugcaguucaagcggccgaucaaccccaccgaccaguccuucuacaucguggacagcgucaccgugaagaacggguccauccaccucuacuucgacaaggccggccagaagaccuacgagcgccacagccugucccacuucgugaaccuggacaaccuccgggccaacaacacgaaggggagccugcccaucaacgucaucguguucgacggcaaguccaagugcgaggagagcuccgccaagagcgccuccguguacuacagccagcugaugugccagcccauccuccugcuggaccaggcgcucgucuccgacgugggcgacagcgccgagguggccgucaagauguucgacgccuacgugaacaccuucagcuccaccuucaacgugccgauggagaagcugaagacccuggucgccacggcggaggccgagcucgccaagaacgugagccuggacaacgugcuguccaccuucaucagcgccgcgcgccagggguucgucgacuccgacguggagaccaaggacguggucgagugccucaagcugagccaccaguccgacaucgaggugaccggcgacagcugcaacaacuacaugcugacguacaacaagguggagaacaugaccccccgggaccucggggccugcaucgacugcuccgcccgccacaucaacgcccaggucgccaagagccacaacaucgcgcugaucuggaacgugaaggacuucaugucccugagcgagcagcuccggaagcagauccgcuccgccgccaagaagaacaaccugcccuucaagcugaccugcgccaccacgcgccagguggucaacguggugaccaccaagaucgcccucaagggcggguga

SEQ ID NO: 18010 - RNA, 5841 nt, Artificial Sequence
  SARS-CoV-2__MT706427.1__non-structural protein 3 (NSP3) CDS gc
auggcccccaccaaggugaccuucggcgacgacacggucaucgaggugcagggguacaagagcgugaacaucaccuucgagcuggacgagcgcaucgacaagguccucaacgagaagugcuccgccuacaccguggagcugggcaccgaggugaacgaguucgcgugcgucguggccgacgccgugaucaagacgcugcagccggucagcgagcuccugaccccccuggggaucgaccucgacgagugguccauggccaccuacuaccuguucgacgagagcggcgaguucaagcuggccucccacauguacugcagcuucuacccccccgacgaggacgaggaggagggggacugcgaggaggaggaguucgagccguccacccaguacgaguacggcacggaggacgacuaccagggcaagccccucgaguucggggcgaccagcgccgcccugcagcccgaggaggagcaggaggaggacuggcuggacgacgacucccagcagaccgugggccagcaggacgggagcgaggacaaccagaccacgaccauccagaccaucguggagguccagccccagcucgagauggagcugaccccgguggugcagacgaucgaggucaacuccuucagcggcuaccugaagcucaccgacaacguguacaucaagaacgccgacaucguggaggaggcgaagaaggucaagcccaccgugguggucaacgccgccaacguguaccugaagcacgggggcggcguggccggggcccugaacaaggcgaccaacaacgccaugcaggucgaguccgacgacuacaucgccacgaacggcccccucaagguggggggcagcugcguccuguccggccacaaccuggccaagcacugccuccacgugguggggcccaacgucaacaagggcgaggacauccagcugcugaagagcgccuacgagaacuucaaccagcacgaggugcuccuggcgccgcugcucuccgccgggaucuucggcgccgaccccauccacagccugcgggugugcgucgacaccgugcgcaccaacguguaccuggccgucuucgacaagaaccucuacgacaagcugguguccagcuuccuggagaugaagagcgagaagcagguggagcagaacaucgccgagauccccaaggaggaggucaagcccuucaucaccgaguccaagccgagcguggagcagcggaagcaggacgacaagaagaucaaggcgugcguggaggaggucacgaccacccucgaggagaccaaguuccugacggagaaccugcuccuguacaucgacaucaacgggaaccugcaccccgacuccgccacccucgugagcgacaucgacaucaccuuccugaagaaggacgcccccuacaucgugggcgacgucgugcaggagggcgugcugaccgccgucgugauccccacgaagaaggccgggggcaccaccgagaugcucgcgaaggcccugcgcaagguguccaccgacaacuacaucacgaccuacccggggcagggccugaacggguacaccgucgaggaggccaagaccgugcucaagaagugcaagagcgccuucuacauccugcccuccaucaucagcaacgagaagcaggagauccugggcaccguguccuggaaccuccgggagaugcuggcgcacgccgaggagacgcgcaagcugaugcccgucugcguggagaccaaggccaucgugagcaccauccagcggaaguacaagggcaucaagauccaggagggggucguggacuacggcgcccgcuucuacuucuacaccuccaagacgaccguggccagccugaucaacacccucaacgaccugaacgagacccuggucacgaugccccucggguacgugacccacggccugaaccuggaggaggcggcccgguacaugcgcucccucaaggugccggccaccgucagcguguccagccccgacgccgugaccgccuacaacggguaccugacguccagcuccaagacccccgaggagcacuucaucgagaccaucagccuggcgggcagcuacaaggacugguccuacagcggccaguccacccagcucgggaucgaguuccugaagcggggcgacaagagcgucuacuacacguccaaccccaccaccuuccaccuggacggggaggugaucaccuucgacaaccucaagacgcugcugagccuccgcgaggugcggaccaucaaggucuucaccaccguggacaacaucaaccugcacacgcagguggucgacauguccaugaccuacggccagcaguucggcccgaccuaccuggacggggccgacgugaccaagaucaagccccacaacagccacgagggcaagacguucuacgugcuccccaacgacgacacccugcgcgucgaggccuucgaguacuaccacaccaccgacccguccuuccuggggcgguacaugagcgcccucaaccacacgaagaaguggaaguacccccaggugaacggccugaccuccaucaagugggccgacaacaacugcuaccuggcgaccgcccuccugacccugcagcagaucgagcucaaguucaacccccccgcccugcaggacgccuacuaccgcgcgcgggccggggaggccgccaacuucugcgcccugauccucgcguacugcaacaagacggugggcgagcugggcgacguccgcgagaccaugagcuaccuguuccagcacgccaaccucgacuccugcaagcgggugcugaacgucgugugcaagaccugcgggcagcagcagaccacccugaagggcguggaggccgucauguacauggggacgcucagcuacgagcaguucaagaagggcgugcagaucccgugcaccugcgggaagcaggccaccaaguaccuggugcagcaggagucccccuucgucaugaugagcgccccccccgcgcaguacgagcugaagcacggcaccuucacgugcgccuccgaguacaccggcaacuaccagugcgggcacuacaagcacaucaccagcaaggagacccucuacugcaucgacggcgcccugcugacgaagagcuccgaguacaaggggccgaucaccgacguguucuacaaggagaacagcuacaccaccacgaucaagcccgugaccuacaagcucgacggcgucgugugcaccgagaucgaccccaagcuggacaacuacuacaagaaggacaacuccuacuucaccgagcagcccaucgaccuggugccgaaccagcccuaccccaacgccagcuucgacaacuucaaguucgucugcgacaacaucaaguucgccgacgaccucaaccagcugacgggguacaagaagcccgcgucccgcgagcugaaggugaccuucuucccggaccucaacggcgacguggucgccaucgacuacaagcacuacacccccagcuucaagaagggcgccaagcugcugcacaagcccaucguguggcacgugaacaacgccaccaacaaggcgacguacaagcccaacaccuggugcauccggugccucugguccaccaagccggucgagaccagcaacuccuucgacgugcugaagagcgaggacgcccaggggauggacaaccuggccugcgaggaccucaagcccguguccgaggaggucguggagaaccccacgauccagaaggacgugcuggagugcaacgucaagaccaccgagguggugggcgacaucauccugaagcccgccaacaacagccucaagaucaccgaggaggucgggcacacggaccugauggccgcguacguggacaacuccagccugaccaucaagaagccgaacgagcucucccgcgugcugggccugaagacccucgccacccacgggcuggccgccgucaacagcgugcccugggacacgaucgccaacuacgcgaagcccuuccugaacaagguggucuccaccaccaccaacaucgugacgcgcugccucaaccgggugugcaccaacuacaugccguacuucuucacccugcugcuccagcugugcaccuucacccgcagcacgaacucccggaucaaggccagcaugcccaccaccaucgccaagaacaccgucaagagcgugggcaaguucugccuggaggccuccuucaacuaccucaagagccccaacuucuccaagcugaucaacaucaucaucugguuccugcuccugagcgugugccugggcucccucaucuacagcacggccgcgcuggggguccugauguccaaccucggcaugcccagcuacugcaccggguaccgcgagggcuaccugaacuccaccaacgugaccaucgccacguacugcaccggcagcaucccgugcuccgugugccugagcgggcucgacucccuggacaccuaccccagccuggagaccauccagaucacgaucuccagcuucaagugggaccucaccgccuucggccuggucgccgagugguuccuggccuacauccucuucacccgguucuucuacgugcuggggcuggcggccaucaugcagcucuucuucuccuacuucgccgugcacuucaucagcaacuccuggcugauguggcugaucaucaaccugguccagauggcccccaucagcgcgauggugcgcauguacaucuucuucgccagcuucuacuacguguggaaguccuacguccacgugguggacggcugcaacagcuccaccugcaugaugugcuacaagcggaaccgcgccacgcgggucgagugcaccaccaucgugaacgggguccgccggagcuucuacguguacgccaacggcggcaagggguucugcaagcuccacaacuggaacugcgugaacugcgacaccuucugcgccggcuccacguucaucagcgacgaggucgcgcgcgaccugucccugcaguucaagcggcccaucaacccgaccgaccagagcuccuacaucguggacagcgugaccgucaagaacggguccauccaccucuacuucgacaaggccggccagaagaccuacgagcgccacagccugucccacuucgugaacuucgacaaccugcgggccaacaacacgaaggggagccuccccaucaacgugaucgucuucgacggcaaguccaagugcgaggagagcuccgccaagagcgccuccguguacuacagccagcugaugugccagcccauccugcuccuggaccaggcgcuggugagcgacgucggcgacuccgccgagguggccgugaagauguucgacgccuacgucaacaccuucagcuccaccuucaacgugcccauggagaagcucaagacccugguggccacggcggaggccgagcuggccaagaacgucagccucgacaacgugcuguccaccuucaucagcgccgcgcgccagggguucguggacuccgacgucgagaccaaggacgugguggagugccugaagcucagccaccaguccgacaucgaggucaccggcgacagcugcaacaacuacaugcugacguacaacaagguggagaacaugaccccgcgggaccugggggccugcaucgacugcuccgcccgccacaucaacgcccagguggccaagagccacaacaucgcgcucaucuggaacgucaaggacuucaugucccugagcgagcagcugcggaagcagauccgcuccgccgccaagaagaacaaccuccccuucaagcugaccugcgccaccacgcgccagguggugaacgucgugaccaccaagaucgcccugaagggcggguga

SEQ ID NO: 18011 - RNA, 5841 nt, Artificial Sequence
  SARS-CoV-2__MT709104.1__non-structural protein 3 (NSP3) CDS gc
auggcccccaccaaggugaccuucggcgacgacacggucaucgaggugcagggguacaagagcgugaacaucaccuucgagcuggacgagcgcaucgacaagguccucaacgagaagugcuccgccuacaccguggagcugggcaccgaggugaacgaguucgcgugcgucguggccgacgccgugaucaagacgcugcagccggucagcgagcuccugaccccccuggggaucgaccucgacgagugguccauggccaccuacuaccuguucgacgagagcggcgaguucaagcuggccucccacauguacugcagcuucuacccccccgacgaggacgaggaggagggggacugcgaggaggaggaguucgagccguccacccaguacgaguacggcacggaggacgacuaccagggcaagccccucgaguucggggcgaccagcgccgcccugcagcccgaggaggagcaggaggaggacuggcuggacgacgacucccagcagaccgugggccagcaggacgggagcgaggacaaccagaccacgaccauccagaccaucguggagguccagccccagcucgagauggagcugaccccgguggugcagacgaucgaggucaacuccuucagcggcuaccugaagcucaccgacaacguguacaucaagaacgccgacaucguggaggaggcgaagaagaucaagcccaccgucguggugaacgccgccaacgucuaccugaagcacgggggcggcguggccggggcccugaacaaggcgaccaacaacgccaugcagguggaguccgacgacuacaucgccacgaacggcccccucaaggucgggggcagcugcgugcuguccggccacaaccuggccaagcacugccuccacgucguggggcccaacgugaacaagggcgaggacauccagcugcugaagagcgccuacgagaacuucaaccagcacgagguccuccuggcgccgcugcucuccgccgggaucuucggcgccgaccccauccacagccugcgggugugcguggacaccguccgcaccaacguguaccuggccguguucgacaagaaccucuacgacaagcuggucuccagcuuccuggagaugaagagcgagaagcagguggagcagaacaucgccgagauccccaaggaggaggugaagcccuucaucaccgaguccaagccgagcgucgagcagcggaagcaggacgacaagaagaucaaggcgugcguggaggaggugacgaccacccucgaggagaccaaguuccugacggagaaccugcuccuguacaucgacaucaacgggaaccugcaccccgacuccgccacccucgucagcgacaucgacaucaccuuccugaagaaggacgcccccuacaucgugggcgacgugguccaggagggcgugcugaccgccguggucauccccacgaagaaggccgggggcaccaccgagaugcucgcgaaggcccugcgcaaggugccgaccgacaacuacaucacgaccuaccccgggcagggccugaacggguacaccguggaggaggccaagaccguccucaagaagugcaaguccgccuucuacauccugcccagcaucaucuccaacgagaagcaggagauccugggcaccgugagcuggaaccuccgggagaugcuggcgcacgccgaggagacgcgcaagcugaugcccgugugcgucgagaccaaggccaucguguccaccauccagcggaaguacaagggcaucaagauccaggaggggguggucgacuacggcgcccgcuucuacuucuacaccagcaagacgaccguggccucccugaucaacacccucaacgaccugaacgagacccuggugacgaugccgcucggguacgucacccacggccugaaccuggaggaggcggcccgguacaugcgcagccucaaggugcccgccaccguguccgucagcucccccgacgccgugaccgccuacaacggguaccugacgagcuccagcaagacccccgaggagcacuucaucgagaccaucucccuggcgggcagcuacaaggacuggagcuacuccggccagagcacccagcucgggaucgaguuccugaagcggggcgacaaguccguguacuacacgagcaacccgaccaccuuccaccuggacggggaggucaucaccuucgacaaccucaagacgcugcugucccuccgcgaggugcggaccaucaagguguucaccaccgucgacaacaucaaccugcacacgcaggugguggacaugagcaugaccuacggccagcaguucggccccaccuaccuggacggggccgacgucaccaagaucaagccccacaacucccacgagggcaagacguucuacgugcucccgaacgacgacacccugcgcguggaggccuucgaguacuaccacaccaccgaccccagcuuccuggggcgguacauguccgcccucaaccacacgaagaaguggaaguacccccaggucaacggccugaccagcaucaagugggccgacaacaacugcuaccuggcgaccgcccuccugacccugcagcagaucgagcucaaguucaaccccccggcccugcaggacgccuacuaccgcgcgcgggccggggaggccgccaacuucugcgcccugauccucgcguacugcaacaagacggugggcgagcugggcgacgugcgcgagaccauguccuaccuguuccagcacgccaaccucgacagcugcaagcggguccugaacguggucugcaagaccugcgggcagcagcagaccacccugaagggcguggaggccgugauguacauggggacgcucuccuacgagcaguucaagaagggcguccagauccccugcaccugcgggaagcaggccaccaaguaccuggugcagcaggagagccccuucgugaugauguccgcccccccggcgcaguacgagcugaagcacggcaccuucacgugcgccagcgaguacaccggcaacuaccagugcgggcacuacaagcacaucaccuccaaggagacccucuacugcaucgacggcgcccugcugacgaagagcagcgaguacaaggggcccaucaccgacgucuucuacaaggagaacuccuacaccaccacgaucaagcccgugaccuacaagcucgacggcguggucugcaccgagaucgaccccaagcuggacaacuacuacaagaaggacaacagcuacuucaccgagcagccgaucgaccuggugcccaaccagcccuaccccaacgccuccuucgacaacuucaaguucgugugcgacaacaucaaguucgccgacgaccucaaccagcugacgggguacaagaagccggcgagccgcgagcugaaggucaccuucuuccccgaccucaacggcgacgugguggccaucgacuacaagcacuacacccccuccuucaagaagggcgccaagcugcugcacaagcccaucgucuggcacgugaacaacgccaccaacaaggcgacguacaagccgaacaccuggugcauccggugccucuggagcaccaagcccguggagaccuccaacagcuucgacguccugaaguccgaggacgcccaggggauggacaaccuggccugcgaggaccucaagcccgugagcgaggagguggucgagaaccccacgauccagaaggacgugcuggagugcaacgugaagaccaccgaggucgugggcgacaucauccugaagccggccaacaacucccucaagaucaccgaggagguggggcacacggaccugauggccgcguacgucgacaacagcucccugaccaucaagaagcccaacgagcucagccgcgugcugggccugaagacccucgccacccacgggcuggccgccgugaacuccguccccugggacacgaucgccaacuacgcgaagccguuccugaacaagguggugagcaccaccaccaacaucgucacgcgcugccucaaccgggugugcaccaacuacaugcccuacuucuucacccugcugcuccagcugugcaccuucacccgcuccacgaacagccggaucaaggccuccaugcccaccaccaucgccaagaacaccgugaagagcgucggcaaguucugccuggaggccagcuucaacuaccucaagucccccaacuucagcaagcugaucaacaucaucaucugguuccugcuccuguccgugugccugggcagccucaucuacuccacggccgcgcugggggugcugaugagcaaccucggcaugccguccuacugcaccggguaccgcgagggcuaccugaacagcaccaacgucaccaucgccacguacugcaccggcuccauccccugcagcgugugccuguccgggcucgacagccuggacaccuaccccucccuggagaccauccagaucacgaucagcuccuucaagugggaccucaccgccuucggccugguggccgagugguuccuggccuacauccucuucacccgguucuucuacguccuggggcuggcggccaucaugcagcucuucuucagcuacuucgccgugcacuucaucuccaacagcuggcugauguggcugaucaucaaccuggugcagauggcccccaucuccgcgaugguccgcauguacaucuucuucgccagcuucuacuacguguggaagagcuacgugcacgucguggacggcugcaacuccagcaccugcaugaugugcuacaagcggaaccgcgccacgcggguggagugcaccaccaucgucaacggggugcgccgguccuucuacgucuacgccaacggcggcaagggguucugcaagcuccacaacuggaacugcgugaacugcgacaccuucugcgccggcagcacguucaucuccgacgagguggcgcgcgaccugagccugcaguucaagcggccgaucaaccccaccgaccaguccagcuacaucgucgacuccgugaccgugaagaacgggagcauccaccucuacuucgacaaggccggccagaagaccuacgagcgccacucccugagccacuucgucaaccuggacaaccuccgggccaacaacacgaaggggucccugcccaucaacgugaucguguucgacggcaagagcaagugcgaggaguccagcgccaaguccgccagcgucuacuacucccagcugaugugccagcccauccuccugcuggaccaggcgcucgugagcgacgugggcgacagcgccgaggucgccgugaagauguucgacgccuacgugaacaccuucuccagcaccuucaacgucccgauggagaagcugaagacccugguggccacggcggaggccgagcucgccaagaacgugucccuggacaacguccugagcaccuucaucuccgccgcgcgccagggguucguggacagcgacguggagaccaaggacgucguggagugccucaagcugucccaccagagcgacaucgaggugaccggcgacuccugcaacaacuacaugcugacguacaacaaggucgagaacaugaccccccgggaccucggggccugcaucgacugcagcgcccgccacaucaacgcccagguggccaagucccacaacaucgcgcugaucuggaacgugaaggacuucaugagccuguccgagcagcuccggaagcagauccgcagcgccgccaagaagaacaaccugcccuucaagcugaccugcgccaccacgcgccaggucgugaacguggucaccaccaagaucgcccucaagggcggguga

SEQ ID NO: 18012 - RNA, 5841 nt, Artificial Sequence
  SARS-CoV-2__MT704012.1__non-structural protein 3 (NSP3) CDS gc
auggcccccaccaaggugaccuucggcgacgacacggucaucgaggugcagggguacaagagcgugaacaucaccuucgagcuggacgagcgcaucgacaagguccucaacgagaagugcuccgccuacaccguggagcugggcaccgaggugaacgaguucgcgugcgucguggccgacgccgugaucaagacgcugcagccggucagcgagcuccugaccccccuggggaucgaccucgacgagugguccauggccaccuacuaccuguucgacgagagcggcgaguucaagcuggccucccacauguacugcagcuucuacccccccgacgaggacgaggaggagggggacugcgaggaggaggaguucgagccguccacccaguacgaguacggcacggaggacgacuaccagggcaagccccucgaguucggggcgaccagcgccgcccugcagcccgaggaggagcaggaggaggacuggcuggacgacgacucccagcagaccgugggccagcaggacgggagcgaggacaaccagaccacgaccauccagaccaucguggagguccagccccagcucgagauggagcugaccccgguggugcagacgaucgaggucaacuccuucagcggcuaccugaagcucaccgacaacguguacaucaagaacgccgacaucguggaggaggcgaagaaggucaagcccaccgugguggucaacgccgccaacguguaccugaagcacgggggcggcguggccggggcccugaacaaggcgaccaacaacgccaugcaggucgaguccgacgacuacaucgccacgaacggcccccucaagguggggggcagcugcguccuguccggccacaaccuggccaagcacugccuccacgugguggggcccaacgucaacaagggcgaggacauccagcugcugaagagcgccuacgagaacuucaaccagcacgaggugcuccuggcgccgcugcucuccgccgggaucuucggcgccgaccccauccacagccugcgggugugcgucgacaccgugcgcaccaacguguaccuggccgucuucgacaagaaccucuacgacaagcugguguccagcuuccuggagaugaagagcgagaagcagguggagcagaagaucgccgagauccccaaggaggaggucaagcccuucaucaccgaguccaagccgagcguggagcagcggaagcaggacgacaagaagaucaaggcgugcguggaggaggucacgaccacccucgaggagaccaaguuccugacggagaaccugcuccuguacaucgacaucaacgggaaccugcaccccgacuccgccacccucgugagcgacaucgacaucaccuuccugaagaaggacgcccccuacaucgugggcgacgucgugcaggagggcgugcugaccgccgucgugauccccacgaagaaggccgggggcaccaccgagaugcucgcgaaggcccugcgcaaggugccgaccgacaacuacaucacgaccuaccccgggcagggccugaacggguacaccgucgaggaggccaagaccgugcucaagaagugcaaguccgccuucuacauccugcccagcaucaucuccaacgagaagcaggagauccugggcaccgugagcuggaaccuccgggagaugcuggcgcacgccgaggagacgcgcaagcugaugcccgucugcguggagaccaaggccaucguguccaccauccagcggaaguacaagggcaucaagauccaggagggggucguggacuacggcgcccgcuucuacuucuacaccagcaagacgaccguggccucccugaucaacacccucaacgaccugaacgagacccuggucacgaugccgcucggguacgugacccacggccugaaccuggaggaggcggcccgguacaugcgcagccucaaggugcccgccaccgucuccgugagcucccccgacgccgugaccgccuacaacggguaccugacgagcuccagcaagacccccgaggagcacuucaucgagaccaucucccuggcgggcagcuacaaggacuggagcuacuccggccagagcacccagcucgggaucgaguuccugaagcggggcgacaaguccgucuacuacacgagcaacccgaccaccuuccaccuggacggggaggugaucaccuucgacaaccucaagacgcugcugucccuccgcgaggugcggaccaucaaggucuucaccaccguggacaacaucaaccugcacacgcagguggucgacaugagcaugaccuacggccagcaguucggccccaccuaccuggacggggccgacgugaccaagaucaagccccacaacucccacgagggcaagacguucuacgugcucccgaacgacgacacccugcgcgucgaggccuucgaguacuaccacaccaccgaccccagcuuccuggggcgguacauguccgcccucaaccacacgaagaaguggaaguacccccaggugaacggccugaccagcaucaagugggccgacaacaacugcuaccuggcgaccgcccuccugacccugcagcagaucgagcucaaguucaaccccccggcccugcaggacgccuacuaccgcgcgcgggccggggaggccgccaacuucugcgcccugauccucgcguacugcaacaagacggugggcgagcugggcgacguccgcgagaccauguccuaccuguuccagcacgccaaccucgacagcugcaagcgggugcugaacgucgugugcaagaccugcgggcagcagcagaccacccugaagggcguggaggccgucauguacauggggacgcucuccuacgagcaguucaagaagggcgugcagauccccugcaccugcgggaagcaggccaccaaguaccuggugcagcaggagagccccuucgucaugauguccgcccccccggcgcaguacgagcugaagcacggcaccuucacgugcgccagcgaguacaccggcaacuaccagugcgggcacuacaagcacaucaccuccaaggagacccucuacugcaucgacggcgcccugcugacgaagagcagcgaguacaaggggcccaucaccgacguguucuacaaggagaacuccuacaccaccacgaucaagcccgugaccuacaagcucgacggcgucgugugcaccgagaucgaccccaagcuggacaacuacuacaagaaggacaacagcuacuucaccgagcagccgaucgaccuggugcccaaccagcccuaccccaacgccuccuucgacaacuucaaguucgucugcgacaacaucaaguucgccgacgaccucaaccagcugacgggguacaagaagccggcgagccgcgagcugaaggugaccuucuuccccgaccucaacggcgacguggucgccaucgacuacaagcacuacacccccuccuucaagaagggcgccaagcugcugcacaagcccaucguguggcacgugaacaacgccaccaacaaggcgacguacaagccgaacaccuggugcauccggugccucuggagcaccaagcccgucgagaccuccaacagcuucgacgugcugaaguccgaggacgcccaggggauggacaaccuggccugcgaggaccucaagcccgugagcgaggaggucguggagaaccccacgauccagaaggacgugcuggagugcaacgucaagaccaccgagguggugggcgacaucauccugaagccggccaacaacucccucaagaucaccgaggaggucgggcacacggaccugauggccgcguacguggacaacagcucccugaccaucaagaagcccaacgagcucagccgcgugcugggccugaagacccucgccacccacgggcuggccgccgucaacuccgugcccugggacacgaucgccaacuacgcgaagccguuccugaacaagguggucagcaccaccaccaacaucgugacgcgcugccucaaccgggugugcaccaacuacaugcccuacuucuucacccugcugcuccagcugugcaccuucacccgcuccacgaacagccggaucaaggccuccaugcccaccaccaucgccaagaacaccgucaagagcgugggcaaguucugccuggaggccagcuucaacuaccucaagucccccaacuucagcaagcugaucaacaucaucaucugguuccugcuccuguccgugugccugggcagccucaucuacuccacggccgcgcuggggguccugaugagcaaccucggcaugccguccuacugcaccggguaccgcgagggcuaccugaacagcaccaacgugaccaucgccacguacugcaccggcuccauccccugcagcgugugccuguccgggcucgacagccuggacaccuaccccucccuggagaccauccagaucacgaucagcuccuucaagugggaccucaccgccuucggccuggucgccgagugguuccuggccuacauccucuucacccgguucuucuacgugcuggggcuggcggccaucaugcagcucuucuucagcuacuucgccgugcacuucaucuccaacagcuggcugauguggcugaucaucaaccugguccagauggcccccaucuccgcgauggugcgcauguacaucuucuucgccagcuucuacuacguguggaagagcuacguccacgugguggacggcugcaacuccagcaccugcaugaugugcuacaagcggaaccgcgccacgcgggucgagugcaccaccaucgugaacgggguccgccgguccuucuacguguacgccaacggcggcaagggguucugcaagcuccacaacuggaacugcgugaacugcgacaccuucugcgccggcagcacguucaucuccgacgaggucgcgcgcgaccugagccugcaguucaagcggccgaucaaccccaccgaccaguccagcuacaucguggacuccgugaccgucaagaacgggagcauccaccucuacuucgacaaggccggccagaagaccuacgagcgccacucccugagccacuucgugaaccuggacaaccuccgggccaacaacacgaaggggucccugcccaucaacgugaucgucuucgacggcaagagcaagugcgaggaguccagcgccaaguccgccagcguguacuacucccagcugaugugccagcccauccuccugcuggaccaggcgcucgugagcgacgucggcgacagcgccgagguggccgugaagauguucgacgccuacgucaacaccuucuccagcaccuucaacgugccgauggagaagcugaagacccugguggccaucgcggaggccgagcucgccaagaacgucucccuggacaacgugcugagcacguucaucuccgccgcgcgccagggguucguggacagcgacgucgagaccaaggacgugguggagugccucaagcugucccaccagagcgacaucgaggucaccggcgacuccugcaacaacuacaugcugaccuacaacaagguggagaacaugacgccccgggaccucggggccugcaucgacugcagcgcccgccacaucaacgcccagguggccaagucccacaacaucgcgcugaucuggaacgucaaggacuucaugagccuguccgagcagcuccggaagcagauccgcagcgccgccaagaagaacaaccugcccuucaagcugaccugcgccaccacccgccagguggugaacgucgugacgaccaagaucgcccucaagggcggguga

SEQ ID NO: 18013 - RNA, 5841 nt, Artificial Sequence
  SARS-CoV-2__MT704014.1__non-structural protein 3 (NSP3) CDS gc
auggcccccaccaaggugaccuucggcgacgacacggucaucgaggugcagggguacaagagcgugaacaucaccuucgagcuggacgagcgcaucgacaagguccucaacgagaagugcuccgccuacaccguggagcugggcaccgaggugaacgaguucgcgugcgucguggccgacgccgugaucaagacgcugcagccggucagcgagcuccugaccccccuggggaucgaccucgacgagugguccauggccaccuacuaccuguucgacgagagcggcgaguucaagcuggccucccacauguacugcagcuucuacccccccgacgaggacgaggaggagggggacugcgaggaggaggaguucgagccguccacccaguacgaguacggcacggaggacgacuaccagggcaagccccucgaguucggggcgaccagcgccgcccugcagcccgaggaggagcaggaggaggacuggcuggacgacgacucccagcagaccgugggccagcaggacgggagcgaggacaaccagaccacgaccauccagaccaucguggagguccagccccagcucgagauggagcugaccccgguggugcagacgaucgaggucaacuccuucagcggcuaccugaagcucaccgacaacguguacaucaagaacgccgacaucguggaggaggcgaagaaggucaagcccaccgugguggucaacgccgccaacguguaccugaagcacgggggcggcguggccggggcccugaacaaggcgaccaacaacgccaugcaggucgaguccgacgacuacaucgccacgaacggcccccucaagguggggggcagcugcguccuguccggccacaaccuggccaagcacugccuccacgugguggggcccaacgucaacaagggcgaggacauccagcugcugaagagcgccuacgagaacuucaaccagcacgaggugcuccuggcgccgcugcucuccgccgggaucuucggcgccgaccccauccacagccugcgggugugcgucgacaccgugcgcaccaacguguaccuggccgucuucgacaagaaccucuacgacaagcugguguccagcuuccuggagaugaagagcgagaagcagguggagcagaagaucgccgagauccccaaggaggaggucaagcccuucaucaccgaguccaagccgagcguggagcagcggaagcaggacgacaagaagaucaaggcgugcguggaggaggucacgaccacccucgaggagaccaaguuccugacggagaaccugcuccuguacaucgacaucaacgggaaccugcaccccgacuccgccacccucgugagcgacaucgacaucaccuuccugaagaaggacgcccccuacaucgugggcgacgucuuccaggagggcgugcugaccgccguggucauccccacgaagaaggccgggggcaccaccgagaugcucgcgaaggcccugcgcaaggugccgaccgacaacuacaucacgaccuaccccgggcagggccugaacggguacaccguggaggaggccaagaccguccucaagaagugcaaguccgccuucuacauccugcccagcaucaucuccaacgagaagcaggagauccugggcaccgugagcuggaaccuccgggagaugcuggcgcacgccgaggagacgcgcaagcugaugcccgugugcgucgagaccaaggccaucguguccaccauccagcggaaguacaagggcaucaagauccaggaggggguggucgacuacggcgcccgcuucuacuucuacaccagcaagacgaccguggccucccugaucaacacccucaacgaccugaacgagacccuggugacgaugccgcucggguacgucacccacggccugaaccuggaggaggcggcccgguacaugcgcagccucaaggugcccgccaccguguccgucagcucccccgacgccgugaccgccuacaacggguaccugacgagcuccagcaagacccccgaggagcacuucaucgagaccaucucccuggcgggcagcuacaaggacuggagcuacuccggccagagcacccagcucgggaucgaguuccugaagcggggcgacaaguccguguacuacacgagcaacccgaccaccuuccaccuggacggggaggucaucaccuucgacaaccucaagacgcugcugucccuccgcgaggugcggaccaucaagguguucaccaccgucgacaacaucaaccugcacacgcaggugguggacaugagcaugaccuacggccagcaguucggccccaccuaccuggacggggccgacgucaccaagaucaagccccacaacucccacgagggcaagacguucuacgugcucccgaacgacgacacccugcgcguggaggccuucgaguacuaccacaccaccgaccccagcuuccuggggcgguacauguccgcccucaaccacacgaagaaguggaaguacccccaggucaacggccugaccagcaucaagugggccgacaacaacugcuaccuggcgaccgcccuccugacccugcagcagaucgagcucaaguucaaccccccggcccugcaggacgccuacuaccgcgcgcgggccggggaggccgccaacuucugcgcccugauccucgcguacugcaacaagacggugggcgagcugggcgacgugcgcgagaccauguccuaccuguuccagcacgccaaccucgacagcugcaagcggguccugaacguggucugcaagaccugcgggcagcagcagaccacccugaagggcguggaggccgugauguacauggggacgcucuccuacgagcaguucaagaagggcguccagauccccugcaccugcgggaagcaggccaccaaguaccuggugcagcaggagagccccuucgugaugauguccgcccccccggcgcaguacgagcugaagcacggcaccuucacgugcgccagcgaguacaccggcaacuaccagugcgggcacuacaagcacaucaccuccaaggagacccucuacugcaucgacggcgcccugcugacgaagagcagcgaguacaaggggcccaucaccgacgucuucuacaaggagaacuccuacaccaccacgaucaagcccgugaccuacaagcucgacggcguggucugcaccgagaucgaccccaagcuggacaacuacuacaagaaggacaacagcuacuucaccgagcagccgaucgaccuggugcccaaccagcccuaccccaacgccuccuucgacaacuucaaguucgugugcgacaacaucaaguucgccgacgaccucaaccagcugacgggguacaagaagccggcgagccgcgagcugaaggucaccuucuuccccgaccucaacggcgacgugguggccaucgacuacaagcacuacacccccuccuucaagaagggcgccaagcugcugcacaagcccaucgucuggcacgugaacaacgccaccaacaaggcgacguacaagccgaacaccuggugcauccggugccucuggagcaccaagcccguggagaccuccaacagcuucgacguccugaaguccgaggacgcccaggggauggacaaccuggccugcgaggaccucaagcccgugagcgaggagguggucgagaaccccacgauccagaaggacgugcuggagugcaacgugaagaccaccgaggucgugggcgacaucauccugaagccggccaacaacucccucaagaucaccgaggagguggggcacacggaccugauggccgcguacgucgacaacagcucccugaccaucaagaagcccaacgagcucagccgcgugcugggccugaagacccucgccacccacgggcuggccgccgugaacuccguccccugggacacgaucgccaacuacgcgaagccguuccugaacaagguggugagcaccaccaccaacaucgucacgcgcugccucaaccgggugugcaccaacuacaugcccuacuucuucacccugcugcuccagcugugcaccuucacccgcuccacgaacagccggaucaaggccuccaugcccaccaccaucgccaagaacaccgugaagagcgucggcaaguucugccuggaggccagcuucaacuaccucaagucccccaacuucagcaagcugaucaacaucaucaucugguuccugcuccuguccgugugccugggcagccucaucuacuccacggccgcgcugggggugcugaugagcaaccucggcaugccguccuacugcaccggguaccgcgagggcuaccugaacagcaccaacgucaccaucgccacguacugcaccggcuccauccccugcagcgugugccuguccgggcucgacagccuggacaccuaccccucccuggagaccauccagaucacgaucagcuccuucaagugggaccucaccgccuucggccugguggccgagugguuccuggccuacauccucuucacccgguucuucuacguccuggggcuggcggccaucaugcagcucuucuucagcuacuucgccgugcacuucaucuccaacagcuggcugauguggcugaucaucaaccuggugcagauggcccccaucuccgcgaugguccgcauguacaucuucuucgccagcuucuacuacguguggaagagcuacgugcacgucguggacggcugcaacuccagcaccugcaugaugugcuacaagcggaaccgcgccacgcggguggagugcaccaccaucgucaacggggugcgccgguccuucuacgucuacgccaacggcggcaagggguucugcaagcuccacaacuggaacugcgugaacugcgacaccuucugcgccggcagcacguucaucuccgacgagguggcgcgcgaccugagccugcaguucaagcggccgaucaaccccaccgaccaguccagcuacaucgucgacuccgugaccgugaagaacgggagcauccaccucuacuucgacaaggccggccagaagaccuacgagcgccacucccugagccacuucgucaaccuggacaaccuccgggccaacaacacgaaggggucccugcccaucaacgugaucguguucgacggcaagagcaagugcgaggaguccagcgccaaguccgccagcgucuacuacucccagcugaugugccagcccauccuccugcuggaccaggcgcucgugagcgacgugggcgacagcgccgaggucgccgugaagauguucgacgccuacgugaacaccuucuccagcaccuucaacgucccgauggagaagcugaagacccugguggccacggcggaggccgagcucgccaagaacgugucccuggacaacguccugagcaccuucaucuccgccgcgcgccagggguucguggacagcgacguggagaccaaggacgucguggagugccucaagcugucccaccagagcgacaucgaggugaccggcgacuccugcaacaacuacaugcugacguacaacaaggucgagaacaugaccccccgggaccucggggccugcaucgacugcagcgcccgccacaucaacgcccagguggccaagucccacaacaucgcgcugaucuggaacgugaaggacuucaugagccuguccgagcagcuccggaagcagauccgcagcgccgccaagaagaacaaccugcccuucaagcugaccugcgccaccacgcgccaggucgugaacguggucaccaccaagaucgcccucaagggcggguga

SEQ ID NO: 18014 - RNA, 5841 nt, Artificial Sequence
  SARS-CoV-2__MT704041.1__non-structural protein 3 (NSP3) CDS gc
auggcccccaccaaggugaccuucggcgacgacacggucaucgaggugcagggguacaagagcgugaacaucaccuucgagcuggacgagcgcaucgacaagguccucaacgagaagugcuccgccuacaccguggagcugggcaccgaggugaacgaguucgcgugcgucguggccgacgccgugaucaagacgcugcagccggucagcgagcuccugaccccccuggggaucgaccucgacgagugguccauggccaccuacuaccuguucgacgagagcggcgaguucaagcuggccucccacauguacugcagcuucuacccccccgacgaggacgaggaggagggggacugcgaggaggaggaguucgagccguccacccaguacgaguacggcacggaggacgacuaccagggcaagccccucgaguucggggcgaccagcgccgcccugcagcccgaggaggagcaggaggaggacuggcuggacgacgacucccagcagaccgugggccagcaggacgggagcgaggacaaccagaccacgaccauccagaccaucguggagguccagccccagcucgagauggagcugaccccgguggugcagacgaucgaggucaacuccuucagcggcuaccugaagcucaccgacaacguguacaucaagaacgccgacaucguggaggaggcgaagaaggucaagcccaccgugguggucaacgccgccaacguguaccugaagcacgggggcggcguggccggggcccugaacaaggcgaccaacaacgccaugcaggucgaguccgacgacuacaucgccacgaacggcccccucaagguggggggcagcugcguccuguccggccacaaccuggccaagcacugccuccacgugguggggcccaacgucaacaagggcgaggacauccagcugcugaagagcgccuacgagaacuucaaccagcacgaggugcuccuggcgccgcugcucuccgccgggaucuucggcgccgaccccauccacagccugcgggugugcgucgacaccgugcgcaccaacguguaccuggccgucuucgacaagaaccucuacgacaagcugguguccagcuuccuggagaugaagagcgagaagcagguggagcagaagaucgccgagauccccaaggaggaggucaagcccuucaucaccgaguccaagccgagcguggagcagcggaagcaggacgacaagaagaucaaggcgugcguggaggaggucacgaccacccucgaggagaccaaguuccugacggagaaccugcuccuguacaucgacaucaacgggaaccugcaccccgacuccgccacccucgugagcgacaucgacaucaccuuccugaagaaggacgcccccuacaucgugggcgacgucgugcaggagggcgugcugaccgccgucgugauccccacgaagaaggccgggggcaccaccgagaugcucgcgaaggcccugcgcaaggugccgaccgacaacuacaucacgaccuaccccgggcagggccugaacggguacaccgucgaggaggccaagaccgugcucaagaagugcaaguccgccuucuacauccugcccagcaucaucuccaacgagaagcaggagauccugggcaccgugagcuggaaccuccgggagaugcuggcgcacgccgaggagacgcgcaagcugaugcccgucugcguggagaccaaggccaucguguccaccauccagcggaaguacaagggcaucaagauccaggagggggucguggacuacggcgcccgcuucuacuucuacaccagcaagacgaccguggccucccugaucaacacccucaacgaccugaacgagacccuggucacgaugccgcucggguacgugacccacggccugaaccuggaggaggcggcccgguacaugcgcagccucaaggugcccgccaccgucuccgugagcucccccgacgccgugaccgccuacaacggguaccugacgagcuccagcaagacccccgaggagcacuucaucgagaccaucucccuggcgggcagcuacaaggacuggagcuacuccggccagagcacccagcucgggaucgaguuccugaagcggggcgacaaguccgucuacuacacgagcaacccgaccaccuuccaccuggacggggaggugaucaccuucgacaaccucaagacgcugcugucccuccgcgaggugcggaccaucaaggucuucaccaccguggacaacaucaaccugcacacgcagguggucgacaugagcaugaccuacggccagcaguucggccccaccuaccuggacggggccgacgugaccaagaucaagccccacaacucccacgagggcaagacguucuacgugcucccgaacgacgacacccugcgcgucgaggccuucgaguacuaccacaccaccgaccccagcuuccuggggcgguacauguccgcccucaaccacacgaagaaguggaaguacccccaggugaacggccugaccagcaucaagugggccgacaacaacugcuaccuggcgaccgcccuccugacccugcagcagaucgagcucaaguucaaccccccggcccugcaggacgccuacuaccgcgcgcgggccggggaggccgccaacuucugcgcccugauccucgcguacugcaacaagacggugggcgagcugggcgacguccgcgagaccauguccuaccuguuccagcacgccaaccucgacagcugcaagcgggugcugaacgucgugugcaagaccugcgggcagcagcagaccacccugaagggcguggaggccgucauguacauggggacgcucuccuacgagcaguucaagaagggcgugcagauccccugcaccugcgggaagcaggccaccaaguaccuggugcagcaggagagccccuucgucaugauguccgcccccccggcgcaguacgagcugaagcacggcaccuucacgugcgccagcgaguacaccggcaacuaccagugcgggcacuacaagcacaucaccuccaaggagacccucuacugcaucgacggcgcccugcugacgaagagcagcgaguacaaggggcccaucaccgacguguucuacaaggagaacuccuacaccaccacgaucaagcccgugaccuacaagcucgacggcgucgugugcaccgagaucgaccccaagcuggacaacuacuacaagaaggacaacagcuacuucaccgagcagccgaucgaccuggugcccaaccagcccuaccccaacgccuccuucgacaacuucaaguucgucugcgacaacaucaaguucgccgacgaccucaaccagcugacgggguacaagaagccggcgagccgcgagcugaaggugaccuucuuccccgaccucaacggcgacguggucgccaucgacuacaagcacuacacccccuccuucaagaagggcgccaagcugcugcacaagcccaucguguggcacgugaacaacgccaccaacaaggcgacguacaagccgaacaccuggugcauccggugccucuggagcaccaagcccgucgagaccuccaacagcuucgacgugcugaaguccgaggacgcccaggggauggacaaccuggccugcgaggaccucaagcccgugagcgaggaggucguggagaaccccacgauccagaaggacgugcuggagugcaacgucaagaccaccgagguggugggcgacaucauccugaagccggccaacaacucccucaagaucaccgaggaggucgggcacacggaccugauggccgcguacguggacaacagcucccugaccaucaagaagcccaacgagcucagccgcgugcugggccugaagacccucgccacccacgggcuggccgccgucaacuccgugcccugggacacgaucgccaacuacgcgaagccguuccugaacaagguggucagcaccaccaccaacaucgugacgcgcugccucaaccgggugugcaccaacuacaugcccuacuucuucacccugcugcuccagcugugcaccuucacccgcuccacgaacagccggaucaaggccuccaugcccaccaccaucgccaagaacaccgucaagagcgugggcaaguucugccuggaggccagcuucaacuaccucaagucccccaacuucagcaagcugaucaacaucaucaucugguuccugcuccuguccgugugccugggcagccucaucuacuccacggccgcgcuggggguccugaugagcaaccucggcaugccguccuacugcaccggguaccgcgagggcuaccugaacagcaccaacgugaccaucgccacguacugcaccggcuccauccccugcagcgugugccuguccgggcucgacagccuggacaccuaccccucccuggagaccauccagaucacgaucagcuccuucaagugggaccucaccgccuucggccuggucgccgagugguuccuggccuacauccucuucacccgguucuucuacgugcuggggcuggcggccaucaugcagcucuucuucagcuacuucgccgugcacuucaucuccaacagcuggcugauguggcugaucaucaaccugguccagauggcccccaucuccgcgauggugcgcauguacaucuucuucgccagcuucuacuacguguggaagagcuacguccacgugguggacggcugcaacuccagcaccugcaugaugugcuacaagcggaaccgcgccacgcgggucgagugcaccaccaucgugaacgggguccgccgguccuucuacguguacgccaacggcggcaagggguucugcaagcuccacaacuggaacugcgugaacugcgacaccuucugcgccggcagcacguucaucuccgacgaggucgcgcgcgaccugagccugcaguucaagcggccgaucaaccccaccgaccaguccagcuacaucguggacuccgugaccgucaagaacgggagcauccaccucuacuucgacaaggccggccagaagaccuacgagcgccacucccugagccacuucgugaaccuggacaaccuccgggccaacaacacgaaggggucccugcccaucaacgugaucgucuucgacggcaagagcaagugcgaggaguccagcgccaaguccgccagcguguacuacucccagcugaugugccagcccauccuccugcuggaccaggcgcucgugagcgacgucggcgacagcgccgaggugguggucaagauguucgacgccuacgugaacaccuucuccagcaccuucaacgugccgauggagaagcugaagacccuggucgccacggccgaggcggagcucgccaagaacgugucccuggacaacgugcugagcaccuucaucuccgccgcccgccagggguucgucgacagcgacguggagaccaaggacguggucgagugccucaagcugucccaccagagcgacaucgaggugaccggcgacuccugcaacaacuacaugcugacguacaacaagguggagaacaugaccccccgggaccucggggcgugcaucgacugcagcgcccgccacaucaacgcccaggucgccaagucccacaacaucgcccugaucuggaacgugaaggacuucaugagccuguccgagcagcuccggaagcagauccgcagcgcggccaagaagaacaaccugcccuucaagcugaccugcgccaccacgcgccagguggucaacguggugaccaccaagaucgcccucaagggcggguga

SEQ ID NO: 18015 - RNA, 5841 nt, Artificial Sequence
  SARS-CoV-2__MT704066.1__non-structural protein 3 (NSP3) CDS gc
auggcccccaccaaggugaccuucggcgacgacacggucaucgaggugcagggguacaagagcgugaacaucaccuucgagcuggacgagcgcaucgacaagguccucaacgagaagugcuccgccuacaccguggagcugggcaccgaggugaacgaguucgcgugcgucguggccgacgccgugaucaagacgcugcagccggucagcgagcuccugaccccccuggggaucgaccucgacgagugguccauggccaccuacuaccuguucgacgagagcggcgaguucaagcuggccucccacauguacugcagcuucuacccccccgacgaggacgaggaggagggggacugcgaggaggaggaguucgagccguccacccaguacgaguacggcacggaggacgacuaccagggcaagccccucgaguucggggcgaccagcgccgcccugcagcccgaggaggagcaggaggaggacuggcuggacgacgacucccagcagaccgugggccagcaggacgggagcgaggacaaccagaccacgaccauccagaccaucguggagguccagccccagcucgagauggagcugaccccgguggugcagacgaucgaggucaacuccuucagcggcuaccugaagcucaccgacaacguguacaucaagaacgccgacaucguggaggaggcgaagaaggucaagcccaccgugguggucaacgccgccaacguguaccugaagcacgggggcggcguggccggggcccugaacaaggcgaccaacaacgccaugcaggucgaguccgacgacuacaucgccacgaacggcccccucaagguggggggcagcugcguccuguccggccacaaccuggccaagcacugccuccacgugguggggcccaacgucaacaagggcgaggacauccagcugcugaagagcgccuacgagaacuucaaccagcacgaggugcuccuggcgccgcugcucuccgccgggaucuucggcgccgaccccauccacagccugcgggugugcgucgacaccgugcgcaccaacguguaccuggccgucuucgacaagaaccucuacgacaagcugguguccagcuuccuggagaugaagagcgagaagcagguggagcagaagaucgccgagauccccaaggaggaggucaagcccuucaucaccgaguccaagccgagcguggagcagcggaagcaggacgacaagaagaucaaggcgugcguggaggaggucacgaccacccucgaggagaccaaguuccugacggagaaccugcuccuguacaucgacaucaacgggaaccugcaccccgacuccgccacccucgugagcgacaucgacaucaccuuccugaagaaggacgcccccuacauggugggcgacgucgugcaggagggcgugcugaccgccgucgugauccccacgaagaaggccgggggcaccaccgagaugcucgcgaaggcccugcgcaaggugccgaccgacaacuacaucacgaccuaccccgggcagggccugaacggguacaccgucgaggaggccaagaccgugcucaagaagugcaaguccgccuucuacauccugcccagcaucaucuccaacgagaagcaggagauccugggcaccgugagcuggaaccuccgggagaugcuggcgcacgccgaggagacgcgcaagcugaugcccgucugcguggagaccaaggccaucguguccaccauccagcggaaguacaagggcaucaagauccaggagggggucguggacuacggcgcccgcuucuacuucuacaccagcaagacgaccguggccucccugaucaacacccucaacgaccugaacgagacccuggucacgaugccgcucggguacgugacccacggccugaaccuggaggaggcggcccgguacaugcgcagccucaaggugcccgccaccgucuccgugagcucccccgacgccgugaccgccuacaacggguaccugacgagcuccagcaagacccccgaggagcacuucaucgagaccaucucccuggcgggcagcuacaaggacuggagcuacuccggccagagcacccagcucgggaucgaguuccugaagcggggcgacaaguccgucuacuacacgagcaacccgaccaccuuccaccuggacggggaggugaucaccuucgacaaccucaagacgcugcugucccuccgcgaggugcggaccaucaaggucuucaccaccguggacaacaucaaccugcacacgcagguggucgacaugagcaugaccuacggccagcaguucggccccaccuaccuggacggggccgacgugaccaagaucaagccccacaacucccacgagggcaagacguucuacgugcucccgaacgacgacacccugcgcgucgaggccuucgaguacuaccacaccaccgaccccagcuuccuggggcgguacauguccgcccucaaccacacgaagaaguggaaguacccccaggugaacggccugaccagcaucaagugggccgacaacaacugcuaccuggcgaccgcccuccugacccugcagcagaucgagcucaaguucaaccccccggcccugcaggacgccuacuaccgcgcgcgggccggggaggccgccaacuucugcgcccugauccucgcguacugcaacaagacggugggcgagcugggcgacguccgcgagaccauguccuaccuguuccagcacgccaaccucgacagcugcaagcgggugcugaacgucgugugcaagaccugcgggcagcagcagaccacccugaagggcguggaggccgucauguacauggggacgcucuccuacgagcaguucaagaagggcgugcagauccccugcaccugcgggaagcaggccaccaaguaccuggugcagcaggagagccccuucgucaugauguccgcccccccggcgcaguacgagcugaagcacggcaccuucacgugcgccagcgaguacaccggcaacuaccagugcgggcacuacaagcacaucaccuccaaggagacccucuacugcaucgacggcgcccugcugacgaagagcagcgaguacaaggggcccaucaccgacguguucuacaaggagaacuccuacaccaccacgaucaagcccgugaccuacaagcucgacggcgucgugugcaccgagaucgaccccaagcuggacaacuacuacaagaaggacaacagcuacuucaccgagcagccgaucgaccuggugcccaaccagcccuaccccaacgccuccuucgacaacuucaaguucgucugcgacaacaucaaguucgccgacgaccucaaccagcugacgggguacaagaagccggcgagccgcgagcugaaggugaccuucuuccccgaccucaacggcgacguggucgccaucgacuacaagcacuacacccccuccuucaagaagggcgccaagcugcugcacaagcccaucguguggcacgugaacaacgccaccaacaaggcgacguacaagccgaacaccuggugcauccggugccucuggagcaccaagcccgucgagaccuccaacagcuucgacgugcugaaguccgaggacgcccaggggauggacaaccuggccugcgaggaccucaagcccgugagcgaggaggucguggagaaccccacgauccagaaggacgugcuggagugcaacgucaagaccaccgagguggugggcgacaucauccugaagccggccaacaacucccucaagaucaccgaggaggucgggcacacggaccugauggccgcguacguggacaacagcucccugaccaucaagaagcccaacgagcucagccgcgugcugggccugaagacccucgccacccacgggcuggccgccgucaacuccgugcccugggacacgaucgccaacuacgcgaagccguuccugaacaagguggucagcaccaccaccaacaucgugacgcgcugccucaaccgggugugcaccaacuacaugcccuacuucuucacccugcugcuccagcugugcaccuucacccgcuccacgaacagccggaucaaggccuccaugcccaccaccaucgccaagaacaccgucaagagcgugggcaaguucugccuggaggccagcuucaacuaccucaagucccccaacuucagcaagcugaucaacaucaucaucugguuccugcuccuguccgugugccugggcagccucaucuacuccacggccgcgcuggggguccugaugagcaaccucggcaugccguccuacugcaccggguaccgcgagggcuaccugaacagcaccaacgugaccaucgccacguacugcaccggcuccauccccugcagcgugugccuguccgggcucgacagccuggacaccuaccccucccuggagaccauccagaucacgaucagcuccuucaagugggaccucaccgccuucggccuggucgccgagugguuccuggccuacauccucuucacccgguucuucuacgugcuggggcuggcggccaucaugcagcucuucuucagcuacuucgccgugcacuucaucuccaacagcuggcugauguggcugaucaucaaccugguccagauggcccccaucuccgcgauggugcgcauguacaucuucuucgccagcuucuacuacguguggaagagcuacguccacgugguggacggcugcaacuccagcaccugcaugaugugcuacaagcggaaccgcgccacgcgggucgagugcaccaccaucgugaacgggguccgccgguccuucuacguguacgccaacggcggcaagggguucugcaagcuccacaacuggaacugcgugaacugcgacaccuucugcgccggcagcacguucaucuccgacgaggucgcgcgcgaccugagccugcaguucaagcggccgaucaaccccaccgaccaguccagcuacaucguggacuccgugaccgucaagaacgggagcauccaccucuacuucgacaaggccggccagaagaccuacgagcgccacucccugagccacuucgugaaccuggacaaccuccgggccaacaacacgaaggggucccugcccaucaacgugaucgucuucgacggcaagagcaagugcgaggaguccagcgccaaguccgccagcguguacuacucccagcugaugugccagcccauccuccugcuggaccaggcgcucgugagcgacgucggcgacagcgccgagguggccgugaagauguucgacgccuacgucaacaccuucuccagcaccuucaacgugccgauggagaagcugaagacccugguggccacggcggaggccgagcucgccaagaacgucucccuggacaacgugcugagcaccuucaucuccgccgcgcgccagggguucguggacagcgacgucgagaccaaggacgugguggagugccucaagcugucccaccagagcgacaucgaggucaccggcgacuccugcaacaacuacaugcugacguacaacaagguggagaacaugaccccccgggaccucggggccugcaucgacugcagcgcccgccacaucaacgcccagguggccaagucccacaacaucgcgcugaucuggaacgucaaggacuucaugagccuguccgagcagcuccggaagcagauccgcagcgccgccaagaagaacaaccugcccuucaagcugaccugcgccaccacgcgccagguggugaacgucgugaccaccaagaucgcccucaagggcggguga

SEQ ID NO: 18016 - RNA, 5841 nt, Artificial Sequence
  SARS-CoV-2__MT704088.1__non-structural protein 3 (NSP3) CDS gc
auggcccccaccaaggugaccuucggcgacgacacggucaucgaggugcagggguacaagagcgugaacaucaccuucgagcuggacgagcgcaucgacaagguccucaacgagaagugcuccgccuacaccguggagcugggcaccgaggugaacgaguucgcgugcgucguggccgacgccgugaucaagacgcugcagccggucagcgagcuccugaccccccuggggaucgaccucgacgagugguccauggccaccuacuaccuguucgacgagagcggcgaguucaagcuggccucccacauguacugcagcuucuacccccccgacgaggacgaggaggagggggacugcgaggaggaggaguucgagccguccacccaguacgaguacggcacggaggacgacuaccagggcaagccccucgaguucggggcgaccagcgccgcccugcagcccgaggaggagcaggaggaggacuggcuggacgacgacucccagcagaccgugggccagcaggacgggagcgaggacaaccagaccacgaccauccagaccaucguggagguccagccccagcucgagauggagcugaccccgguggugcagacgaucgaggucaacuccuucagcggcuaccugaagcucaccgacaacguguacaucaagaacgccgacaucguggaggaggcgaagaaggucaagcccaccgugguggucaacgccgccaacguguaccugaagcacgggggcggcguggccggggcccugaacaaggcgaccaacaacgccaugcaggucgaguccgacgacuacaucgccacgaacggcccccucaagguggggggcagcugcguccuguccggccacaaccuggccaagcacugccuccacgugguggggcccaacgucaacaagggcgaggacauccagcugcugaagagcgccuacgagaacuucaaccagcacgaggugcuccuggcgccgcugcucuccgccgggaucuucggcgccgaccccauccacagccugcgggugugcgucgacaccgugcgcaccaacguguaccuggccgucuucgacaagaaccucuacgacaagcugguguccagcuuccuggagaugaagagcgagaagcagguggagcagaagaucgccgagauccccaaggaggaggucaagcccuucaucaccgaguccaagccgagcguggagcagcggaagcaggacgacaagaagaucaaggcgugcguggaggaggucacgaccacccucgaggagaccaaguuccugacggagaaccugcuccuguacaucgacaucaacgggaaccugcaccccgacuccgccacccucgugagcgacaucgacaucaccuuccugaagaaggacgcccccuacaucgugggcgacgucgugcaggagggcgugcugaccgccgucgugauccccacgaagaaggccgggggcaccaccgagaugcucgcgaaggcccugcgcaaggugccgaccgacaacuacaucacgaccuaccccgggcagggccugaacggguacaccgucgaggaggccaagaccgugcucaagaagugcaaguccgccuucuacauccugcccagcaucaucuccaacgagaagcaggagauccugggcaccgugagcuggaaccuccgggagaugcuggcgcacgccgaggagacgcgcaagcugaugcccgucugcguggagaccaaggccaucguguccaccauccagcggaaguacaagggcaucaagauccaggagggggucguggacuacggcgcccgcuucuacuucuacaccagcaagacgaccguggccucccugaucaacacccucaacgaccugaacgagacccuggucacgaugccgcucggguacgugacccacggccugaaccuggaggaggcggcccgguacaugcgcagccucaaggugcccgccaccgucuccgugagcucccccgacgccgugaccgccuacaacggguaccugacgagcuccagcaagacccccgaggagcacuucaucgagaccaucucccuggcgggcagcuacaaggacuggagcuacuccggccagagcacccagcucgggaucgaguuccugaagcggggcgacaaguccgucuacuacacgagcaacccgaccaccuuccaccuggacggggaggugaucaccuucgacaaccucaagacgcugcugucccuccgcgaggugcggaccaucaaggucuucaccaccguggacaacaucaaccugcacacgcagguggucgacaugagcaugaccuacggccagcaguucggccccaccuaccuggacggggccgacgugaccaagaucaagccccacaacucccacgagggcaagacguucuacgugcucccgaacgacgacacccugcgcgucgaggccuucgaguacuaccacaccaccgacagcuccuuccuggggcgguacaugagcgcccucaaccacacgaagaaguggaaguacccccaggugaacggccugaccuccaucaagugggccgacaacaacugcuaccuggcgaccgcccuccugacccugcagcagaucgagcucaaguucaacccccccgcccugcaggacgccuacuaccgcgcgcgggccggggaggccgccaacuucugcgcccugauccucgcguacugcaacaagacggugggcgagcugggcgacguccgcgagaccaugagcuaccuguuccagcacgccaaccucgacuccugcaagcgggugcugaacgucgugugcaagaccugcgggcagcagcagaccacccugaagggcguggaggccgucauguacauggggacgcucagcuacgagcaguucaagaagggcgugcagaucccgugcaccugcgggaagcaggccaccaaguaccuggugcagcaggagucccccuucgucaugaugagcgccccccccgcgcaguacgagcugaagcacggcaccuucacgugcgccuccgaguacaccggcaacuaccagugcgggcacuacaagcacaucaccagcaaggagacccucuacugcaucgacggcgcccugcugacgaagagcuccgaguacaaggggccgaucaccgacguguucuacaaggagaacagcuacaccaccacgaucaagcccgugaccuacaagcucgacggcgucgugugcaccgagaucgaccccaagcuggacaacuacuacaagaaggacaacuccuacuucaccgagcagcccaucgaccuggugccgaaccagcccuaccccaacgccagcuucgacaacuucaaguucgucugcgacaacaucaaguucgccgacgaccucaaccagcugacgggguacaagaagcccgcgucccgcgagcugaaggugaccuucuucccggaccucaacggcgacguggucgccaucgacuacaagcacuacacccccagcuucaagaagggcgccaagcugcugcacaagcccaucguguggcacgugaacaacgccaccaacaaggcgacguacaagcccaacaccuggugcauccggugccucugguccaccaagccggucgagaccagcaacuccuucgacgugcugaagagcgaggacgcccaggggauggacaaccuggccugcgaggaccucaagcccguguccgaggaggucguggagaaccccacgauccagaaggacgugcuggagugcaacgucaagaccaccgagguggugggcgacaucauccugaagcccgccaacaacagccucaagaucaccgaggaggucgggcacacggaccugauggccgcguacguggacaacuccagccugaccaucaagaagccgaacgagcucucccgcgugcugggccugaagacccucgccacccacgggcuggccgccgucaacagcgugcccugggacacgaucgccaacuacgcgaagcccuuccugaacaagguggucuccaccaccaccaacaucgugacgcgcugccucaaccgggugugcaccaacuacaugccguacuucuucacccugcugcuccagcugugcaccuucacccgcagcacgaacucccggaucaaggccagcaugcccaccaccaucgccaagaacaccgucaagagcgugggcaaguucugccuggaggccuccuucaacuaccucaagagccccaacuucuccaagcugaucaacaucaucaucugguuccugcuccugagcgugugccugggcucccuccuguacagcacggccgcgcuggggguccucauguccaaccugggcaugcccagcuacugcaccggguaccgcgagggcuaccugaacuccaccaacgugaccaucgccacguacugcaccggcagcaucccgugcuccgugugccucagcgggcuggacucccuggacaccuaccccagccucgagaccauccagaucacgaucuccagcuucaagugggaccugaccgccuucggccuggucgccgagugguuccucgccuacauccuguucacccgguucuucuacgugcuggggcucgcggccaucaugcagcuguucuucuccuacuucgccgugcacuucaucagcaacuccuggcugauguggcugaucaucaaccucguccagauggcccccaucagcgcgauggugcgcauguacaucuucuucgccagcuucuacuacguguggaaguccuacguccacgugguggacggcugcaacagcuccaccugcaugaugugcuacaagcggaaccgcgccacgcgggucgagugcaccaccaucgugaacgggguccgccggagcuucuacguguacgccaacggcggcaagggguucugcaagcugcacaacuggaacugcgugaacugcgacaccuucugcgccggcuccacguucaucagcgacgaggucgcgcgcgaccugucccuccaguucaagcggcccaucaacccgaccgaccagagcuccuacaucguggacagcgugaccgucaagaacggguccauccaccuguacuucgacaaggccggccagaagaccuacgagcgccacagccugucccacuucgugaaccucgacaaccugcgggccaacaacacgaaggggagccugcccaucaacgugaucgucuucgacggcaaguccaagugcgaggagagcuccgccaagagcgccuccguguacuacagccagcucaugugccagcccauccugcugcucgaccaggcgcuggugagcgacgucggcgacuccgccgagguggccgugaagauguucgacgccuacgucaacaccuucagcuccaccuucaacgugcccauggagaagcugaagacccucguggccacggcggaggccgagcuggccaagaacgucagccuggacaacgugcucuccaccuucaucagcgccgcgcgccagggguucguggacuccgacgucgagaccaaggacgugguggagugccugaagcugagccaccaguccgacaucgaggucaccggcgacagcugcaacaacuacaugcucacguacaacaagguggagaacaugaccccgcgggaccugggggccugcaucgacugcuccgcccgccacaucaacgcccagguggccaagagccacaacaucgcgcugaucuggaacgucaaggacuucaugucccucagcgagcagcugcggaagcagauccgcuccgccgccaagaagaacaaccugcccuucaagcucaccugcgccaccacgcgccagguggugaacgucgugaccaccaagaucgcccugaagggcggguga

SEQ ID NO: 18017 - RNA, 5841 nt, Artificial Sequence
  SARS-CoV-2__MT704100.1__non-structural protein 3 (NSP3) CDS gc
auggcccccaccaaggugaccuucggcgacgacacggucaucgaggugcagggguacaagagcgugaacaucaccuucgagcuggacgagcgcaucgacaagguccucaacgagaagugcuccgccuacaccguggagcugggcaccgaggugaacgaguucgcgugcgucguggccgacgccgugaucaagacgcugcagccggucagcgagcuccugaccccccuggggaucgaccucgacgagugguccauggccaccuacuaccuguucgacgagagcggcgaguucaagcuggccucccacauguacugcagcuucuacccccccgacgaggacgaggaggagggggacugcgaggaggaggaguucgagccguccacccaguacgaguacggcacggaggacgacuaccagggcaagccccucgaguucggggcgaccagcgccgcccugcagcccgaggaggagcaggaggaggacuggcuggacgacgacucccagcagaccgugggccagcaggacgggagcgaggacaaccagaccacgaccauccagaccaucguggagguccagccccagcucgagauggagcugaccccgguggugcagacgaucgaggucaacuccuucagcggcuaccugaagcucaccgacaacguguacaucaagaacgccgacaucguggaggaggcgaagaaggucaagcccaccgugguggucaacgccgccaacguguaccugaagcacgggggcggcguggccggggcccugaacaaggcgaccaacaacgccaugcaggucgaguccgacgacuacaucgccacgaacggcccccucaagguggggggcagcugcguccuguccggccacaaccuggccaagcacugccuccacgugguggggcccaacgucaacaagggcgaggacauccagcugcugaagagcgccuacgagaacuucaaccagcacgaggugcuccuggcgccgcugcucuccgccgggaucuucggcgccgaccccauccacagccugcgggugugcgucgacaccgugcgcaccaacguguaccuggccgucuucgacaagaaccucuacgacaagcugguguccagcuuccuggagaugaagagcgagaagcagguggagcagaagaucgccgagauccccaaggaggaggucaagcccuucaucaccgaguccaagccgagcguggagcagcggaagcaggacgacaagaagaucaaggcgugcguggaggaggucacgaccacccucgaggagaccaaguuccugacggagaaccugcuccuguacaucgacaucaacgggaaccugcaccccgacuccgccacccucgugagcgacaucgacaucaccuuccugaagaaggacgcccccuacaucgugggcgacgucgugcaggagggcgugcugaccgccgucgugauccccacgaagaaggccgggggcaccaccgagaugcucgcgaaggcccugcgcaaggugccgaccgacaacuacaucacgaccuaccccgggcagggccugaacggguacaccgucgaggaggccaagaccgugcucaagaagugcaaguccgccuucuacauccugcccagcaucaucuccaacgagaagcaggagauccugggcaccgugagcuggaaccuccgggagaugcuggcgcacgccgaggagacgcgcaagcugaugcccgucugcguggagaccaaggccaucguguccaccauccagcggaaguacaagggcaucaagauccaggagggggucguggacuacggcgcccgcuucuacuucuacaccagcaagacgaccguggccucccugaucaacacccucaacgaccugaacgagacccuggucacgaugccgcucggguacgugacccacggccugaaccuggaggaggcggcccgguacaugcgcagccucaaggugcccgccaccgucuccgugagcucccccgacgccgugaccgccuacaacggguaccugacgagcuccagcaagacccccgaggagcacuucaucgagaccaucucccuggcgggcagcuacaaggacuggagcuacuccggccagagcacccagcucgggaucgaguuccugaagcggggcgacaaguccgucuacuacacgagcaacccgaccaccuuccaccuggacggggaggugaucaccuucgacaaccucaagacgcugcugucccuccgcgaggugcggaccaucaaggucuucaccaccguggacaacaucaaccugcacacgcagguggucgacaugagcaugaccuacggccagcaguucggccccaccuaccuggacggggccgacgugaccaagaucaagccccacaacucccacgagggcaagacguucuacgugcucccgaacgacgacacccugcgcgucgaggccuucgaguacuaccacaccaccgaccccagcuuccuggggcgguacauguccgcccucaaccacacgaagaaguggaaguacccccaggugaacggccugaccagcaucaagugggccgacaacaacugcuaccuggcgaccgcccuccugacccugcagcagaucgagcucaaguucaaccccccggcccugcaggacgccuacuaccgcgcgcgggccggggaggccgccaacuucugcgcccugauccucgcguacugcaacaagacggugggcgagcugggcgacguccgcgagaccauguccuaccuguuccagcacgccaaccucgacagcugcaagcgggugcugaacgucgugugcaagaccugcgggcagcagcagaccacccugaagggcguggaggccgucauguacauggggacgcucuccuacgagcaguucaagaagggcgugcagauccccugcaccugcgggaagcaggccaccaaguaccuggugcagcaggagagccccuucgucaugauguccgcccccccggcgcaguacgagcugaagcacggcaccuucacgugcgccagcgaguacaccggcaacuaccagugcgggcacuacaagcacaucaccuccaaggagacccucuacugcaucgacggcgcccugcugacgaagagcagcgaguacaaggggcccaucaccgacguguucuacaaggagaacuccuacaccaccacgaucaagcccgugaccuacaagcucgacggcgucgugugcaccgagaucgaccccaagcuggacaacuacuacaagaaggacaacagcuacuucaccgagcagccgaucgaccuggugcccaaccagcccuaccccaacgccuccuucgacaacuucaaguucgucugcgacaacaucaaguucgccgacgaccucaaccagcugacgggguacaagaagccggcgagccgcgagcugaaggugaccuucuuccccgaccucaacggcgacguggucgccaucgacuacaagcacuacacccccuccuucaagaagggcgccaagcugcugcacaagcccaucguguggcacgugaacaacgccaccaacaaggcgacguacaagccgaacaccuggugcauccggugccucuggagcaccaagcccgucgagaccuccaacagcuucgacgugcugaaguccgaggacgcccaggggauggacaaccuggccugcgaggaccucaagcccgugagcgaggaggucguggagaaccccacgauccagaaggacgugcuggagugcaacgucaagaccaccgagguggugggcgacaucauccugaagccggccaacaacucccucaagaucaccgaggaggucgggcacacggaccugauggccgcguacguggacaacagcucccugaccaucaagaagcccaacgagcucagccgcgugcugggccugaagacccucgccacccacgggcuggccgccgucaacuccgugcccugggacacgaucgccaacuacgcgaagccguuccugaacaagguggucagcaccaccaccaacaucgugacgcgcugccucaaccgggugugcaccaacuacaugcccuacuucuucacccugcugcuccagcugugcaccuucacccgcuccacgaacagccggaucaaggccuccaugcccaccaccaucgccaagaacaccgucaagagcgugggcaaguucugccuggaggccagcuucaacuaccucaagucccccaacuucagcaagcugaucaacaucaucaucugguuccugcuccuguccgugugccugggcagccucaucuacuccacggccgcgcuggggguccugaugagcaaccucggcaugccguccuacugcaccggguaccgcgagggcuaccugaacagcaccaacgugaccaucgccacguacugcaccggcuccauccccugcagcgugugccuguccgggcucgacagccuggacaccuaccccucccuggagaccauccagaucacgaucagcuccuucaagugggaccucaccgccuucggccuggucgccgagugguuccuggccuacauccucuucacccgguucuucuacgugcuggggcuggcggccaucaugcagcucuucuucagcuacuucgccgugcacuucaucuccaacagcuggcugauguggcugaucaucaaccugguccagauggcccccaucuccgcgauggugcgcauguacaucuucuucgccagcuucuacuacguguggaagagcuacguccacgugguggacggcugcaacuccagcaccugcaugaugugcuacaagcggaaccgcgccacgcgggucgagugcaccaccaucgugaacgggguccgccgguccuucuacguguacgccaacggcggcaagggguucugcaagcuccacaacuggaacugcgugaacugcgacaccuucugcgccggcagcacguucaucuccgacgaggucgcgcgcgaccugagccugcaguucaagcggccgaucaaccccaccgaccaguccagcuacaucguggacuccgugaccgucaagaacgggagcauccaccucuacuucgacaaggccggccagaagaccuacgagcgccacucccugagccacuucgugaaccuggacaaccuccgggccaacaacacgaaggggucccugcccaucaacgugaucgucuucgacggcaagagcaagugcgaggaguccagcgccaaguccgccagcguguacuacucccagcugaugugccagcccauccuccugcuggaccaggcgcucgugagcgacgucggcgacagcgccgagguggccgugaagauguucgacgccuacgucaacaccuucuccagcaccuucaacgugccgauggagaagcugaagacccugguggccacggcggaggccgagcucgccaagaacgucucccuggacaacgugcugagcaccuucaucuccgccgcgcgccagggguucguggacagcgacgucgagaccaaggacgugguggagugccucaagcugucccaccagagcgacaucgaggucaccggcgacuccugcaacaacuacaugcugacguacaacaagguggagaacaugaccccccgggaccucggggccugcaucgacugcagcgcccgccacaucaacacccagguggccaagucccacaacaucgcccugaucuggaacgucaaggacuucaugagccuguccgagcagcuccggaagcagauccgcagcgcggccaagaagaacaaccugcccuucaagcugaccugcgccacgacccgccagguggugaacgucgugaccaccaagaucgcccucaagggcggguga

SEQ ID NO: 18018 - RNA, 5841 nt, Artificial Sequence
  SARS-CoV-2__MT683408.1__non-structural protein 3 (NSP3) CDS gc
auggcccccaccaaggugaccuucggcgacgacacggucaucgaggugcagggguacaagagcgugaacaucaccuucgagcuggacgagcgcaucgacaagguccucaacgagaagugcuccgccuacaccguggagcugggcaccgaggugaacgaguucgcgugcgucguggccgacgccgugaucaagacgcugcagccggucagcgagcuccugaccccccuggggaucgaccucgacgagugguccauggccaccuacuaccuguucgacgagagcggcgaguucaagcuggccucccacauguacugcagcuucuacccccccgacgaggacgaggaggagggggacugcgaggaggaggaguucgagccguccacccaguacgaguacggcacggaggacgacuaccagggcaagccccucgaguucggggcgaccagcgccgcccugcagcccgaggaggagcaggaggaggacuggcuggacgacgacucccagcagaccgugggccagcaggacgggagcgaggacaaccagaccacgaccauccagaccaucguggagguccagccccagcucgagauggagcugaccccgguggugcagacgaucgaggucaacuccuucagcggcuaccugaagcucaccgacaacguguacaucaagaacgccgacaucguggaggaggcgaagaaggucaagcccaccgugguggucaacgccgccaacguguaccugaagcacgggggcggcguggccggggcccugaacaaggcgaccaacaacgccaugcaggucgaguccgacgacuacaucgccacgaacggcccccucaagguggggggcagcugcguccuguccggccacaaccuggccaagcacugccuccacgugguggggcccaacgucaacaagggcgaggacauccagcugcugaagagcgccuacgagaacuucaaccagcacgaggugcuccuggcgccgcugcucuccgccgggaucuucggcgccgaccccauccacagccugcgggugugcgucgacaccgugcgcaccaacguguaccuggccgucuucgacaagaaccucuacgacaagcugguguccagcuuccuggagaugaagagcgagaagcagguggagcagaagaucgccgagauccccaaggaggaggucaagcccuucaucaccgaguccaagccgagcguggagcagcggaagcaggacgacaagaagaucaaggcgugcguggaggaggucacgaccacccucgaggagaccaaguuccugacggagaaccugcuccuguacaucgacaucaacgggaaccugcaccccgacuccgccacccucgugagcgacaucgacaucaccuuccugaagaaggacgcccccuacaucgugggcgacgucgugcaggagggcgugcugaccgccgucgugauccccacgaagaaggccgggggcaccaccgagaugcucgcgaaggcccugcgcaaggugccgaccgacaacuacaucacgaccuaccccgggcagggccugaacggguacaccgucgaggaggccaagaccgugcucaagaagugcaaguccgccuucuacauccugcccagcaucaucuccaacgagaagcaggagauccugggcaccgugagcuggaaccuccgggagaugcuggcgcacgccgaggagacgcgcaagcugaugcccgucugcguggagaccaaggccaucguguccaccauccagcggaaguacaagggcaucaagauccaggagggggucguggacuacggcgcccgcuucuacuucuacaccagcaagacgaccguggccucccugaucaacacccucaacgaccugaacgagacccuggucacgaugccgcucggguacgugacccacggccugaaccuggaggaggcggcccgguacaugcgcagccucaaggugcccgccaccgucuccgugagcucccccgacgccgugaccgccuacaacggguaccugacgagcuccagcaagacccccgaggagcacuucaucgagaccaucucccuggcgggcagcuacaaggacuggagcuacuccggccagagcacccagcucgggaucgaguuccugaagcggggcgacaaguccgucuacuacacgagcaacccgaccaccuuccaccuggacggggaggugaucaccuucgacaaccucaagacgcugcugucccuccgcgaggugcggaccaucaaggucuucaccaccguggacaacaucaaccugcacacgcagguggucgacaugagcaugaccuacggccagcaguucggccccaccuaccuggacggggccgacgugaccaagaucaagccccacaacucccacgagggcaagacguucuacgugcucccgaacgacgacacccugcgcgucgaggccuucgaguacuaccacaccaccgaccccagcuuccuggggcgguacauguccgcccucaaccacacgaagaaguggaaguacccccaggugaacggccugaccagcaucaagugggccgacaacaacugcuaccuggcgaccgcccuccugacccugcagcagaucgagcucaaguucaaccccccggcccugcaggacgccuacuaccgcgcgcgggccggggaggccgccaacuucugcgcccugauccucgcguacugcaacaagacggugggcgagcugggcgacguccgcgagaccauguccuaccuguuccagcacgccaaccucgacagcugcaagcgggugcugaacgucgugugcaagaccugcgggcagcagcagaccacccugaagggcguggaggccgucauguacauggggacgcucuccuacgagcaguucaagaagggcgugcagauccccugcaccugcgggaagcaggccaccaaguaccuggugcagcaggagagccccuucgucaugauguccgcccccccggcgcaguacgagcugaagcacggcaccuucacgugcgccagcgaguacaccggcaacuaccagugcgggcacuacaagcacaucaccuccaaggagacccucuacugcaucgacggcgcccugcugacgaagagcagcgaguacaaggggcccaucaccgacguguucuacaaggagaacuccuacaccaccacgaucaagcccgugaccuacaagcucgacggcgucgugugcaccgagaucgaccccaagcuggacaacuacuacaagaaggacaacagcuacuucaccgagcagccgaucgaccuggugcccaaccagcccuaccccaacgccuccuucgacaacuucaaguucgucugcgacaacaucaaguucgccgacgaccucaaccagcugacgggguacaagaagccggcgagccgcgagcugaaggugaccuucuuccccgaccucaacggcgacguggucgccaucgacuacaagcacuacacccccuccuucaagaagggcgccaagcugcugcacaagcccaucguguggcacgugaacaacgccaccaacaaggcgacguacaagccgaacaccuggugcauccggugccucuggagcaccaagcccgucgagaccuccaacagcuucgacgugcugaaguccgaggacgcccaggggauggacaaccuggccugcgaggaccucaagcccgugagcgaggaggucguggagaaccccacgauccagaaggacgugcuggagugcaacgucaagaccaccgagguggugggcgacaucauccugaagccggccaacaacucccucaagaucaccgaggaggucgggcacacggaccugauggccgcguacguggacaacagcucccugaccaucaagaagcccaacgagcucagccgcgugcugggccugaagacccucgccacccacgggcuggccgccgucaacuccgugcccugggacacgaucgccaacuacgcgcgcccguuccugaacaagguggucagcaccaccaccaacaucgugacgcggugccucaaccgcgugugcaccaacuacaugcccuacuucuucacccugcugcuccagcugugcaccuucacccgguccacgaacagccgcaucaaggccuccaugcccaccaccaucgccaagaacaccgucaagagcgugggcaaguucugccuggaggccagcuucaacuaccucaagucccccaacuucagcaagcugaucaacaucaucaucugguuccugcuccuguccgugugccugggcagccucaucuacuccacggccgcgcuggggguccugaugagcaaccucggcaugccguccuacugcaccggguaccgggagggcuaccugaacagcaccaacgugaccaucgccacguacugcaccggcuccauccccugcagcgugugccuguccgggcucgacagccuggacaccuaccccucccuggagaccauccagaucacgaucagcuccuucaagugggaccucaccgccuucggccuggucgccgagugguuccuggccuacauccucuucacccgcuucuucuacgugcuggggcuggcggccaucaugcagcucuucuucagcuacuucgccgugcacuucaucuccaacagcuggcugauguggcugaucaucaaccugguccagauggcccccaucuccgcgauggugcggauguacaucuucuucgccagcuucuacuacguguggaagagcuacguccacgugguggacggcugcaacuccagcaccugcaugaugugcuacaagcgcaaccgggccacgcgcgucgagugcaccaccaucgugaacgggguccggcgcuccuucuacguguacgccaacggcggcaagggguucugcaagcuccacaacuggaacugcgugaacugcgacaccuucugcgccggcagcacguucaucuccgacgaggucgcgcgggaccugagccugcaguucaagcgcccgaucaaccccaccgaccaguccagcuacaucguggacuccgugaccgucaagaacgggagcauccaccucuacuucgacaaggccggccagaagaccuacgagcggcacucccugagccacuucgugaaccuggacaaccuccgcgccaacaacacgaaggggucccugcccaucaacgugaucgucuucgacggcaagagcaagugcgaggaguccagcgccaaguccgccagcguguacuacucccagcugaugugccagcccauccuccugcuggaccaggcgcucgugagcgacgucggcgacagcgccgagguggccgugaagauguucgacgccuacgucaacaccuucuccagcaccuucaacgugccgauggagaagcugaagacccugguggccacggcggaggccgagcucgccaagaacgucucccuggacaacgugcugagcaccuucaucuccgccgcgcggcagggguucguggacagcgacgucgagaccaaggacgugguggagugccucaagcugucccaccagagcgacaucgaggucaccggcgacuccugcaacaacuacaugcugacguacaacaagguggagaacaugaccccccgcgaccucggggccugcaucgacugcagcgcccggcacaucaacgcccagguggccaagucccacaacaucgcgcugaucuggaacgucaaggacuucaugagccuguccgagcagcuccgcaagcagauccgcagcgccgccaagaagaacaaccugcccuucaagcugaccugcgccaccacgcggcagguggugaacgucgugaccaccaagaucgcccucaagggcggguga

SEQ ID NO: 18019 - RNA, 5841 nt, Artificial Sequence
  SARS-CoV-2__MT627391.1__non-structural protein 3 (NSP3) CDS gc
auggcccccaccaaggugaccuucggcgacgacacggucaucgaggugcagggguacaagagcgugaacaucaccuucgagcuggacgagcgcaucgacaagguccucaacgagaagugcuccgccuacaccguggagcugggcaccgaggugaacgaguucgcgugcgucguggccgacgccgugaucaagacgcugcagccggucagcgagcuccugaccccccuggggaucgaccucgacgagugguccauggccaccuacuaccuguucgacgagagcggcgaguucaagcuggccucccacauguacugcagcuucuacccccccgacgaggacgaggaggagggggacugcgaggaggaggaguucgagccguccacccaguacgaguacggcacggaggacgacuaccagggcaagccccucgaguucggggcgaccagcgccgcccugcagcccgaggaggagcaggaggaggacuggcuggacgacgacucccagcagaccgugggccagcaggacgggagcgaggacaaccagaccacgaccauccagaccaucguggagguccagccccagcucgagauggagcugaccccgguggugcagacgaucgaggucaacuccuucagcggcuaccugaagcucaccgacaacguguacaucaagaacgccgacaucguggaggaggcgaagaaggucaagcccaccgugguggucaacgccgccaacguguaccugaagcacgggggcggcguggccggggcccugaacaaggcgaccaacaacgccaugcaggucgaguccgacgacuacaucgccacgaacggcccccucaagguggggggcagcugcguccuguccggccacaaccuggccaagcacugccuccacgugguggggcccaacgucaacaagggcgaggacauccagcugcugaagagcgccuacgagaacuucaaccagcacgaggugcuccuggcgccgcugcucuccgccgggaucuucggcgccgaccccauccacagccugcgggugugcgucgacaccgugcgcaccaacguguaccuggccgucuucgacaagaaccucuacgacaagcugguguccagcuuccuggagaugaagagcgagaagcagguggagcagaagaucgccgagauccccaaggaggaggucaagcccuucaucaccgaguccaagccgagcguggagcagcggaagcaggacgacaagaagaucaaggcgugcguggaggaggucacgaccacccucgaggagaccaaguuccugacggagaaccugcuccuguacaucgacaucaacgggaaccugcaccccgacuccgccacccucgugagcgacaucgacaucaccuuccugaagaaggacgcccccuacaucgugggcgacgucgugcaggagggcgugcugaccgccgucgugauccccacgaagaaggccgggggcaccaccgagaugcucgcgaaggcccugcgcaaggugccgaccgacaacuacaucacgaccuaccccgggcagggccugaacggguacaccgucgaggaggccaagaccgugcucaagaagugcaaguccgccuucuacauccugcccagcaucaucuccaacgacaagcaggagauccugggcaccgugagcuggaaccuccgggagaugcuggcgcacgccgaggagacgcgcaagcugaugcccgucugcguggagaccaaggccaucguguccaccauccagcggaaguacaagggcaucaagauccaggagggggucguggacuacggcgcccgcuucuacuucuacaccagcaagacgaccguggccucccugaucaacacccucaacgaccugaacgagacccuggucacgaugccgcucggguacgugacccacggccugaaccuggaggaggcggcccgguacaugcgcagccucaaggugcccgccaccgucuccgugagcucccccgacgccgugaccgccuacaacggguaccugacgagcuccagcaagacccccgaggagcacuucaucgagaccaucucccuggcgggcagcuacaaggacuggagcuacuccggccagagcacccagcucgggaucgaguuccugaagcggggcgacaaguccgucuacuacacgagcaacccgaccaccuuccaccuggacggggaggugaucaccuucgacaaccucaagacgcugcugucccuccgcgaggugcggaccaucaaggucuucaccaccguggacaacaucaaccugcacacgcagguggucgacaugagcaugaccuacggccagcaguucggccccaccuaccuggacggggccgacgugaccaagaucaagccccacaacucccacgagggcaagacguucuacgugcucccgaacgacgacacccugcgcgucgaggccuucgaguacuaccacaccaccgaccccagcuuccuggggcgguacauguccgcccucaaccacacgaagaaguggaaguacccccaggugaacggccugaccagcaucaagugggccgacaacaacugcuaccuggcgaccgcccuccugacccugcagcagaucgagcucaaguucaaccccccggcccugcaggacgccuacuaccgcgcgcgggccggggaggccgccaacuucugcgcccugauccucgcguacugcaacaagacggugggcgagcugggcgacguccgcgagaccauguccuaccuguuccagcacgccaaccucgacagcugcaagcgggugcugaacgucgugugcaagaccugcgggcagcagcagaccacccugaagggcguggaggccgucauguacauggggacgcucuccuacgagcaguucaagaagggcgugcagauccccugcaccugcgggaagcaggccaccaaguaccuggugcagcaggagagccccuucgucaugauguccgcccccccggcgcaguacgagcugaagcacggcaccuucacgugcgccagcgaguacaccggcaacuaccagugcgggcacuacaagcacaucaccuccaaggagacccucuacugcaucgacggcgcccugcugacgaagagcagcgaguacaaggggcccaucaccgacguguucuacaaggagaacuccuacaccaccacgaucaagcccgugaccuacaagcucgacggcgucgugugcaccgagaucgaccccaagcuggacaacuacuacaagaaggacaacagcuacuucaccgagcagccgaucgaccuggugcccaaccagcccuaccccaacgccuccuucgacaacuucaaguucgucugcgacaacaucaaguucgccgacgaccucaaccagcugacgggguacaagaagccggcgagccgcgagcugaaggugaccuucuuccccgaccucaacggcgacguggucgccaucgacuacaagcacuacacccccuccuucaagaagggcgccaagcugcugcacaagcccaucguguggcacgugaacaacgccaccaacaaggcgacguacaagccgaacaccuggugcauccggugccucuggagcaccaagcccgucgagaccuccaacagcuucgacgugcugaaguccgaggacgcccaggggauggacaaccuggccugcgaggaccucaagcccgugagcgaggaggucguggagaaccccacgauccagaaggacgugcuggagugcaacgucaagaccaccgagguggugggcgacaucauccugaagccggccaacaacucccucaagaucaccgaggaggucgggcacacggaccugauggccgcguacguggacaacagcucccugaccaucaagaagcccaacgagcucagccgcgugcugggccugaagacccucgccacccacgggcuggccgccgucaacuccgugcccugggacacgaucgccaacuacgcgaagccguuccugaacaagguggucagcaccaccaccaacaucgugacgcgcugccucaaccgggugugcaccaacuacaugcccuacuucuucacccugcugcuccagcugugcaccuucacccgcuccacgaacagccggaucaaggccuccaugcccaccaccaucgccaagaacaccgucaagagcgugggcaaguucugccuggaggccagcuucaacuaccucaagucccccaacuucagcaagcugaucaacaucaucaucugguuccugcuccuguccgugugccugggcagccucaucuacuccacggccgcgcuggggguccugaugagcaaccucggcaugccguccuacugcaccggguaccgcgagggcuaccugaacagcaccaacgugaccaucgccacguacugcaccggcuccauccccugcagcgugugccuguccgggcucgacagccuggacaccuaccccucccuggagaccauccagaucacgaucagcuccuucaagugggaccucaccgccuucggccuggucgccgagugguuccuggccuacauccucuucacccgguucuucuacgugcuggggcuggcggccaucaugcagcucuucuucagcuacuucgccgugcacuucaucuccaacagcuggcugauguggcugaucaucaaccugguccagauggcccccaucuccgcgauggugcgcauguacaucuucuucgccagcuucuacuacguguggaagagcuacguccacgugguggacggcugcaacuccagcaccugcaugaugugcuacaagcggaaccgcgccacgcgggucgagugcaccaccaucgugaacgggguccgccgguccuucuacguguacgccaacggcggcaagggguucugcaagcuccacaacuggaacugcgugaacugcgacaccuucugcgccggcagcacguucaucuccgacgaggucgcgcgcgaccugagccugcaguucaagcggccgaucaaccccaccgaccaguccagcuacaucguggacuccgugaccgucaagaacgggagcauccaccucuacuucgacaaggccggccagaagaccuacgagcgccacucccugagccacuucgugaaccuggacaaccuccgggccaacaacacgaaggggucccugcccaucaacgugaucgucuucgacggcaagagcaagugcgaggaguccagcgccaaguccgccagcguguacuacucccagcugaugugccagcccauccuccugcuggaccaggcgcucgugagcgacgucggcgacagcgccgagguggccgugaagauguucgacgccuacgucaacaccuucuccagcaccuucaacgugccgauggagaagcugaagacccugguggccacggcggaggccgagcucgccaagaacgucucccuggacaacgugcugagcaccuucaucuccgccgcgcgccagggguucguggacagcgacgucgagaccaaggacgugguggagugccucaagcugucccaccagagcgacaucgaggucaccggcgacuccugcaacaacuacaugcugacguacaacaagguggagaacaugaccccccgggaccucggggccugcaucgacugcagcgcccgccacaucaacgcccagguggccaagucccacaacaucgcgcugaucuggaacgucaaggacuucaugagccuguccgagcagcuccggaagcagauccgcagcgccgccaagaagaacaaccugcccuucaagcugaccugcgccaccacgcgccagguggugaacgucgugaccaccaagaucgcccucaagggcggguga

SEQ ID NO: 18020 - RNA, 5841 nt, Artificial Sequence
  SARS-CoV-2__MT627395.1__non-structural protein 3 (NSP3) CDS gc
auggcccccaccaaggugaccuucggcgacgacacggucaucgaggugcagggguacaagagcgugaacaucaccuucgagcuggacgagcgcaucgacaagguccucaacgagaagugcuccgccuacaccguggagcugggcaccgaggugaacgaguucgcgugcgucguggccgacgccgugaucaagacgcugcagccggucagcgagcuccugacccugcucgggaucgaccuggacgagugguccauggccaccuacuaccuguucgacgagagcggcgaguucaagcucgccucccacauguacugcagcuucuacccccccgacgaggacgaggaggagggggacugcgaggaggaggaguucgagcccuccacccaguacgaguacggcacggaggacgacuaccagggcaagccgcuggaguucggggcgaccagcgccgcccugcagcccgaggaggagcaggaggaggacuggcucgacgacgacucccagcagaccgugggccagcaggacgggagcgaggacaaccagaccacgaccauccagaccaucguggagguccagccccagcuggagauggagcugacccccguggugcagacgaucgaggucaacuccuucagcggcuaccucaagcugaccgacaacguguacaucaagaacgccgacaucguggaggaggcgaagaaggucaagccgaccgugguggucaacgccgccaacguguaccugaagcacgggggcggcguggccggggcccucaacaaggcgaccaacaacgccaugcaggucgaguccgacgacuacaucgccacgaacggcccccugaagguggggggcagcugcguccuguccggccacaaccucgccaagcacugccugcacgugguggggcccaacgucaacaagggcgaggacauccagcugcucaagagcgccuacgagaacuucaaccagcacgaggugcugcuggcgccccuccuguccgccgggaucuucggcgccgacccgauccacagccugcgggugugcgucgacaccgugcgcaccaacguguaccucgccgucuucgacaagaaccuguacgacaagcugguguccagcuuccucgagaugaagagcgagaagcagguggagcagaagaucgccgagauccccaaggaggaggucaagcccuucaucaccgaguccaagcccagcguggagcagcggaagcaggacgacaagaagaucaaggcgugcguggaggaggucacgaccacccuggaggagaccaaguuccugacggagaaccuccugcuguacaucgacaucaacgggaaccuccacccggacuccgccacccuggugagcgacaucgacaucaccuuccugaagaaggacgcccccuacaucgugggcgacgucgugcaggagggcgugcucaccgccgucgugauccccacgaagaaggccgggggcaccaccgagaugcuggcgaaggcccugcgcaaggugcccaccgacaacuacaucacgaccuacccggggcagggccucaacggguacaccgucgaggaggccaagaccgugcugaagaagugcaaguccgccuucuacauccugcccagcaucaucuccaacgagaagcaggagauccucggcaccgugagcuggaaccugcgggagaugcuggcgcacgccgaggagacgcgcaagcugaugcccgucugcguggagaccaaggccaucguguccaccauccagcggaaguacaagggcaucaagauccaggagggggucguggacuacggcgcccgcuucuacuucuacaccagcaagacgaccguggccucccucaucaacacccugaacgaccugaacgagacccucgucacgaugccccugggguacgugacccacggccugaaccucgaggaggcggcccgguacaugcgcagccugaaggugccggccaccgucuccgugagcucccccgacgccgugaccgccuacaacggguaccugacgagcuccagcaagacccccgaggagcacuucaucgagaccaucucccucgcgggcagcuacaaggacuggagcuacuccggccagagcacccagcuggggaucgaguuccugaagcggggcgacaaguccgucuacuacacgagcaaccccaccaccuuccaccucgacggggaggugaucaccuucgacaaccugaagacgcugcucucccugcgcgaggugcggaccaucaaggucuucaccaccguggacaacaucaaccugcacacgcagguggucgacaugagcaugaccuacggccagcaguucggcccgaccuaccucgacggggccgacgugaccaagaucaagccccacaacucccacgagggcaagacguucuacgugcugcccaacgacgacacccugcgcgucgaggccuucgaguacuaccacaccaccgacccgagcuuccucgggcgguacauguccgcccugaaccacacgaagaaguggaaguacccccaggugaacggccugaccagcaucaagugggccgacaacaacugcuaccucgcgaccgcccugcugacccuccagcagaucgagcugaaguucaacccccccgcccugcaggacgccuacuaccgcgcgcgggccggggaggccgccaacuucugcgcccucauccuggcguacugcaacaagacggugggcgagcugggcgacguccgcgagaccauguccuaccucuuccagcacgccaaccuggacagcugcaagcgggugcugaacgucgugugcaagaccugcgggcagcagcagaccacccucaagggcguggaggccgucauguacauggggacgcuguccuacgagcaguucaagaagggcgugcagaucccgugcaccugcgggaagcaggccaccaaguaccuggugcagcaggagagccccuucgucaugauguccgccccccccgcgcaguacgagcucaagcacggcaccuucacgugcgccagcgaguacaccggcaacuaccagugcgggcacuacaagcacaucaccuccaaggagacccuguacugcaucgacggcgcccugcucacgaagagcagcgaguacaaggggccgaucaccgacguguucuacaaggagaacuccuacaccaccacgaucaagcccgugaccuacaagcuggacggcgucgugugcaccgagaucgaccccaagcuggacaacuacuacaagaaggacaacagcuacuucaccgagcagcccaucgaccucgugccgaaccagcccuaccccaacgccuccuucgacaacuucaaguucgucugcgacaacaucaaguucgccgacgaccugaaccagcugacgggguacaagaagcccgcgagccgcgagcucaaggugaccuucuucccggaccugaacggcgacguggucgccaucgacuacaagcacuacacccccuccuucaagaagggcgccaagcugcuccacaagcccaucguguggcacgugaacaacgccaccaacaaggcgacguacaagcccaacaccuggugcauccggugccuguggagcaccaagccggucgagaccuccaacagcuucgacgugcugaaguccgaggacgcccaggggauggacaaccucgccugcgaggaccugaagcccgugagcgaggaggucguggagaaccccacgauccagaaggacgugcuggagugcaacgucaagaccaccgagguggugggcgacaucauccucaagcccgccaacaacucccugaagaucaccgaggaggucgggcacacggaccugauggccgcguacguggacaacagcucccucaccaucaagaagccgaacgagcugagccgcgugcugggccucaagacccuggccacccacgggcuggccgccgucaacuccgugcccugggacacgaucgccaacuacgcgaagcccuuccucaacaagguggucagcaccaccaccaacaucgugacgcgcugccugaaccgggugugcaccaacuacaugccguacuucuucacccugcuccugcagcugugcaccuucacccgcuccacgaacagccggaucaaggccuccaugcccaccaccaucgccaagaacaccgucaagagcgugggcaaguucugccucgaggccagcuucaacuaccugaagucccccaacuucagcaagcugaucaacaucaucaucugguuccuccugcuguccgugugccucggcagccugaucuacuccacggccgcgcuggggguccucaugagcaaccugggcaugcccuccuacugcaccggguaccgcgagggcuaccugaacagcaccaacgugaccaucgccacguacugcaucggcuccaucccgugcagcgugugccucuccgggcuggacagccuggacaccuaccccucccucgagaccauccagaucaccaucagcuccuucaagugggaccugacggccuucggccuggucgccgagugguuccucgccuacauccuguucacccgguucuucuacgugcuggggcucgcggccaucaugcagcuguucuucagcuacuucgccgugcacuucaucuccaacagcuggcugauguggcugaucaucaaccucguccagauggcccccaucuccgcgauggugcgcauguacaucuucuucgccagcuucuacuacguguggaagagcuacguccacgugguggacggcugcaacuccagcaccugcaugaugugcuacaagcggaaccgcgccacccgggucgagugcacgaccaucgugaacgggguccgccgguccuucuacguguacgccaacggcggcaagggguucugcaagcugcacaacuggaacugcgugaacugcgacaccuucugcgccggcagcaccuucaucuccgacgaggucgcgcgcgaccugagccuccaguucaagcggcccaucaacccgacggaccaguccagcuacaucguggacuccgugaccgucaagaacgggagcauccaccuguacuucgacaaggccggccagaagaccuacgagcgccacucccugagccacuucgugaaccucgacaaccugcgggccaacaacaccaaggggucccugcccaucaacgugaucgucuucgacggcaagagcaagugcgaggaguccagcgccaaguccgccagcguguacuacucccagcucaugugccagcccauccugcugcucgaccaggcgcuggugagcgacgucggcgacagcgccgagguggccgugaagauguucgacgccuacgucaacacguucuccagcaccuucaacgugcccauggagaagcugaagacccucguggccaccgcggaggccgagcuggccaagaacgucucccuggacaacgugcucagcacguucaucuccgccgcgcgccagggguucguggacagcgacgucgagaccaaggacgugguggagugccugaagcugucccaccagagcgacaucgaggucaccggcgacuccugcaacaacuacaugcucaccuacaacaagguggagaacaugacgccgcgggaccugggggccugcaucgacugcagcgcccgccacaucaacgcccagguggccaagucccacaacaucgcgcugaucuggaacgucaaggacuucaugagccucuccgagcagcugcggaagcagauccgcagcgccgccaagaagaacaaccugcccuucaagcucaccugcgccaccacccgccagguggugaacgucgugacgaccaagaucgcccugaagggcggguga

SEQ ID NO: 18021 - RNA, 5841 nt, Artificial Sequence
  SARS-CoV-2__MT678839.1__non-structural protein 3 (NSP3) CDS gc
auggcccccaccaaggugaccuucggcgacgacacggucaucgaggugcagggguacaagagcgugaacaucaccuucgagcuggacgagcgcaucgacaagguccucaacgagaagugcuccgccuacaccguggagcugggcaccgaggugaacgaguucgcgugcgucguggccgacgccgugaucaagacgcugcagccggucagcgagcuccugaccccccuggggaucgaccucgacgagugguccauggccaccuacuaccuguucgacgagagcggcgaguucaagcuggccucccacauguacugcagcuucuacccccccgacgaggacgaggaggagggggacugcgaggaggaggaguucgagccguccacccaguacgaguacggcacggaggacgacuaccagggcaagccccucgaguucggggcgaccagcgccgcccugcagcccgaggaggagcaggaggaggacuggcuggacgacgacucccagcagaccgugggccagcaggacgggagcgaggacaaccagaccacgaccauccagaccaucguggagguccagccccagcucgagauggagcugaccccgguggugcagacgaucgaggucaacuccuucagcggcuaccugaagcucaccgacaacguguacaucaagaacgccgacaucguggaggaggcgaagaaggucaagcccaccgugguggucaacgccgccaacguguaccugaagcacgggggcggcguggccggggcccugaacaaggcgaccaacaacgccaugcaggucgaguccgacgacuacaucgccacgaacggcccccucaagguggggggcagcugcguccuguccggccacaaccuggccaagcacugccuccacgugguggggcccaacgucaacaagggcgaggacauccagcugcugaagagcgccuacgagaacuucaaccagcacgaggugcuccuggcgccgcugcucuccgccgggaucuucggcgccgaccccauccacagccugcgggugugcgucgacaccgugcgcaccaacguguaccuggccgucuucgacaagaaccucuacaacaagcugguguccagcuuccuggagaugaagagcgagaagcagguggagcagaagaucgccgagauccccaaggaggaggucaagcccuucaucaccgaguccaagccgagcguggagcagcggaagcaggacgacaagaagaucaaggcgugcguggaggaggucacgaccacccucgaggagaccaaguuccugacggagaaccugcuccuguacaucgacaucaacgggaaccugcaccccgacuccgccacccucgugagcgacaucgacaucaccuuccugaagaaggacgcccccuacaucgugggcgacgucgugcaggagggcgugcugaccgccgucgugauccccacgaagaaggccgggggcaccaccgagaugcucgcgaaggcccugcgcaaggugccgaccgacaacuacaucacgaccuaccccgggcagggccugaacggguacaccgucgaggaggccaagaccgugcucaagaagugcaaguccgccuucuacauccugcccagcaucaucuccaacgagaagcaggagauccugggcaccgugagcuggaaccuccgggagaugcuggcgcacgccgaggagacgcgcaagcugaugcccgucugcguggagaccaaggccaucguguccaccauccagcggaaguacaagggcaucaagauccaggagggggucguggacuacggcgcccgcuucuacuucuacaccagcaagacgaccguggccucccugaucaacacccucaacgaccugaacgagacccuggucacgaugccgcucggguacgugacccacggccugaaccuggaggaggcggcccgguacaugcgcagccucaaggugcccgccaccgucuccgugagcucccccgacgccgugaccgccuacaacggguaccugacgagcuccagcaagacccccgaggagcacuucaucgagaccaucucccuggcgggcagcuacaaggacuggagcuacuccggccagagcacccagcucgggaucgaguuccugaagcggggcgacaaguccgucuacuacacgagcaacccgaccaccuuccaccuggacggggaggugaucaccuucgacaaccucaagacgcugcugucccuccgcgaggugcggaccaucaaggucuucaccaccguggacaacaucaaccugcacacgcagguggucggcaugagcaugaccuacggccagcaguucgggcccaccuacuucgacggcgccgacgugaccaagaucaagccccacaacucccacgaggggaagacguucuacgugcugccgaacgacgacacccuccgcgucgaggccuucgaguacuaccacaccaccgaccccagcuuccugggccgguacauguccgcccugaaccacacgaagaaguggaaguacccccaggugaacgggcucaccagcaucaagugggccgacaacaacugcuaccuggcgaccgcccugcucacccugcagcagaucgagcugaaguucaaccccccggcccuccaggacgccuacuaccgcgcgcgggccggcgaggccgccaacuucugcgcccugauccuggcguacugcaacaagacggugggcgagcucggggacguccgcgagaccauguccuaccuguuccagcacgccaaccuggacagcugcaagcgggugcucaacgucgugugcaagaccugcggccagcagcagaccacccugaaggggguggaggccgucauguacaugggcacgcuguccuacgagcaguucaagaagggggugcagauccccugcaccugcggcaagcaggccaccaaguaccucgugcagcaggagagccccuucgucaugauguccgcccccccggcgcaguacgagcugaagcacggcaccuucacgugcgccagcgaguacaccgggaacuaccagugcggccacuacaagcacaucaccuccaaggagacccuguacugcaucgacggggcccuccugacgaagagcagcgaguacaagggccccaucaccgacguguucuacaaggagaacuccuacaccaccacgaucaagcccgugaccuacaagcuggacggggucgugugcaccgagaucgaccccaagcucgacaacuacuacaagaaggacaacagcuacuucaccgagcagccgaucgaccuggugcccaaccagcccuaccccuccgccagcuucgacaacuucaaguucgucugcgacaacaucaaguucgccgacgaccugaaccagcucacgggcuacaagaagccggcgucccgcgagcugaaggugaccuucuuccccgaccugaacggcgacguggucgccaucgacuacaagcacuacacccccagcuucaagaagggggccaagcuccugcacaagcccaucguguggcacgugaacaacgccaccaacaaggcgacguacaagccgaacaccuggugcauccggugccugugguccaccaagcccgucgagaccagcaacuccuucgacgugcucaagagcgaggacgcccagggcauggacaaccuggccugcgaggaccugaagcccguguccgaggaggucguggagaaccccacgauccagaaggacgugcucgagugcaacgucaagaccaccgagguggugggggacaucauccugaagccggccaacaacagccugaagaucaccgaggaggucggccacacggaccucauggccgcguacguggacaacuccagccugaccaucaagaagcccaacgagcugucccgcgugcucgggcugaagacccuggccacccacggccucgccgccgucaacagcgugcccugggacacgaucgccaacuacgcgaagccguuccugaacaagguggucuccaccaccaccaacaucgugacgcgcugccugaaccgggugugcaccaacuacaugcccuacuucuucacccuccugcugcagcucugcaccuucacccgcagcacgaacucccggaucaaggccagcaugcccaccaccaucgccaagaacaccgucaagagcgugggcaaguucugccuggaggccuccuucaacuaccugaagagccccaacuucuccaagcucaucaacaucaucaucugguuccugcugcucagcgugugccuggggucccugaucuacagcacggccgcgcucggcguccugauguccaaccuggggaugccgagcuacugcaccggcuaccgcgagggcuaccucaacuccaccaacgugaccaucgccacguacugcaccgggagcauccccugcuccgugugccugagcggccuggacucccucgacaccuaccccagccuggagaccauccagaucacgaucuccagcuucaagugggaccugaccgccuucgggcucgucgccgagugguuccuggccuacauccuguucacccgguucuucuacgugcucggccuggcggccaucaugcagcuguucuucuccuacuucgccgugcacuucaucagcaacuccuggcucauguggcugaucaucaaccuggcccagauggcgcccaucagcgccaugguccgcauguacaucuucuucgccagcuucuacuacguguggaaguccuacgugcacgucguggacgggugcaacagcuccaccugcaugaugugcuacaagcggaaccgcgccacgcggguggagugcaccaccaucgucaacggcgugcgccggagcuucuacgucuacgccaacggcgggaagggcuucugcaagcugcacaacuggaacugcgugaacugcgacaccuucugcgcgggguccacguucaucagcgacgagguggcccgcgaccucucccugcaguucaagcggccgaucaaccccaccgaccagagcuccuacaucgucgacagcgugaccgugaagaacggcuccauccaccuguacuucgacaaggccgggcagaagaccuacgagcgccacagccucucccacuucgucaaccuggacaaccugcgggccaacaacacgaagggcagccuccccaucaacgugaucguguucgacggcaaguccaagugcgaggagagcuccgccaagagcgcguccgucuacuacagccagcugaugugccagcccauccugcuccuggaccaggcccuggugagcgacgugggggacuccgccgaggucgccgugaagauguucgacgccuacgugaacaccuucagcuccaccuucaacgucccgauggagaagcucaagacccugguggcgacggccgaggccgagcuggccaagaacgugagccucgacaacguccuguccaccuucaucagcgcggcccgccagggcuucguggacuccgacguggagaccaaggacgucguggagugccugaagcucagccaccaguccgacaucgaggugaccggggacagcugcaacaacuacaugcugacguacaacaaggucgagaacaugaccccccgggaccugggcgccugcaucgacugcuccgcccgccacaucaacgcccagguggcgaagagccacaacaucgcccucaucuggaacgugaaggacuucaugucccugagcgagcagccccggaagcagauccgcuccgccgccaagaagaacaaccugcccuucaagcucaccugcgccaccacgcgccaggucgugaacgcggugaccaccaagaucgcccugaaggggggcuga

SEQ ID NO: 18022 - RNA, 5841 nt, Artificial Sequence
  SARS-CoV-2__MT679161.1__non-structural protein 3 (NSP3) CDS gc
auggcccccaccaaggugaccuucggcgacgacacggucaucgaggugcagggguacaagagcgugaacaucaccuucgagcuggacgagcgcaucgacaagguccucaacgagaagugcuucgccuacaccguggagcugggcaccgaggugaacgaguucgcgugcgucguggccgacgccgugaucaagacgcugcagccggucuccgagcuccugaccccccuggggaucgaccucgacgaguggagcauggccaccuacuaccuguucgacgaguccggcgaguucaagcuggccagccacauguacugcuccuucuacccccccgacgaggacgaggaggagggggacugcgaggaggaggaguucgagccgagcacccaguacgaguacggcacggaggacgacuaccagggcaagccccucgaguucggggcgaccuccgccgcccugcagcccgaggaggagcaggaggaggacuggcuggacgacgacagccagcagaccgugggccagcaggacggguccgaggacaaccagaccacgaccauccagaccaucguggagguccagccccagcucgagauggagcugaccccgguggugcagacgaucgaggucaacagcuucuccggcuaccugaagcucaccgacaacguguacaucaagaacgccgacaucguggaggaggcgaagaaggucaagcccaccgugguggucaacgccgccaacguguaccugaagcacgggggcggcguggccggggcccugaacaaggcgaccaacaacgccaugcaggucgagagcgacgacuacaucgccacgaacggcccccucaagguggggggcuccugcguccugagcggccacaaccuggccaagcacugccuccacgugguggggcccaacgucaacaagggcgaggacauccagcugcugaaguccgccuacgagaacuucaaccagcacgaggugcuccuggcgccgcugcucagcgccgggaucuucggcgccgaccccauccacucccugcgggugugcgucgacaccgugcgcaccaacguguaccuggccgucuucgacaagaaccucuacgacaagcuggugagcuccuuccuggagaugaagagcgagaagcagguggagcagaagaucgccgagauccccaaggaggaggucaagcccuucaucaccgagagcaagccguccguggagcagcggaagcaggacgacaagaagaucaaggcgugcguggaggaggucacgaccacccucgaggagaccaaguuccugacggagaaccugcuccuguacaucgacaucaacgggaaccugcaccccgacagcgccacccucguguccgacaucgacaucaccuuccugaagaaggacgcccccuacaucgugggcgacgucgugcaggagggcgugcugaccgccgucgugauccccacgaagaaggccgggggcaccaccgagaugcucgcgaaggcccugcgcaaggugccgaccgacaacuacaucacgaccuaccccgggcagggccugaacggguacaccgucgaggaggccaagaccgugcucaagaagugcaagagcgccuucuacauccugcccuccaucaucagcaacgagaagcaggagauccugggcaccguguccuggaaccuccgggagaugcuggcgcacgccgaggagacgcgcaagcugaugcccgucugcguggagaccaaggccaucgugagcaccauccagcggaaguacaagggcaucaagauccaggagggggucguggacuacggcgcccgcuucuacuucuacaccuccaagacgaccguggccagccugaucaacacccucaacgaccugaacgagacccuggucacgaugccgcucggguacgugacccacggccugaaccuggaggaggcggcccgguacaugcgcucccucaaggugcccgccaccgucagcguguccagccccgacgccgugaccgccuacaacggguaccugacguccagcuccaagacccccgaggagcacuucaucgagaccaucagccuggcgggcuccuacaaggacuggagcuacagcggccaguccacccagcucgggaucgaguuccugaagcggggcgacaagagcgucuacuacacguccaacccgaccaccuuccaccuggacggggaggugaucaccuucgacaaccucaagacgcugcugagccuccgcgaggugcggaccaucaaggucuucaccaccguggacaacaucaaccugcacacgcagguggucgacauguccaugaccuacggccagcaguucggccccaccuaccuggacggggccgacgugaccaagaucaagccccacaacagccacgagggcaagacguucuacgugcucccgaacgacgacacccugcgcgucgaggccuucgaguacuaccacaccaccgaccccuccuuccuggggcgguacaugagcgcccucaaccacacgaagaaguggaaguacccccaggugaacggccugaccuccaucaagugggccgacaacaacugcuaccuggcgaccgcccuccugacccugcagcagaucgagcucaaguucaaccccccggcccugcaggacgccuacuaccgcgcgcgggccggggaggccgccaacuucugcgcccugauccucgcguacugcaacaagacggugggcgagcugggcgacguccgcgagaccaugagcuaccuguuccagcacgccaaccucgacuccugcaagcgggugcugaacgucgugugcaagaccugcgggcagcagcagaccacccugaagggcguggaggccgucauguacauggggacgcucagcuacgagcaguucaagaagggcgugcagauccccugcaccugcgggaagcaggccaccaaguaccuggugcagcaggagucccccuucgucaugaugagcgcccccccggcgcaguacgagcugaagcacggcaccuucacgugcgccuccgaguacaccggcaacuaccagugcgggcacuacaagcacaucaccagcaaggagacccucuacugcaucgacggcgcccugcugacgaaguccagcgaguacaaggggcccaucaccgacguguucuacaaggagaacagcuacaccaccacgaucaagcccgugaccuacaagcucgacggcgucgugugcaccgagaucgaccccaagcuggacaacuacuacaagaaggacaacuccuacuucaccgagcagccgaucgaccuggugcccaaccagcccuaccccaacgccagcuucgacaacuucaaguucgucugcgacaacaucaaguucgccgacgaccucaaccagcugacgggguacaagaagccggcgucccgcgagcugaaggugaccuucuuccccgaccucaacggcgacguggucgccaucgacuacaagcacuacacccccagcuucaagaagggcgccaagcugcugcacaagcccaucguguggcacgugaacaacgccaccaacaaggcgacguacaagccgaacaccuggugcauccggugccucugguccaccaagcccgucgagaccagcaacuccuucgacgugcugaagagcgaggacgcccaggggauggacaaccuggccugcgaggaccucaagcccguguccgaggaggucguggagaaccccacgauccagaaggacgugcuggagugcaacgucaagaccaccgagguggugggcgacaucauccugaagccggccaacaacagccucaagaucaccgaggaggucgggcacacggaccugauggccgcguacguggacaacuccagccugaccaucaagaagcccaacgagcucucccgcgugcugggccugaagacccucgccacccacgggcuggccgccgucaacagcgugcccugggacacgaucgccaacuacgcgaagccguuccugaacaagguggucuccaccaccaccaacaucgugacgcgcugccucaaccgggugugcaccaacuacaugcccuacuucuucacccugcugcuccagcugugcaccuucacccgcagcacgaacucccggaucaaggccagcaugcccaccaccaucgccaagaacaccgucaaguccgugggcaaguucugccuggaggccagcuucaacuaccucaagagccccaacuucuccaagcugaucaacaucaucaucugguuccugcuccugagcgugugccugggcucccucaucuacagcacggccgcgcuggggguccugauguccaaccucggcaugccgagcuacugcaccggguaccgcgagggcuaccugaacuccaccaacgugaccaucgccacguacugcaccggcagcauccccugcuccgugugccugagcgggcucgacucccuggacaccuaccccagccuggagaccauccagaucacgaucuccagcuucaagugggaccucaccgccuucggccuggucgccgagugguuccuggccuacauccucuucacccgguucuucuacgugcuggggcuggcggccaucaugcagcucuucuucuccuacuucgccgugcacuucaucagcaacuccuggcugauguggcugaucaucaaccugguccagauggcccccaucagcgcgauggugcgcauguacaucuucuucgccuccuucuacuacguguggaagagcuacguccacgugguggacggcugcaacagcuccaccugcaugaugugcuacaagcggaaccgcgccacgcgggucgagugcaccaccaucgugaacgggguccgccggagcuucuacguguacgccaacggcggcaagggguucugcaagcuccacaacuggaacugcgugaacugcgacaccuucugcgccggcuccacguucaucagcgacgaggucgcgcgcgaccugucccugcaguucaagcggccgaucaaccccaccgaccagagcuccuacaucguggacagcgugaccgucaagaacggguccauccaccucuacuucgacaaggccggccagaagaccuacgagcgccacagccugucccacuucgugaaccuggacaaccuccgggccaacaacacgaaggggagccugcccaucaacgugaucgucuucgacggcaaguccaagugcgaggagagcuccgccaagagcgccuccguguacuacagccagcugaugugccagcccauccuccugcuggaccaggcgcucguguccgacgucggcgacagcgccgagguggccgugaagauguucgacgccuacgucaacaccuucagcuccaccuucaacgugccgauggagaagcugaagacccugguggccacggcggaggccgagcucgccaagaacgucagccuggacaacgugcuguccaccuucaucagcgccgcgcgccagggguucguggacuccgacgucgagaccaaggacgugguggagugccucaagcugagccaccaguccgacaucgaggucaccggcgacagcugcaacaacuacaugcugacguacaacaagguggagaacaugaccccccgggaccucggggccugcaucgacugcuccgcccgccacaucaacgcccagguggccaagagccacaacaucgcgcugaucuggaacgucaaggacuucaugucccugagcgagcagcuccggaagcagauccgcuccgccgccaagaagaacaaccugcccuucaagcugaccugcgccaccacgcgccagguggugaacgucgugaccaccaagaucgcccucaagggcggguga

SEQ ID NO: 18023 - RNA, 5841 nt, Artificial Sequence
  SARS-CoV-2__MT679198.1__non-structural protein 3 (NSP3) CDS gc
auggcccccaccaaggugaccuucggcgacgacacggucaucgaggugcagggguacaagagcgugaacaucaccuucgagcuggacgagcgcaucgacaagguccucaacgagaagugcuccgccuacaccguggagcugggcaccgaggugaacgaguucgcgugcgucguggccgacgccgugaucaagacgcugcagccggucagcgagcuccugaccccccuggggaucgaccucgacgagugguccauggccaccuacuaccuguucgacgagagcggcgaguucaagcuggccucccacauguacugcagcuucuacccccccgacgaggacgaggaggagggggacugcgaggaggaggaguucgagccguccacccaguacgaguacggcacggaggacgacuaccagggcaagccccucgaguucggggcgaccagcgccgcccugcagcccgaggaggagcaggaggaggacuggcuggacgacgacucccagcagaccgugggccagcaggacgggagcgaggacaaccagaccacgaccauccagaccaucguggagguccagccccagcucgagauggagcugaccccgguggugcagacgaucgaggucaacuccuucagcggcuaccugaagcucaccgacaacguguacaucaagaacgccgacaucguggaggaggcgaagaaggucaagcccaccgugguggucaacgccgccaacguguaccugaagcacgggggcggcguggccggggcccugaacaaggcgaccaacaacgccaugcaggucgaguccgacgacuacaucgccacgaacggcccccucaagguggggggcagcugcguccuguccggccacaaccuggccaagcacugccuccacgugguggggcccaacgucaacaagggcgaggacauccagcugcugaagagcgccuacgagaacuucaaccagcacgaggugcuccuggcgccgcugcucuccgccgggaucuucggcgccgaccccauccacagccugcgggugugcgucgacaccgugcgcaccaacguguaccuggccgucuucgacaagaaccucuacgacaagcugguguccagcuuccuggagaugaagagcgagaagcagguggagcagaagaucgccgagauccccaaggaggaggucaagcccuucaucaccgaguccaagccgagcguggagcagcggaagcaggacgacaagaagaucaaggcgugcguggaggaggucacgaccacccucgaggagaccaaguuccugacggagaaccugcuccuguacaucgacaucaacgggaaccugcaccccgacuccgccacccucgugagcgacaucgacaucaccuuccugaagaaggacgcccccuacaucgugggcgacgucgugcaggagggcgugcugaccgccgucgugauccccacgaagaaggccgggggcaccaccgagaugcucgcgaaggcccugcgcaaggugccgaccgacaacuacaucacgaccuaccccgggcagggccugaacggguacaccgucgaggaggccaagaccgugcucaagaagugcaaguccgccuucuacauccugcccagcaucaucuccaacgagaagcaggagauccugggcaccgugagcuggaaccuccgggagaugcuggcgcacgccgaggagacgcgcaagcugaugcccgucugcguggagaccaaggccaucguguccaccauccagcggaaguacaagggcaucaagauccaggagggggucguggacuacggcgcccgcuucuacuucuacaccagcaaggccacgguggcgucccugaucaacacccucaacgaccugaacgagacccuggucaccaugccgcucggguacgugacgcacggccugaaccuggaggaggccgcccgguacaugcgcagccucaaggugcccgccaccgucuccgugagcucccccgacgccgugaccgcguacaacggguaccugaccagcuccagcaagacgcccgaggagcacuucaucgagaccaucucccuggccggcagcuacaaggacuggagcuacuccggccagagcacccagcucgggaucgaguuccugaagcggggcgacaaguccgucuacuacaccagcaacccgacgaccuuccaccuggacggggaggugaucaccuucgacaaccucaagacccugcugucccuccgcgaggugcggacgaucaaggucuucaccaccguggacaacaucaaccugcacacccagguggucgacaugagcaugacguacggccagcaguucggccccaccuaccuggacggggccgacgugaccaagaucaagccccacaacucccacgagggcaagaccuucuacgugcucccgaacgacgacacgcugcgcgucgaggccuucgaguacuaccacaccaccgaccccagcuuccuggggcgguacauguccgcccucaaccacaccaagaaguggaaguacccccaggugaacggccugacgagcaucaagugggcggacaacaacugcuaccuggccaccgcccuccugacccugcagcagaucgagcucaaguucaaccccccggcccugcaggacgcguacuaccgcgcccgggccggggaggccgccaacuucugcgcgcugauccucgccuacugcaacaagaccgugggcgagcugggcgacguccgcgagacgauguccuaccuguuccagcacgccaaccucgacagcugcaagcgggugcugaacgucgugugcaagaccugcgggcagcagcagaccacccugaagggcguggaggccgucauguacauggggacccucuccuacgagcaguucaagaagggcgugcagauccccugcacgugcgggaagcaggccaccaaguaccuggugcagcaggagagccccuucgucaugauguccgcgcccccggcccaguacgagcugaagcacggcaccuucaccugcgccagcgaguacacgggcaacuaccagugcgggcacuacaagcacaucaccuccaaggagacccucuacugcaucgacggcgcccugcugaccaagagcagcgaguacaaggggcccaucacggacguguucuacaaggagaacuccuacaccaccaccaucaagcccgugacguacaagcucgacggcgucgugugcaccgagaucgaccccaagcuggacaacuacuacaagaaggacaacagcuacuucaccgagcagccgaucgaccuggugcccaaccagcccuaccccaacgccuccuucgacaacuucaaguucgucugcgacaacaucaaguucgcggacgaccucaaccagcugaccggguacaagaagccggccagccgcgagcugaaggugacguucuuccccgaccucaacggcgacguggucgccaucgacuacaagcacuacacccccuccuucaagaagggcgccaagcugcugcacaagcccaucguguggcacgugaacaacgcgaccaacaaggccaccuacaagccgaacacguggugcauccggugccucuggagcaccaagcccgucgagaccuccaacagcuucgacgugcugaaguccgaggacgcccaggggauggacaaccuggccugcgaggaccucaagcccgugagcgaggaggucguggagaaccccaccauccagaaggacgugcuggagugcaacgucaagacgaccgagguggugggcgacaucauccugaagccggccaacaacucccucaagaucaccgaggaggucgggcacaccgaccugauggcggccuacguggacaacagcucccugacgaucaagaagcccaacgagcucagccgcgugcugggccugaagacccucgccacccacgggcuggccgccgucaacuccgugcccugggacaccaucgcgaacuacgccaagccguuccugaacaagguggucagcacgaccaccaacaucgugacccgcugccucaaccgggugugcacgaacuacaugcccuacuucuucacccugcugcuccagcugugcaccuucacccgcuccaccaacagccggaucaaggccuccaugcccacgaccaucgccaagaacaccgucaagagcgugggcaaguucugccuggaggccagcuucaacuaccucaagucccccaacuucagcaagcugaucaacaucaucaucugguuccugcuccuguccgugugccugggcagccucaucuacuccaccgcggcccuggggguccugaugagcaaccucggcaugccguccuacugcacgggguaccgcgagggcuaccugaacagcaccaacgugaccaucgccaccuacugcacgggcuccauccccugcagcgugugccuguccgggcucgacagccuggacaccuaccccucccuggagaccauccagaucaccaucagcuccuucaagugggaccucacggccuucggccuggucgccgagugguuccuggcguacauccucuucacccgguucuucuacgugcuggggcuggccgccaucaugcagcucuucuucagcuacuucgccgugcacuucaucuccaacagcuggcugauguggcugaucaucaaccugguccagauggcgcccaucuccgccauggugcgcauguacaucuucuucgccagcuucuacuacguguggaagagcuacguccacgugguggacggcugcaacuccagcaccugcaugaugugcuacaagcggaaccgcgccacccgggucgagugcacgaccaucgugaacgggguccgccgguccuucuacguguacgccaacggcggcaagggguucugcaagcuccacaacuggaacugcgugaacugcgacaccuucugcgcgggcagcaccuucaucuccgacgaggucgcccgcgaccugagccugcaguucaagcggccgaucaaccccacggaccaguccagcuacaucguggacuccgugaccgucaagaacgggagcauccaccucuacuucgacaaggccggccagaagaccuacgagcgccacucccugagccacuucgugaaccuggacaaccuccgggccaacaacaccaaggggucccugcccaucaacgugaucgucuucgacggcaagagcaagugcgaggaguccagcgccaaguccgcgagcguguacuacucccagcugaugugccagcccauccuccugcuggaccaggcccucgugagcgacgucggcgacagcgccgagguggccgugaagauguucgacgccuacgucaacacguucuccagcaccuucaacgugccgauggagaagcugaagacccugguggcgaccgccgaggccgagcucgccaagaacgucucccuggacaacgugcugagcacguucaucuccgcggcccgccagggguucguggacagcgacgucgagaccaaggacgugguggagugccucaagcugucccaccagagcgacaucgaggucaccggcgacuccugcaacaacuacaugcugaccuacaacaagguggagaacaugacgccccgggaccucggggccugcaucgacugcagcgcccgccacaucaacgcccagguggcgaagucccacaacaucgcccugaucuggaacgucaaggacuucaugagccuguccgagcagcuccggaagcagauccgcagcgccgccaagaagaacaaccugcccuucaagcugaccugcgccaccacccgccagguggugaacgucgugacgaccaagaucgcgcucaagggcggguga

SEQ ID NO: 18024 - RNA, 5841 nt, Artificial Sequence
  SARS-CoV-2__MT680218.1__non-structural protein 3 (NSP3) CDS gc
auggcccccaccaaggugaccuucggcgacgacacggucaucgaggugcagggguacaagagcgugaacaucaccuucgagcuggacgagcgcaucgacaagguccucaacgagaagugcuccgccuacaccguggagcugggcaccgaggugaacgaguucgcgugcgucguggccgacgccgugaucaagacgcugcagccggucagcgagcuccugaccccccuggggaucgaccucgacgagugguccauggccaccuacuaccuguucgacgagagcggcgaguucaagcuggccucccacauguacugcagcuucuacccccccgacgaggacgaggaggagggggacugcgaggaggaggaguucgagccguccacccaguacgaguacggcacggaggacgacuaccagggcaagccccucgaguucggggcgaccagcgccgcccugcagcccgaggaggagcaggaggaggacuggcuggacgacgacucccagcagaccgugggccagcaggacgggagcgaggacaaccagaccacgaccauccagaccaucguggagguccagccccagcucgagauggagcugaccccgguggugcagacgaucgaggucaacuccuucagcggcuaccugaagcucaccgacaacguguacaucaagaacgccgacaucguggaggaggcgaagaaggucaagcccaccgugguggucaacgccgccaacguguaccugaagcacgggggcggcguggccggggcccugaacaaggcgaccaacaacgccaugcaggucgaguccgacgacuacaucgccacgaacggcccccucaagguggggggcagcugcguccuguccggccacaaccuggccaagcacugccuccacgugguggggcccaacgucaacaagggcgaggacauccagcugcugaagagcgccuacgagaacuucaaccagcacgaggugcuccuggcgccgcugcucuccgccgggaucuucggcgccgaccccauccacagccugcgggugugcgucgacaccgugcgcaccaacguguaccuggccgucuucgacaagaaccucuacgacaagcugguguccagcuuccuggagaugaagagcgagaagcagguggagcagaagaucgccgagauccccaaggaggaggucaagcccuucaucaccgaguccaagccgagcguggagcagcggaagcaggacgacaagaagaucaaggcgugcguggaggaggucacgaccacccucgaggagaccaaguuccugacggagaaccugcuccuguacaucgacaucaacgggaaccugcaccccgacuccgccacccucgugagcgacaucgacaucaccuuccugaagaaggacgcccccuacaucgugggcgacgucgugcaggagggcgugcugaccgccgucgugauccccacgaagaaggccgggggcaccaccgagaugcucgcgaaggcccugcgcaaggugccgaccgacaacuacaucacgaccuaccccgggcagggccugaacggguacaccgucgaggaggccaagaccgugcucaagaagugcaaguccgccuucuacauccugcccagcaucaucuccaacgagaagcaggagauccugggcaccgugagcuggaaccuccgggagaugcuggcgcacgccgaggagacgcgcaagcugaugcccgucugcguggagaccaaggccaucguguccaccauccagcggaaguacaagggcaucaagauccaggagggggucguggacuacggcgcccgcuucuacuucuacaccagcaagacgaccguggccucccugaucaacacccucaacgaccugaacgagacccuggucacgaugccgcucggguacgugacccacggccugaaccuggaggaggcggcccgguacaugcgcagccucaaggugcccgccaccgucuccgugagcucccccgacgccgugaccgccuacaacggguaccugacgagcuccagcaagacccccgaggagcacuucaucgagaccaucucccuggcgggcagcuacaaggacuggagcuacuccggccagagcacccagcucgggaucgaguuccugaagcggggcgacaaguccgucuacuacacgagcaacccgaccaccuuccaccuggacggggaggugaucaccuucgacaaccucaagacgcugcugucccuccgcgaggugcggaccaucaaggucuucaccaccguggacaacaucaaccugcacacgcagguggucgacaugagcaugaccuacggccagcaguucggccccaccuaccuggacggggccgacgugaccaagaucaagccccacaacucccacgagggcaagacguucuacgugcucccgaacgacgacacccugcgcgucgaggccuucgaguacuaccacaccaccgaccccagcuuccuggggcgguacauguccgcccucaaccacacgaagaaguggaaguacccccaggugaacggccugaccagcaucaagugggccgacaacaacugcuaccuggcgaccgcccuccugacccugcagcagaucgagcucaaguucaaccccccggcccugcaggacgccuacuaccgcgcgcgggccggggaggccgccaacuucugcgcccugauccucgcguacugcaacaagacggugggcgagcugggcgacguccgcgagaccauguccuaccuguuccagcacgccaaccucgacagcugcaagcgggugcugaacgucgugugcaagaccugcgggcagcagcagaccacccugaagggcguggaggccgucauguacauggggacgcucuccuacgagcaguucaagaagggcgugcagauccccugcaccugcgggaagcaggccaccaaguaccuggugcagcaggagagccccuucgucaugauguccgcccccccggcgcaguacgagcugaagcacggcaccuucacgugcgccagcgaguacaccggcaacuaccagugcgggcacuacaagcacaucaccuccaaggagacccucuacugcaucgacggcgcccugcugacgaagagcagcgaguacaaggggcccaucaccgacguguucuacaaggagaacuccuacaccaccacgaucaagcccgugaccuacaagcucgacggcgucgugugcaccgagaucgaccccaagcuggacaacuacuacaagaaggacaacagcuacuucaccgagcagccgaucgaccuggugcccaaccagcccuaccccaacgccuccuucgacaacuucaaguucgucugcgacaacaucaaguucgccgacgaccucaaccagcugacgggguacaagaagccggcgagccgcgagcugaaggugaccuucuuccccgaccucaacggcgacguggucgccaucgacuacaagcacuacacccccuccuucaagaagggcgccaagcugcugcacaagcccaucguguggcacgugaacaacgccaccaacaaggcgacguacaagccgaacaccuggugcauccggugccucuggagcaccaagcccgucgagaccuccaacagcuucgacgugcugaaguccgaggacgcccaggggauggacaaccuggccugcgaggaccucaagcccgugagcgaggaggucguggagaaccccacgauccagaaggacgugcuggagugcaacgucaagaccaccgagguggugggcgacaucauccugaagccggccaacaucaagaucaccgaggaggucgggcacacggaccucauggccgcguacguggacaacuccagccugaccaucaagaagcccaacgagcugucccgcgugcucggccugaagacccuggccacccacgggcucgccgccgucaacagcgugcccugggacacgaucgccaacuacgcgaagccguuccugaacaagguggucuccaccaccaccaacaucgugacgcgcugccugaaccgggugugcaccaacuacaugcccuacuucuucacccuccugcugcagcucugcaccuucacccgcagcacgaacucccggaucaaggccagcaugcccaccaccaucgccaagaacaccgucaaguccgugggcaaguucugccuggaggccagcuucaacuaccugaagagccccaacuucuccaagcucaucaacaucaucaucugguuccugcugcucagcgugugccugggcucccugaucuacagcacggccgcgcucgggguccugauguccaaccugggcaugccgagcuacugcaccggguaccgcgagggcuaccucaacuccaccaacgugaccaucgccacguacugcaccggcagcauccccugcuccgugugccugagcgggcuggacucccucgacaccuaccccagccuggagaccauccagaucacgaucuccagcuucaagugggaccugaccgccuucggccucgucgccgagugguuccuggccuacauccuguucacccgguucuucuacgugcucgggcuggcggccaucaugcagcuguucuucuccuacuucgccgugcacuucaucagcaacuccuggcucauguggcugaucaucaaccugguccagauggcccccaucagcgcgauggugcgcauguacaucuucuucgccuccuucuacuacguguggaagagcuacguccacgugguggacggcugcaacagcuccaccugcaugaugugcuacaagcggaaccgcgccacgcgggucgagugcaccaccaucgugaacgggguccgccggagcuucuacguguacgccaacggcggcaagggguucugcaagcugcacaacuggaacugcgugaacugcgacaccuucugcgccggcuccacguucaucagcgacgaggucgcgcgcgaccucucccugcaguucaagcggccgaucaaccccaccgaccagagcuccuacaucguggacagcgugaccgucaagaacggguccauccaccuguacuucgacaaggccggccagaagaccuacgagcgccacagccucucccacuucgugaaccuggacaaccugcgggccaacaacacgaaggggagccuccccaucaacgugaucgucuucgacggcaaguccaagugcgaggagagcuccgccaagagcgccuccguguacuacagccagcugaugugccagcccauccugcuccuggaccaggcgcugguguccgacgucggcgacagcgccgagguggccgugaagauguucgacgccuacgucaacaccuucagcuccaccuucaacgugccgauggagaagcucaagacccugguggccacggcggaggccgagcuggccaagaacgucagccucgacaacgugcuguccaccuucaucagcgccgcgcgccagggguucguggacuccgacgucgagaccaaggacgugguggagugccugaagcucagccaccaguccgacaucgaggucaccggcgacagcugcaacaacuacaugcugacguacaacaagguggagaacaugaccccccgggaccugggggccugcaucgacugcuccgcccgccacaucaacgcccagguggccaagagccacaacaucgcgcucaucuggaacgucaaggacuucaugucccugagcgagcagcugcggaagcagauccgcuccgccgccaagaagaacaaccuccccuucaagcugaccugcgccaccacgcgccagguggugaacgucgugaccaccaagaucgcccugaagggcgggaagaucuga

SEQ ID NO: 18025 - RNA, 5841 nt, Artificial Sequence
  SARS-CoV-2__MT680242.1__non-structural protein 3 (NSP3) CDS gc
auggcccccaccaaggugaccuucggcgacgacacggucaucgaggugcagggguacaagagcgugaacaucaccuucgagcuggacgagcgcaucgacaagguccucaacgagaagugcuccgccuacaccguggagcugggcaccgaggugaacgaguucgcgugcgucguggccgacgccgugaucaagacgcugcagccggucagcgagcuccugaccccccuggggaucgaccucgacgagugguccauggccaccuacuaccuguucgacgagagcggcgaguucaagcuggccucccacauguacugcagcuucuacccccccgacgaggacgaggaggagggggacugcgaggaggaggaguucgagccguccacccaguacgaguacggcacggaggacgacuaccagggcaagccccucgaguucggggcgaccagcgccgcccugcagcccgaggaggagcaggaggaggacuggcuggacgacgacucccagcagaccgugggccagcaggacgggagcgaggacaaccagaccacgaccauccagaccaucguggagguccagccccagcucgagauggagcugaccccgguggugcagacgaucgaggucaacuccuucagcggcuaccugaagcucaccgacaacguguacaucaagaacgccgacaucguggaggaggcgaagaaggucaagcccaccgugguggucaacgccgccaacguguaccugaagcacgggggcggcguggccggggcccugaacaaggcgaccaacaacgccaugcaggucgaguccgacgacuacaucgccacgaacggcccccucaagguggggggcagcugcguccuguccggccacaaccuggccaagcacugccuccacgugguggggcccaacgucaacaagggcgaggacauccagcugcugaagagcgccuacgagaacuucaaccagcacgaggugcuccuggcgccgcugcucuccgccgggaucuucggcgccgaccccauccacagccugcgggugugcgucgacaccgugcgcaccaacguguaccuggccgucuucgacaagaaccucuacgacaagcugguguccagcuuccuggagaugaagagcgagaagcagguggagcagaagaucgccgagauccccaaggaggaggucaagcccuucaucaccgaguccaagccgagcguggagcagcggaagcaggacgacaagaagaucaaggcgugcguggaggaggucacgaccacccucgaggagaccaaguuccugacggagaaccugcuccuguacaucgacaucaacgggaaccugcaccccgacuccgccacccucgugagcgacaucgacaucaccuuccugaagaaggacgcccccuacaucgugggcgacgucgugcaggagggcgugcugaccgccgucgugauccccacgaagaaggccgggggcaccaccgagaugcucgcgaaggcccugcgcaaggugccgaccgacaacuacaucacgaccuaccccgggcagggccugaacggguacaccgucgaggaggccaagaccgugcucaagaagugcaaguccgccuucuacauccugcccagcaucaucuccaacgagaagcaggagauccugggcaccgugagcuggaaccuccgggagaugcuggcgcacgccgaggagacgcgcaagcugaugcccgucugcguggagaccaaggccaucguguccaccauccagcggaaguacaagggcaucaagauccaggagggggucguggacuacggcgcccgcuucuacuucuacaccagcaagacgaccguggccucccugaucaacacccucaacgaccugaacgagacccuggucacgaugccgcucggguacgugacccacggccugaaccuggaggaggcggcccgguacaugcgcuuccucaaggugcccgccaccgucagcguguccagccccgacgccgugaccgccuacaacggguaccugacguccagcuccaagacccccgaggagcacuucaucgagaccaucagccuggcgggcuccuacaaggacuggagcuacagcggccaguccacccagcucgggaucgaguuccugaagcggggcgacaagagcgucuacuacacguccaacccgaccaccuuccaccuggacggggaggugaucaccuucgacaaccucaagacgcugcugagccuccgcgaggugcggaccaucaaggucuucaccaccguggacaacaucaaccugcacacgcagguggucgacauguccaugaccuacggccagcaguucggccccaccuaccuggacggggccgacgugaccaagaucaagccccacaacagccacgagggcaagacguucuacgugcucccgaacgacgacacccugcgcgucgaggccuucgaguacuaccacaccaccgaccccuccuuccuggggcgguacaugagcgcccucaaccacacgaagaaguggaaguacccccaggugaacggccugaccuccaucaagugggccgacaacaacugcuaccuggcgaccgcccuccugacccugcagcagaucgagcucaaguucaaccccccggcccugcaggacgccuacuaccgcgcgcgggccggggaggccgccaacuucugcgcccugauccucgcguacugcaacaagacggugggcgagcugggcgacguccgcgagaccaugagcuaccuguuccagcacgccaaccucgacuccugcaagcgggugcugaacgucgugugcaagaccugcgggcagcagcagaccacccugaagggcguggaggccgucauguacauggggacgcucagcuacgagcaguucaagaagggcgugcagauccccugcaccugcgggaagcaggccaccaaguaccuggugcagcaggagucccccuucgucaugaugagcgcccccccggcgcaguacgagcugaagcacggcaccuucacgugcgccuccgaguacaccggcaacuaccagugcgggcacuacaagcacaucaccagcaaggagacccucuacugcaucgacggcgcccugcugacgaaguccagcgaguacaaggggcccaucaccgacguguucuacaaggagaacagcuacaccaccacgaucaagcccgugaccuacaagcucgacggcgucgugugcaccgagaucgaccccaagcuggacaacuacuacaagaaggacaacuccuacuucaccgagcagccgaucgaccuggugcccaaccagcccuaccccaacgccagcuucgacaacuucaaguucgucugcgacaacaucaaguucgccgacgaccucaaccagcugacgggguacaagaagccggcgucccgcgagcugaaggugaccuucuuccccgaccucaacggcgacguggucgccaucgacuacaagcacuacacccccagcuucaagaagggcgccaagcugcugcacaagcccaucguguggcacgugaacaacgccaccaacaaggcgacguacaagccgaacaccuggugcauccggugccucugguccaccaagcccgucgagaccagcaacuccuucgacgugcugaagagcgaggacgcccaggggauggacaaccuggccugcgaggaccucaagcccguguccgaggaggucguggagaaccccacgauccagaaggacgugcuggagugcaacgucaagaccaccgagguggugggcgacaucauccugaagccggccaacaacagccucaagaucaccgaggaggucgggcacacggaccugauggccgcguacguggacaacuccagccugaccaucaagaagcccaacgagcucucccgcgugcugggccugaagacccucgccacccacgggcuggccgccgucaacagcgugcccugggacacgaucgccaacuacgcgaagccguuccugaacaagguggucuccaccaccaccaacaucgugacgcgcugccucaaccgggugugcaccaacuacaugcccuacuucuucacccugcugcuccagcugugcaccuucacccgcagcacgaacucccggaucaaggccagcaugcccaccaccaucgccaagaacaccgucaaguccgugggcaaguucugccuggaggccagcuucaacuaccucaagagccccaacuucuccaagcugaucaacaucaucaucugguuccugcuccugagcgugugccugggcucccucaucuacagcacggccgcgcuggggguccugauguccaaccucggcaugccgagcuacugcaccggguaccgcgagggcuaccugaacuccaccaacgugaccaucgccacguacugcaccggcagcauccccugcuccgugugccugagcgggcucgacucccuggacaccuaccccagccuggagaccauccagaucacgaucuccagcuucaagugggaccucaccgccuucggccuggucgccgagugguuccuggccuacauccucuucacccgguucuucuacgugcuggggcuggcggccaucaugcagcucuucuucuccuacuucgccgugcacuucaucagcaacuccuggcugauguggcugaucaucaaccugguccagauggcccccaucagcgcgauggugcgcauguacaucuucuucgccuccuucuacuacguguggaagagcuacguccacgugguggacggcugcaacagcuccaccugcaugaugugcuacaagcggaaccgcgccacgcgggucgagugcaccaccaucgugaacgggguccgccggagcuucuacguguacgccaacggcggcaagggguucugcaagcuccacaacuggaacugcgugaacugcgacaccuucugcgccggcuccacguucaucagcgacgaggucgcgcgcgaccugucccugcaguucaagcggccgaucaaccccaccgaccagagcuccuacaucguggacagcgugaccgucaagaacggguccauccaccucuacuucgacaaggccggccagaagaccuacgagcgccacagccugucccacuucgugaaccuggacaaccuccgggccaacaacacgaaggggagccugcccaucaacgugaucgucuucgacggcaaguccaagugcgaggagagcuccgccaagagcgccuccguguacuacagccagcugaugugccagcccauccuccugcuggaccaggcgcucguguccgacgucggcgacagcgccgagguggccgugaagauguucgacgccuacgucaacaccuucagcuccaccuucaacgugccgauggagaagcugaagacccugguggccacggcggaggccgagcucgccaagaacgucagccuggacaacgugcuguccaccuucaucagcgccgcgcgccagggguucguggacuccgacgucgagaccaaggacgugguggagugccucaagcugagccaccaguccgacaucgaggucaccggcgacagcugcaacaacuacaugcugacguacaacaagguggagaacaugaccccccgggaccucggggccugcaucgacugcuccgcccgccacaucaacgcccagguggccaagagccacaacaucgcgcugaucuggaacgucaaggacuucaugucccugagcgagcagcuccggaagcagauccgcuccgccgccaagaagaacaaccugcccuucaagcugaccugcgccaccacgcgccagguggugaacgucgugaccaccaagaucgcccucaagggcggguga

SEQ ID NO: 18026 - RNA, 5841 nt, Artificial Sequence
  SARS-CoV-2__MT609918.1__non-structural protein 3 (NSP3) CDS gc
auggcccccaccaaggugaccuucggcgacgacacggucaucgaggugcagggguacaagagcgugaacaucaccuucgagcuggacgaguccaucgacaagguccucaacgagaagugcagcgccuacaccguggagcugggcaccgaggugaacgaguucgcgugcgucguggccgacgccgugaucaagacgcugcagccggucuccgagcuccugaccccccuggggaucgaccucgacgaguggagcauggccaccuacuaccuguucgacgaguccggcgaguucaagcuggccagccacauguacugcuccuucuacccccccgacgaggacgaggaggagggggacugcgaggaggaggaguucgagccgagcacccaguacgaguacggcacggaggacgacuaccagggcaagccccucgaguucggggcgaccuccgccgcccugcagcccgaggaggagcaggaggaggacuggcuggacgacgacagccagcagaccgugggccagcaggacggguccgaggacaaccagaccacgaccauccagaccaucguggagguccagccccagcucgagauggagcugaccccgguggugcagacgaucgaggucaacagcuucuccggcuaccugaagcucaccgagaacguguacaucaagaacgccgacaucguggaggaggcgaagaaggucaagcccaccgugguggucaacgccgccaacguguaccugaagcacgggggcggcguggccggggcccugaacaaggcgaccaacaacgccaugcaggucgagagcgacgacuacaucgccacgaacggcccccucaagguggggggcuccugcguccugagcggccacaaccuggccaagcacugccuccacgugguggggcccaacgucaacaagggcgaggacauccagcugcugaaguccgccuacgagaacuucaaccagcacgaggugcuccuggcgccgcugcucagcgccgggaucuucggcgccgaccccauccacucccugcgcgugugcgucgacaccgugcggaccaacguguaccuggccgucuucgacaagaaccucuacgacaagcuggugagcagcuuccuggagaugaaguccgagaagcagguggagcagaagaucgccgagauccccaaggaggaggucaagcccuucaucaccgagagcaagccguccguggagcagcgcaagcaggacgacaagaagaucaaggcgugcguggaggaggucacgaccacccucgaggagaccaaguuccugacggagaaccugcuccuguacaucgacaucaacgggaaccugcaccccgacagcgccacccucguguccgacaucgacaucaccuuccugaagaaggacgcccccuacaucgugggcgacgucgugcaggagggcgugcugaccgccgucgugauccccacgaagaaggccgggggcaccaccgagauccucgcgaaggcccugcggaaggugccgaccgacaacuacaucacgaccuaccccgggcagggccugaacggguacaccgucgaggaggccaagaccgugcucaagaagugcaagagcgccuucuacauccugcccuccaucaucagcaacgagaagcaggagauccugggcaccguguccuggaaccuccgcgagaugcuggcgcacgccgaggagacgcggaagcugaugcccgucugcguggagaccaaggccaucgugagcaccauccagcgcaaguacaagggcaucaagauccaggagggggucguggacuacggcgcccgguucuacuucuacaccuccaagacgaccguggccagccugaucaacacccucaacgaccugaacgagacccuggucacgaugccgcucggguacgugacccacggccugaaccuggaggaggcggcccgcuacaugcggucccucaaggugcccgccaccgucagcguguccagccccgacgccgugaccgccuacaacggguaccugacguccagcuccaagacccccgaggagcacuucaucgagaccaucagccuggcgggcagcuacaaggacugguccuacagcggccaguccacccagcucgggaucgaguuccugaagcgcggcgacaagagcgucuacuacacguccaacccgaccaccuuccaccuggacggggaggugaucaccuucgacaaccucaagacgcugcugagccuccgggaggugcgcaccaucaaggucuucaccaccguggacaacaucaaccugcacacgcagguggucgacauguccaugaccuacggccagcaguucggccccaccuaccuggacggggccgacgugaccaagaucaagccccacaacagccacgagggcaagacguucuacgugcucccgaacgacgacacccugcgggucgaggccuucgaguacuaccacaccaccgaccccuccuuccuggggcgcuacaugagcgcccucaaccacacgaagaaguggaaguacccccaggugaacggccugaccuccaucaagugggccgacaacaacugcuaccuggcgaccgcccuccugacccugcagcagaucgagcucaaguucaaccccccggcccugcaggacgccuacuaccgggcgcgcgccggggaggccgccaacuucugcgcccugauccucgcguacugcaacaagacggugggcgagcugggcgacguccgggagaccaugagcuaccuguuccagcacgccaaccucgacuccugcaagcgcgugcugaacgucgugugcaagaccugcgggcagcagcagaccacccugaagggcguggaggccgucauguacauggggacgcucagcuacgagcaguucaagaagggcgugcagauccccugcaccugcgggaagcaggccaccaaguaccuggugcagcaggagucccccuucgucaugaugagcgcccccccggcgcaguacgagcugaagcacggcaccuucacgugcgccuccgaguacaccggcaacuaccagugcgggcacuacaagcacaucaccagcaaggagacccucuacugcaucgacggcgcccugcugacgaagagcuccgaguacaaggggcccaucaccgacguguucuacaaggagaacagcuacaccaccacgaucaagcccgugaccuacaagcucgacggcgucgugugcaccgagaucgaccccaagcuggacaacuacuacaagaaggacaacuccuacuucaccgagcagccgaucgaccuggugcccaaccagcccuaccccaacgccagcuucgacaacuucaaguucgucugcgacaacaucaaguucgccgacgaccucaaccagcugacgggguacaagaagccggcgucccgggagcugaaggugaccuucuuccccgaccucaacggcgacguggucgccaucgacuacaagcacuacacccccagcuucaagaagggcgccaagcugcugcacaagcccaucguguggcacgugaacaacgccaccaacaaggcgacguacaagccgaacaccuggugcauccgcugccucugguccaccaagcccgucgagaccagcaacuccuucgacgugcugaagagcgaggacgcccaggggauggacaaccuggccugcgaggaccucaagcccguguccgaggaggucguggagaaccccacgauccagaaggacgugcuggagugcaacgucaagaccaccgagguggugggcgacaucauccugaagccggccaacaacagccucaagaucaccgaggaggucgggcacacggaccugauggccgcguacguggacaacuccagccugaccaucaagaagcccaacgagcucucccgggugcugggccugaagacccucgccacccacgggcuggccgccgucaacagcgugcccugggacacgaucgccaacuacgcgaagccguuccugaacaagguggucuccaccaccaccaacaucgugacgcgcugccucaaccgcgugugcaccaacuacaugcccuacuucuucacccugcugcuccagcugugcaccuucacccggagcacgaacucccgcaucaaggccagcaugcccaccaccaucgccaagaacaccgucaagagcgugggcaaguucugccuggaggccuccuucaacuaccucaagagccccaacuucuccaagcugaucaacaucaucaucugguuccugcuccugagcgugugccugggcucccucaucuacagcacggccgcgcuggggguccugauguccaaccucggcaugccgagcuacugcaccggguaccgggagggcuaccugaacuccaccaacgugaccaucgccacguacugcaccggcagcauccccugcuccgugugccugagcgggcucgacucccuggacaccuaccccagccuggagaccauccagaucacgaucuccagcuucaagugggaccucaccgccuucggccuggucgccgagugguuccuggccuacauccucuucacccgcuucuucuacgugcuggggcuggcggccaucaugcagcucuucuucuccuacuucgccgugcacuucaucagcaacuccuggcugauguggcugaucaucaaccugguccagauggcccccaucagcgcgauggugcggauguacaucuucuucgccagcuucuacuacguguggaaguccuacguccacgugguggacggcugcaacagcuccaccugcaugaugugcuacaagcgcaaccgggccacgcgcgucgagugcaccaccaucgugaacgggguccggcgcagcuucuacguguacgccaacggcggcaagggguucugcaagcuccacaacuggaacugcgugaacugcgacaccuucugcgccggcuccacguucaucagcgacgaggucgcgcgggaccugucccugcaguucaagcgcccgaucaaccccaccgaccagagcuccuacaucguggacagcgugaccgucaagaacggguccauccaccucuacuucgacaaggccggccagaagaccuacgagcggcacagccugucccacuucgugaaccuggacaaccuccgcgccaacaacacgaaggggagccugcccaucaacgugaucgucuucgacggcaaguccaagugcgaggagagcuccgccaagagcgccuccguguacuacagccagcugaugugccagcccauccuccugcuggaccaggcgcucgugagcgacgucggcgacuccgccgagguggccgugaagauguucgacgccuacgucaacaccuucagcuccaccuucaacgugccgauggagaagcugaagacccugguggccacggcggaggccgagcucgccaagaacgucagccuggacaacgugcuguccaccuucaucagcgccgcgcggcagggguucguggacuccgacgucgagaccaaggacgugguggagugccucaagcugagccaccaguccgacaucgaggucaccggcgacagcugcaacaacuacaugcugacguacaacaagguggagaacaugaccccccgcgaccucggggccugcaucgacugcuccgcccggcacaucaacgcccagguggccaagagccacaacaucgcgcugaucuggaacgucaaggacuucaugucccugagcgagcagcuccgcaagcagauccgguccgccgccaagaagaacaaccugcccuucaagcugaccugcgccaccacgcgccagguggugaacgucgugaccaccaagaucgcccucaagggcggguga

SEQ ID NO: 18027 - RNA, 5841 nt, Artificial Sequence
  SARS-CoV-2__MT611440.1__non-structural protein 3 (NSP3) CDS gc
auggcccccaccaaggugaccuucggcgacgacacggucaucgaggugcagggguacaagagcgugaacaucaccuucgagcuggacgagcgcaucgacaagguccucaacgagaagugcuccgccuacaccguggagcugggcaccgaggugaacgaguucgcgugcgucguggccgacgccgugaucaagacgcugcagccggucagcgagcuccugaccccccuggggaucgaccucgacgagugguccauggccaccuacuaccuguucgacgagagcggcgaguucaagcuggccucccacauguacugcagcuucuacccccccgacgaggacgaggaggagggggacugcgaggaggaggaguucgagccguccacccaguacgaguacggcacggaggacgacuaccagggcaagccccucgaguucggggcgaccagcgccgcccugcagcccgaggaggagcaggaggaggacuggcuggacgacgacucccagcagaccgugggccagcaggacgggagcgaggacaaccagaccacgaccauccagaccaucguggagguccagccccagcucgagauggagcugaccccgguggugcagacgaucgaggucaacuccuucagcggcuaccugaagcucaccgacaacguguacaucaagaacgccgacaucguggaggaggcgaagaaggucaagcccaccgugguggucaacgccgccaacguguaccugaagcacgggggcggcguggccggggcccugaacaaggcgaccaacaacgccaugcaggucgaguccgacgacuacaucgccacgaacggcccccucaagguggggggcagcugcguccuguccggccacaaccuggccaagcacugccuccacgugguggggcccaacgucaacaagggcgaggacauccagcugcugaagagcgccuacgagaacuucaaccagcacgaggugcuccuggcgccgcugcucuccgccgggaucuucggcgccgaccccauccacagccugcgggugugcgucgacaccgugcgcaccaacguguaccuggccgucuucgacaagaaccucuacgacaagcugguguccagcuuccuggagaugaagagcgagaagcagguggagcagaagaucgccgagauccccaaggaggaggucaagcccuucaucaccgaguccaagccgagcguggagcagcggaagcaggacgacaagaagaucaaggcgugcguggaggaggucacgaccacccucgaggagaucaaguuccugaccgagaaccugcuccuguacaucgacaucaacgggaaccugcaccccgacuccgccacgcucgugagcgacaucgacaucaccuuccugaagaaggacgcccccuacaucgugggcgacgucgugcaggagggcgugcugaccgccgucgugauccccaccaagaaggccgggggcacgaccgagaugcucgcgaaggcccugcgcaaggugccgaccgacaacuacaucaccacguaccccgggcagggccugaacggguacaccgucgaggaggccaagaccgugcucaagaagugcaaguccgccuucuacauccugcccagcaucaucuccaacgagaagcaggagauccugggcaccgugagcuggaaccuccgggagaugcuggcgcacgccgaggagacccgcaagcugaugcccgucugcguggagacgaaggccaucguguccaccauccagcggaaguacaagggcaucaagauccaggagggggucguggacuacggcgcccgcuucuacuucuacaccagcaagaccacgguggccucccugaucaacacccucaacgaccugaacgagacccuggucaccaugccgcucggguacgugacgcacggccugaaccuggaggaggcggcccgguacaugcgcagccucaaggugcccgccaccgucuccgugagcucccccgacgccgugaccgccuacaacggguaccugaccagcuccagcaagacgcccgaggagcacuucaucgagaccaucucccuggcgggcagcuacaaggacuggagcuacuccggccagagcacccagcucgggaucgaguuccugaagcggggcgacaaguccgucuacuacaccagcaacccgacgaccuuccaccuggacggggaggugaucaccuucgacaaccucaagacccugcugucccuccgcgaggugcggacgaucaaggucuucaccaccguggacaacaucaaccugcacacccagguggucgacaugagcaugacguacggccagcaguucggccccaccuaccuggacggggccgacgugaccaagaucaagccccacaacucccacgagggcaagaccuucuacgugcucccgaacgacgacacgcugcgcgucgaggccuucgaguacuaccacaccaccgaccccagcuuccuggggcgguacauguccgcccucaaccacaccaagaaguggaaguacccccaggugaacggccugacgagcaucaagugggccgacaacaacugcuaccuggcgaccgcccuccugacccugcagcagaucgagcucaaguucaaccccccggcccugcaggacgccuacuaccgcgcgcgggccggggaggccgccaacuucugcgcccugauccucgcguacugcaacaagaccgugggcgagcugggcgacguccgcgagacgauguccuaccuguuccagcacgccaaccucgacagcugcaagcgggugcugaacgucgugugcaagaccugcgggcagcagcagaccacccugaagggcguggaggccgucauguacauggggacccucuccuacgagcaguucaagaagggcgugcagauccccugcacgugcgggaagcaggccaccaaguaccuggugcagcaggagagccccuucgucaugauguccgcccccccggcgcaguacgagcugaagcacggcaccuucaccugcgccagcgaguacacgggcaacuaccagugcgggcacuacaagcacaucaccuccaaggagacccucuacugcaucgacggcgcccugcugaccaagagcagcgaguacaaggggcccaucacggacguguucuacaaggagaacuccuacaccaccaccaucaagcccgugacguacaagcucgacggcgucgugugcaccgagaucgaccccaagcuggacaacuacuacaagaaggacaacagcuacuucaccgagcagccgaucgaccuggugcccaaccagcccuaccccaacgccuccuucgacaacuucaaguucgucugcgacaacaucaaguucgccgacgaccucaaccagcugaccggguacaagaagccggcgagccgcgagcugaaggugacguucuuccccgaccucaacggcgacguggucgccaucgacuacaagcacuacacccccuccuucaagaagggcgccaagcugcugcacaagcccaucguguggcacgugaacaacgccaccaacaaggcgaccuacaagccgaacacguggugcauccggugccucuggagcaccaagcccgucgagaccuccaacagcuucgacgugcugaaguccgaggacgcccaggggauggacaaccuggccugcgaggaccucaagcccgugagcgaggaggucguggagaaccccaccauccagaaggacgugcuggagugcaacgucaagacgaccgagguggugggcgacaucauccugaagccggccaacaacucccucaagaucaccgaggaggucgggcacaccgaccugauggccgcguacguggacaacagcucccugacgaucaagaagcccaacgagcucagccgcgugcugggccugaagacccucgccacccacgggcuggccgccgucaacuccgugcccugggacaccaucgccaacuacgcgaagccguuccugaacaagguggucagcacgaccaccaacaucgugacccgcugccucaaccgggugugcacgaacuacaugcccuacuucuucacccugcugcuccagcugugcaccuucacccgcuccaccaacagccggaucaaggccuccaugcccacgaccaucgccaagaacaccgucaagagcgugggcaaguucugccuggaggccagcuucaacuaccucaagucccccaacuucagcaagcugaucaacaucaucaucugguuccugcuccuguccgugugccugggcagccucaucuacuccaccgccgcgcuggggguccugaugagcaaccucggcaucccguccuacugcacgggguaccgcgagggcuaccugaacagcaccaacgugaccaucgccaccuacugcacgggcuccauccccugcagcgugugccuguccgggcucgacagccuggacaccuaccccucccuggagaccauccagaucaccaucagcuccuucaagugggaccucacggccuucggccuggucgccgagugguuccuggccuacauccucuucacccgguucuucuacgugcuggggcuggcggccaucaugcagcucuucuucagcuacuucgccgugcacuucaucuccaacagcuggcugauguggcugaucaucaaccugguccagauggcccccaucuccgcgauggugcgcauguacaucuucuucgccagcuucuacuacguguggaagagcuacguccacgugguggacggcugcaacuccagcaccugcaugaugugcuacaagcggaaccgcgccacccgggucgagugcacgaccaucgugaacgggguccgccgguccuucuacguguacgccaacggcggcaagggguucugcaagcuccacaacuggaacugcgugaacugcgacaccuucugcgccggcagcaccuucaucuccgacgaggucgcgcgcgaccugagccugcaguucaagcggccgaucaaccccacggaccaguccagcuacaucguggacuccgugaccgucaagaacgggagcauccaccucuacuucgacaaggccggccagaagaccuacgagcgccacucccugagccacuucgugaaccuggacaaccuccgggccaacaacaccaaggggucccugcccaucaacgugaucgucuucgacggcaagagcaagugcgaggaguccagcgccaaguccgccagcguguacuacucccagcugaugugccagcccauccuccugcuggaccaggcgcucgugagcgacgucggcgacagcgccgagguggccgugaagauguucgacgccuacgucaacacguucuccagcaccuucaacgugccgauggagaagcugaagacccugguggccaccgcggaggccgagcucgccaagaacgucucccuggacaacgugcugagcacguucaucuccgccgcgcgccagggguucguggacagcgacgucgagaccaaggacgugguggagugccucaagcugucccaccagagcgacaucgaggucaccggcgacuccugcaacaacuacaugcugaccuacaacaagguggagaacaugacgccccgggaccucggggccugcaucgacugcagcgcccgccacaucaacgcccagguggccaagucccacaacaucgcgcugaucuggaacgucaaggacuucaugagccuguccgagcagcuccggaagcagauccgcagcgccgccaagaagaacaaccugcccuucaagcugaccugcgccaccacccgccagguggugaacgucgugacgaccaagaucgcccucaagggcggguga

SEQ ID NO: 18028 - RNA, 5841 nt, Artificial Sequence
  SARS-CoV-2__MT611449.1__non-structural protein 3 (NSP3) CDS gc
auggcccccaccaaggugaccuucggcgacgacacggucaucgaggugcagggguacaagagcgugaacaucaccuucgagcuggacgagcgcaucgacaagguccucaacgagaagugcuccguguacaccguggagcugggcaccgaggucaacgaguucgccugcgugguggcggacgccgucaucaagacgcugcagccggugagcgagcuccugaccccccuggggaucgaccucgacgagugguccauggccaccuacuaccuguucgacgagagcggcgaguucaagcuggccucccacauguacugcagcuucuacccccccgacgaggacgaggaggagggggacugcgaggaggaggaguucgagccguccacccaguacgaguacggcacggaggacgacuaccagggcaagccccucgaguucggggccaccagcgcggcccugcagcccgaggaggagcaggaggaggacuggcuggacgacgacucccagcagaccgugggccagcaggacgggagcgaggacaaccagaccacgaccauccagaccaucgucgaggugcagccccagcucgagauggagcugaccccggugguccagacgaucgaggugaacuccuucagcggcuaccugaagcucaccgacaacguguacaucaagaacgccgacaucgucgaggaggccaagaaggugaagcccaccguggucgugaacgcggccaacguguaccugaagcacgggggcggcgucgccggggcccugaacaaggccaccaacaacgcgaugcagguggaguccgacgacuacaucgccacgaacggcccccucaaggucgggggcagcugcgugcuguccggccacaaccuggccaagcacugccuccacguggucgggcccaacgugaacaagggcgaggacauccagcugcugaagagcgccuacgagaacuucaaccagcacgaggugcuccuggccccgcugcucuccgcggggaucuucugcgccgaccccauccacagccugcgggucugcguggacaccgugcgcaccaacgucuaccuggccguguucgacaagaaccucuacgacaagcugguguccagcuuccuggagaugaagagcgagaagcaggucgagcagaagaucgccgagauccccaaggaggaggugaagcccuucaucaccgaguccaagccgagcguggagcagcggaagcaggacgacaagaagaucaaggccugcgucgaggaggugacgaccacccucgaggagaucaaguuccugaccgagaaccugcuccuguacaucgacaucaacggcaaccugcaccccgacuccgcgacgcucgugagcgacaucgacaucaccuuccugaagaaggacgcccccuacaucgucggggacguggugcaggagggcguccugaccgccguggugauccccaccaagaaggccggcgggacgaccgagaugcucgccaaggcgcugcgcaaggucccgaccgacaacuacaucaccacguaccccggccaggggcugaacggcuacaccguggaggaggccaagaccgugcucaagaagugcaaguccgccuucuacauccugcccagcaucaucuccaacgagaagcaggagauccuggggaccgucagcuggaaccuccgggagaugcuggcccacgcggaggagacccgcaagcugaugcccgugugcguggagacgaaggccaucgucuccaccauccagcggaaguacaagggcaucaagauccaggagggcgugguggacuacggggcccgcuucuacuucuacaccagcaagaccacggucgccucccugaucaacacccucaacgaccugaacgagacccuggugaccaugccgcucggcuacgugacgcacgggcugaaccuggaggaggccgcgcgguacaugcgcagccucaagguccccgccaccguguccgugagcucccccgacgccgucaccgccuacaacggcuaccugaccagcuccagcaagacgcccgaggagcacuucaucgagaccaucucccuggccgggagcuacaaggacuggagcuacuccggccagagcacccagcucggcaucgaguuccugaagcggggggacaaguccguguacuacaccagcaacccgacgaccuuccaccuggacggcgaggugaucaccuucgacaaccucaagacccugcugucccuccgcgagguccggacgaucaagguguucaccaccguggacaacaucaaccugcacacccaggucguggacaugagcaugacguacgggcagcaguucggccccaccuaccuggacggcgcggacgugaccaagaucaagccccacaacucccacgaggggaagaccuucuacguccucccgaacgacgacacgcugcgcguggaggccuucgaguacuaccacaccaccgaccccagcuuccugggccgguacauguccgcccucaaccacaccaagaaguggaaguacccccaggugaacgggcugacgagcaucaagugggccgacaacaacugcuaccuggccaccgcgcuccugacccugcagcagaucgagcucaaguucaaccccccggcccugcaggacgccuacuaccgcgcccgggcgggcgaggccgccaacuucugcgcccugauccucgccuacugcaacaagaccgucggggagcugggcgacgugcgcgagacgauguccuaccuguuccagcacgcgaaccucgacagcugcaagcggguccugaacguggugugcaagaccugcggccagcagcagaccacccugaagggggucgaggccgugauguacaugggcacccucuccuacgagcaguucaagaagggggugcagauccccugcacgugcggcaagcaggccaccaaguaccugguccagcaggagagccccuucgugaugauguccgcccccccggcccaguacgagcugaagcacgggaccuucaccugcgcgagcgaguacacgggcaacuaccagugcggccacuacaagcacaucaccuccaaggagacccucuacugcaucgacggggcccugcugaccaagagcagcgaguacaagggccccaucacggacguguucuacaaggagaacuccuacaccaccaccaucaagcccgucacguacaagcucgacgggguggugugcaccgagaucgaccccaagcuggacaacuacuacaagaaggacaacagcuacuucaccgagcagccgaucgaccugguccccaaccagcccuaccccaacgccuccuucgacaacuucaaguucgugugcgacaacaucaaguucgccgacgaccucaaccagcugaccggcuacaagaagccggccagccgcgagcugaaggugacguucuuccccgaccucaacggggacgucguggcgaucgacuacaagcacuacacccccuccuucaagaagggcgccaagcugcugcacaagcccaucguguggcacgucaacaacgccaccaacaaggccaccuacaagccgaacacguggugcauccggugccucuggagcaccaagcccguggagaccuccaacagcuucgacgugcugaaguccgaggacgcgcagggcauggacaaccuggccugcgaggaccucaagcccgucagcgaggaggugguggagaaccccaccauccagaaggacguccuggagugcaacgugaagacgaccgagguggucggggacaucauccugaagccggccaacaacucccucaagaucaccgaggaggugggccacaccgaccugauggccgccuacguggacaacagcucccugacgaucaagaagcccaacgagcucagccgcguccuggggcugaagacccucgcgacccacggccuggccgccgugaacuccgugcccugggacaccaucgccaacuacgccaagccguuccugaacaaggucgugagcacgaccaccaacaucgugacccgcugccucaaccgggucugcacgaacuacaugcccuacuucuucacccugcugcuccagcugugcaccuucacccgcuccaccaacagccggaucaaggcguccaugcccacgaccaucgccaagaacaccgugaagagcguggggaaguucugccuggaggccagcuucaacuaccucaagucccccaacuucagcaagcugaucaacaucaucaucugguuccugcuccuguccgucugccugggcagccucaucuacuccaccgccgcccugggcgugcugaugagcaaccucgggaugccguccuacugcacgggcuaccgcgagggguaccugaacagcaccaacgugaccaucgcgaccuacugcacgggcuccauccccugcagcgucugccuguccggccucgacagccuggacaccuaccccucccuggagaccauccagaucaccaucagcuccuucaagugggaccucacggccuucgggcugguggccgagugguuccuggccuacauccucuucacccgguucuucuacgugcugggccuggccgcgaucaugcagcucuucuucagcuacuucgccguccacuucaucuccaacagcuggcugauguggcugaucaucaaccuggugcagauggcccccaucuccgccauggugcgcauguacaucuucuucgcgagcuucuacuacgucuggaagagcuacgugcacguggucgacgggugcaacuccagcaccugcaugaugugcuacaagcggaaccgcgccacccggguggagugcacgaccaucgucaacggcgugcgccgguccuucuacguguacgccaacgggggcaagggcuucugcaagcuccacaacuggaacugcgucaacugcgacaccuucugcgccgggagcaccuucaucuccgacgagguggcccgcgaccugagccugcaguucaagcggccgaucaaccccacggaccaguccagcuacaucguggacuccgucaccgugaagaacggcagcauccaccucuacuucgacaaggcggggcagaagaccuacgagcgccacucccugagccacuucgugaaccuggacaaccuccgggccaacaacaccaagggcucccugcccaucaacgucaucguguucgacgggaagagcaagugcgaggaguccagcgccaaguccgccagcguguacuacucccagcugaugugccagcccauccuccugcuggaccaggcccucgucagcgacgugggcgacagcgcggagguggccgucaagauguucgacgccuacgugaacacguucuccagcaccuucaacgugccgauggagaagcugaagacccuggucgccaccgccgaggcggagcucgccaagaacgugucccuggacaacgugcugagcacguucaucuccgccgcccgccagggcuucgucgacagcgacguggagaccaaggacguggucgagugccucaagcugucccaccagagcgacaucgaggugaccggggacuccugcaacaacuacaugcugaccuacaacaagguggagaacaugacgccccgggaccucggcgcgugcaucgacugcagcgcccgccacaucaacgcccaggucgccaagucccacaacaucgcccugaucuggaacgugaaggacuucaugagccuguccgagcagcuccggaagcagauccgcagcgcggccaagaagaacaaccugcccuucaagcugaccugcgccaccacccgccagguggucaacguggugacgaccaagaucgcccucaaggggggcuga

SEQ ID NO: 18029 - RNA, 5841 nt, Artificial Sequence
  SARS-CoV-2__MT611444.1__non-structural protein 3 (NSP3) CDS gc
auggcccccaccaaggugaccuucggcgacgacacggucaucgaggugcagggguacaagagcgugaacaucaccuucgagcuggacgagcgcaucgacaagguccucaacgagaagugcuccgccuacaccguggagcugggcaccgaggugaacgaguucgcgugcgucguggccgacgccgugaucaagacgcugcagccggucagcgagcuccugaccccccuggggaucgaccucgacgagugguccauggccaccuacuaccuguucgacgagagcggcgaguucaagcuggccucccacauguacugcagcuucuacccccccgacgaggacgaggaggagggggacugcgaggaggaggaguucgagccguccacccaguacgaguacggcacggaggacgacuaccagggcaagccccucgaguucggggcgaccagcgccgcccugcagcccgaggaggagcaggaggaggacuggcuggacgacgacucccagcagaccgugggccagcaggacgggagcgaggacaaccagaccacgaccauccagaccaucguggagguccagccccagcucgagauggagcugaccccgguggugcagacgaucgaggucaacuccuucagcggcuaccugaagcucaccgacaacguguacaucaagaacgccgacaucguggaggaggcgaagaaggucaagcccaccgugguggucaacgccgccaacguguaccugaagcacgggggcggcguggccggggcccugaacaaggcgaccaacaacgccaugcaggucgaguccgacgacuacaucgccacgaacggcccccucaagguggggggcagcugcguccuguccggccacaaccuggccaagcacugccuccacgugguggggcccaacgucaacaagggcgaggacauccagcugcugaagagcgccuacgagaacuucaaccagcacgaggugcuccuggcgccgcugcucuccgccgggaucuucggcgccgaccccauccacagccugcgggugugcgucgacaccgugcgcaccaacguguaccuggccgucuucgacaagaaccucuacgacaagcugguguccagcuuccuggagaugaagagcgagaagcagguggagcagaagaucgccgagauccccaaggaggaggucaagcccuucaucaccgaguccaagccgagcguggagcagcggaagcaggacgacaagaagaucaaggcgugcguggaggaggucacgaccacccucgaggagaccaaguuccugacggagaaccugcuccuguacaucgacaucaacgggaaccugcaccccgacuccgccacccucgugagcgacaucgacaucaccuuccugaagaaggacgcccccuacaucgugggcgacgucgugcaggagggcgugcugaccgccgucgugauccccacgaagaaggccgggggcaccaccgagaugcucgcgaaggcccugcgcaaggugccgaccgacaacuacaucacgaccuaccccgggcagggccugaacggguacaccgucgaggaggccaagaccgugcucaagaagugcaaguccgccuucuacauccugcccagcaucaucuccaacgagaagcaggagauccugggcaccgugagcuggaaccuccgggagaugcuggcgcacgccgaggagacgcgcaagcugaugcccgucugcguggagaccaaggccaucguguccaccauccagcggaaguacaagggcaucaagauccaggagggggucguggacuacggcgcccgcuucuacuucuacaccagcaagacgaccguggccucccugaucaacacccucaacgaccugaacgagacccuggucacgaugccgcucggguacgugacccacggccugaaccuggaggaggcggcccgguacaugcgcagccucaaggugcccgccaccgucuccgugagcucccccgacgccgugaccgccuacaacggguaccugacgagcuccagcaagacccccgaggagcacuucaucgagaccaucucccuggcgggcagcuacaaggacuggagcuacuccggccagagcacccagcucgggaucgaguuccugaagcggggcgacaaguccgucuacuacacgagcaacccgaccaccuuccaccuggacggggaggugaucaccuucgacaaccucaagacgcugcugucccuccgcgaggugcggaccaucaaggucuucaccaccguggacaacaucaaccugcacacgcagguggucgacaugagcaugaccuacggccagcaguucggccccaccuaccuggacggggccgacgugaccaagaucaagccccacaacucccacgagggcaagacguucuacgugcucccgaacgacgacacccugcgcgucgaggccuucgaguacuaccacaccaccgaccccagcuuccuggggcgguacauguccgcccucaaccacacgaagaaguggaaguacccccaggugaacggccugaccagcaucaagugggccgacaacaacugcuaccuggcgaccgcccuccugacccugcagcagaucgagcucaaguucaaccccccggcccugcaggacgccuacuaccgcgcgcgggccggggaggccgccaacuucugcgcccugauccucgcguacugcaacaagacggugggcgagcugggcgacguccgcgagaccauguccuaccuguuccagcacgccaaccucgacagcugcaagcgggugcugaacgucgugugcaagaccugcgggcagcagcagaccacccugaagggcguggaggccgucauguacauggggacgcucuccuacgagcaguucaagaagggcgugcagauccccugcaccugcgggaagcaggccaccaaguaccuggugcagcaggagagccccuucgucaugauguccgcccccccggcgcaguacgagcugaagcacggcaccuucacgugcgccagcgaguacaccggcaacuaccagugcgggcacuacaagcacaucaccuccaaggagacccucuacugcaucgacggcgcccugcugacgaagagcagcgaguacaaggggcccaucaccgacguguucuacaaggagaacuccuacaccaccacgaucaagcccgugaccuacaagcucgacggcgucgugugcaccgagaucgaccccaagcuggacaacuacuacaagaaggacaacagcuacuucaccgagcagccgaucgaccuggugcccaaccagcccuaccccaacgccuccuucgacaacuucaaguucgucugcgacaacaucaaguucgccgacgaccucaaccagcugacgggguacaagaagccggcgagccgcgagcugaaggugaccuucuuccccgaccucaacggcgacguggucgccaucgacuacaagcacuacacccccuccuucaagaagggcgccaagcugcugcacaagcccaucguguggcacgugaacaacgccaccaacaaggcgacguacaagccgaacaccuggugcauccggugccucuggagcaccaagcccgucgagaccuccaacagcuucgacgugcugaaguccgaggacgcccaggggauggacaaccuggccugcgaggaccucaagcccgugagcgaggaggucguggagaaccccacgauccagaaggacgugcuggagugcaacgucaagaccaccgagguggugggcgacaucauccugaagccggccaacaacucccucaagaucaucgaggaggucgggcacaccgaccugauggccgcguacguggacaacagcucccugacgaucaagaagcccaacgagcucagccgcgugcugggccugaagacccucgccacccacgggcuggccgccgucaacuccgugcccugggacaccaucgccaacuacgcgaagccguuccugaacaagguggucagcacgaccaccaacaucgugacccgcugccucaaccgggugugcacgaacuacaugcccuacuucuucacccugcugcuccagcugugcaccuucacccgcuccaccaacagccggaucaaggccuccaugcccacgaccaucgccaagaacaccgucaagagcgugggcaaguucugccuggaggccagcuucaacuaccucaagucccccaacuucagcaagcugaucaacaucaucaucugguuccugcuccuguccgugugccugggcagccucaucuacuccaccgccgcgcuggggguccugaugagcaaccucggcaugccguccuacugcacgggguaccgcgagggcuaccugaacagcaccaacgugaccaucgccaccuacugcacgggcuccauccccugcagcgugugccuguccgggcucgacagccuggacaccuaccccucccuggagaccauccagaucaccaucagcuccuucaagugggaccucacggccuucggccuggucgccgagugguuccuggccuacauccucuucacccgguucuucuacgugcuggggcuggcggccaucaugcagcucuucuucagcuacuucgccgugcacuucaucuccaacagcuggcugauguggcugaucaucaaccugguccagauggcccccaucuccgcgauggugcgcauguacaucuucuucgccagcuucuacuacguguggaagagcuacguccacgugguggacggcugcaacuccagcaccugcaugaugugcuacaagcggaaccgcgccacccgggucgagugcacgaccaucgugaacgggguccgccgguccuucuacguguacgccaacggcggcaagggguucugcaagcuccacaacuggaacugcgugaacugcgacaccuucugcgccggcagcaccuucaucuccgacgaggucgcgcgcgaccugagccugcaguucaagcggccgaucaaccccacggaccaguccagcuacaucguggacuccgugaccgucaagaacgggagcauccaccucuacuucgacaaggccggccagaagaccuacgagcgccacucccugagccacuucgugaaccuggacaaccuccgggccaacaacaccaaggggucccugcccaucaacgugaucgucuucgacggcaagagcaagugcgaggaguccagcgccaaguccgccagcguguacuacucccagcugaugugccagcccauccuccugcuggaccaggcgcucgugagcgacgucggcgacagcgccgagguggccgugaagauguucgacgccuacgucaacacguucuccagcaccuucaacgugccgauggagaagcugaagacccugguggccaccgcggaggccgagcucgccaagaacgucucccuggacaacgugcugagcacguucaucuccgccgcgcgccagggguucguggacagcgacgucgagaccaaggacgugguggagugccucaagcuguccuaccagagcgacaucgaggucaccggcgacuccugcaacaacuacaugcugaccuacaacaagguggagaacaugacgccccgggaccucggggccugcaucgacugcagcgcccgccacaucaacgcccagguggccaagucccacaacaucgcgcugaucuggaacgucaaggacuucaugagccuguccgagcagcuccggaagcagauccgcagcgccgccaagaagaacaaccugcccuucaagcugaccugcgccaccacccgccagguggugaacgucgugacgaccaagaucgcccucaagggcggguga

SEQ ID NO: 18030 - RNA, 5841 nt, Artificial Sequence
  SARS-CoV-2__MT614599.1__non-structural protein 3 (NSP3) CDS gc
auggcccccaccaaggugaccuucggcgacgacacggucaucgaggugcagggguacaagagcgugaacaucaccuucgagcuggacgagcgcaucgacaagguccucaacgagaagugcuccgccuacaccguggagcugggcaccgaggugaacgaguucgcgugcgucguggccgacgccgugaucaagacgcugcagccggucagcgagcuccugaccccccuggggaucgaccucgacgagugguccauggccaccuacuaccuguucgacgagagcggcgaguucaagcuggccucccacauguacugcagcuucuacccccccgacgaggacgaggaggagggggacugcgaggaggaggaguucgagccguccacccaguacgaguacggcacggaggacgacuaccagggcaagccccucgaguucggggcgaccagcgccgcccugcagcccgaggaggagcaggaggaggacuggcuggacgacgacucccagcagaccgugggccagcaggacgggagcgaggacaaccagaccacgaccauccagaccaucguggagguccagccccagcucgagauggagcugaccccgguggugcagacgaucgaggucaacuccuucagcggcuaccugaagcucaccgacaacguguacaucaagaacgccgacaucguggaggaggcgaagaaggucaagcccaccgugguggucaacgccgccaacguguaccugaagcacgggggcggcguggccggggcccugaacaaggcgaccaacaacgccaugcaggucgaguccgacgacuacaucgccacgaacggcccccucaagguggggggcagcugcguccuguccggccacaaccuggccaagcacugccuccacgugguggggcccaacgucaacaagggcgaggacauccagcugcugaagagcgccuacgagaacuucaaccagcacgaggugcuccuggcgccgcugcucuccgccgggaucuucggcgccgaccccauccacagccugcgggugugcgucgacaccgugcgcaccaacguguaccuggccgucuucgacaagaaccucuacgacaagcugguguccagcuuccuggagaugaagagcgagaagcagguggagcagaagaucgccgagauccccaaggaggaggucaagcccuucaucaccgaguccaagccgagcguggagcagcggaagcaggacgacaagaagaucaaggcgugcguggaggaggucacgaccacccucgaggagaccaaguuccugacggagaaccugcuccuguacaucgacaucaacgggaaccugcaccccgacuccgccacccucgugagcgacaucgacaucaccuuccugaagaaggacgcccccuacaucgugggcgacgucgugcaggagggcgugcugaccgccgucgugauccccacgaagaaggccgggggcaccaccgagaugcucgcgaaggcccugcgcaaggugccgaccgacaacuacaucacgaccuaccccgggcagggccugaacggguacaccgucgaggaggccaagaccgugcucaagaagugcaaguccgccuucuacauccugcccagcaucaucuccaacgagaagcaggagauccugggcaccgugagcuggaaccuccgggagaugcuggcgcacgccgaggagacgcgcaagcugaugcccgucugcguggagaccaaggccaucguguccaccauccagcggaaguacaagggcaucaagauccaggagggggucguggacuacggcgcccgcuucuacuucuacaccagcaagacgaccguggccucccugaucaacacccucaacgaccugaacgagacccuggucacgaugccgcucggguacgugacccacggccugaaccuggaggaggcggcccgguacaugcgcagccucaaggugcccgccaccgucuccgugagcucccccgacgccgugaccgccuacaacggguaccugacgagcuccagcaagacccccgaggagcacuucaucgagaccaucucccuggcgggcagcuacaaggacuggagcuacuccggccagagcacccagcucgggaucgaguuccugaagcggggcgacaaguccgucuacuacacgagcaacccgaccaccuuccaccuggacggggaggugaucaccuucgacaaccucaagacgcugcugucccuccgcgaggugcggaccaucaaggucuucaccaccguggacaacaucaaccugcacacgcagguggucgacaugagcaugaccuacggccagcaguucggccccaccuaccuggacggggccgacgugaccaagaucaagccccacaacucccacgagggcaagacguucuacgugcucccgaacgacgacacccugcgcgucgaggccuucgaguacuaccacaccaccgaccccagcuuccuggggcgguacauguccgcccucaaccacacgaagaaguggaaguacccccaggugaacggccugaccagcaucaagugggccgacaacaacugcuaccuggcgaccgcccuccugacccugcagcagaucgagcucaaguucaaccccccggcccugcaggacgccuacuaccgcgcgcgggccggggaggccgccaacuucugcgcccugauccucgcguacugcaacaagacggugggcgagcugggcgacguccgcgagaccauguccuaccuguuccagcacgccaaccucgacagcugcaagcgggugcugaacgucgugugcaagaccugcgggcagcagcagaccacccugaagggcguggaggccgucauguacauggggacgcucuccuacgagcaguucaagaagggcgugcagauccccugcaccugcgggaagcaggccaccaaguaccuggugcagcaggagagccccuucgucaugauguccgcccccccggcgcaguacgagcugaagcacggcaccuucacgugcgccagcgaguacaccggcaacuaccagugcgggcacuacaagcacaucaccuccaaggagacccucuacugcaucgacggcgcccugcugacgaagagcagcgaguacaaggggcccaucaccgacguguucuacaaggagaacuccuacaccaccacgaucaagcccgugaccuacaagcucgacggcgucgugugcaccgagaucgaccccaagcuggacaacuacuacaagaaggacaacagcuacuucaccgagcagccgaucgaccuggugcccaaccagcccuaccccaacgccuccuucgacaacuucaaguucgucugcgacaacaucaaguucgccgacgaccucaaccagcugacgggguacaagaagccggcgagccgcgagcugaaggugaccuucuuccccgaccucaacggcgacguggucgccaucgacuacaagcacuacacccccuccuucaagaagggcgccaagcugcugcacaagcccaucguguggcacgugaacaacgccaccaacaaggcgacguacaagccgaacaccuggugcauccggugccucuggagcaccaagcccgucgagaccuccaacagcuucgacgugcugaaguccgaggacgcccaggggauggacaaccuggccugcgaggaccucaagagcguguccgaggaggucguggagaaccccacgauccagaaggacgugcuggagugcaacgucaagaccaccgagguggugggcgacaucauccugaagcccgccaacaacagccucaagaucaccgaggaggucgggcacacggaccugauggccgcguacguggacaacuccagccugaccaucaagaagccgaacgagcucucccgcgugcugggccugaagacccucgccacccacgggcuggccgccgucaacagcgugcccugggacacgaucgccaacuacgcgaagcccuuccugaacaagguggucuccaccaccaccaacaucgugacgcgcugccucaaccgggugugcaccaacuacaugccguacuucuucacccugcugcuccagcugugcaccuucacccgcagcacgaacucccggaucaaggccagcaugcccaccaccaucgccaagaacaccgucaagagcgugggcaaguucugccuggaggccuccuucaacuaccucaagagccccaacuucuccaagcugaucaacaucaucaucugguuccugcuccugagcgugugccugggcucccucaucuacagcacggccgcgcuggggguccugauguccaaccucggcaugcccagcuacugcaccggguaccgcgagggcuaccugaacuccaccaacgugaccaucgccacguacugcaccggcagcaucccgugcuccgugugccugagcgggcucgacucccuggacaccuaccccagccuggagaccauccagaucacgaucuccagcuucaagugggaccucaccgccuucggccuggucgccgagugguuccuggccuacauccucuucacccgguucuucuacgugcuggggcuggcggccaucaugcagcucuucuucuccuacuucgccgugcacuucaucagcaacuccuggcugauguggcugaucaucaaccugguccagauggcccccaucagcgcgauggugcgcauguacaucuucuucgccagcuucuacuacguguggaaguccuacguccacgugguggacggcugcaacagcuccaccugcaugaugugcuacaagcggaaccgcgccacgcgggucgagugcaccaccaucgugaacgggguccgccggagcuucuacguguacgccaacggcggcaagggguucugcaagcuccacaacuggaacugcgugaacugcgacaccuucugcgccggcuccacguucaucagcgacgaggucgcgcgcgaccugucccugcaguucaagcggcccaucaacccgaccgaccagagcuccuacaucguggacagcgugaccgucaagaacggguccauccaccucuacuucgacaaggccggccagaagaccuacgagcgccacagccugucccacuucgugaaccuggacaaccuccgggccaacaacacgaaggggagccugcccaucaacgugaucgucuucgacggcaaguccaagugcgaggagagcuccgccaagagcgccuccguguacuacagccagcugaugugccagcccauccuccugcuggaccaggcgcucgugagcgacgucggcgacuccgccgagguggccgugaagauguucgacgccuacgucaacaccuucagcuccaccuucaacgugcccauggagaagcugaagacccugguggccacggcggaggccgagcucgccaagaacgucagccuggacaacgugcuguccaccuucaucagcgccgcgcgccagggguucguggacuccgacgucgagaccaaggacgugguggagugccucaagcugagccaccaguccgacaucgaggucaccggcgacagcugcaacaacuacaugcugacguacaacaagguggagaacaugaccccgcgggaccucggggccugcaucgacugcuccgcccgccacaucaacgcccagguggccaagagccacaacaucgcgcugaucuggaacgucaaggacuucaugucccugagcgagcagcuccggaagcagauccgcuccgccgccaagaagaacaaccugcccuucaagcugaccugcgccaccacgcgccagguggugaacgucgugaccaccaagaucgcccucaagggcggguga

SEQ ID NO: 18031 - RNA, 5841 nt, Artificial Sequence
  SARS-CoV-2__MT675289.1__non-structural protein 3 (NSP3) CDS gc
auggcccccaccaaggugaccuucggcgacgacacggucaucgaggugcagggguacaagagcgugaacaucaccuucgagcuggacgagcgcaucgacaagguccucaacgagaagugcuccgccuacaccguggagcugggcaccgaggugaacgaguucgcgugcgucguggccgacgccgugaucaagacgcugcagccggucagcgagcuccugaccccccuggggaucgaccucgacgagugguccauggccaccuacuaccuguucgacgagagcggcgaguucaagcuggccucccacauguacugcagcuucuacccccccgacgaggacgaggaggagggggacugcgaggaggaggaguucgagccguccacccaguacgaguacggcacggaggacgacuaccagggcaagccccucgaguucggggcgaccagcgccgcccugcagcccgaggaggagcaggaggaggacuggcuggacgacgacucccagcagaccgugggccagcaggacgggagcgaggacaaccagaccacgaccauccagaccaucguggagguccagccccagcucgagauggagcugaccccgguggugcagacgaucgaggucaacuccuucagcggcuaccugaagcucaccgacaacguguacaucaagaacgccgacaucguggaggaggcgaagaaggucaagcccaccgugguggucaacgccgccaacguguaccugaagcacgggggcggcguggccggggcccugaacaaggcgaccaacaacgccaugcaggucgaguccgacgacuacaucgccacgaacggcccccucaagguggggggcagcugcguccuguccggccacaaccuggccaagcacugccuccacgugguggggcccaacgucaacaagggcgaggacauccagcugcugaagagcgccuacgagaacuucaaccagcacgaggugcuccuggcgccgcugcucuccgccgggaucuucggcgccgaccccauccacagccugcgggugugcgucgacaccgugcgcaccaacguguaccuggccgucuucgacaagaaccucuacgacaagcugguguccagcuuccuggagaugaagagcgagaagcagguggagcagaagaucgccgagauccccaaggaggaggucaagcccuucaucaccgaguccaagccgagcguggagcagcggaagcaggacgacaagaagaucaaggcgugcguggaggaggucacgaccacccucgaggagaccaaguuccugacggagaaccugcuccuguacaucgacaucaacgggaaccugcaccccgacuccgccacccucgugagcgacaucgacaucaccuuccugaagaaggacgcccccuacaucgugggcgacgucgugcaggagggcgugcugaccgccgucgugauccccacgaagaaggccgggggcaccaccgagaugcucgcgaaggcccugcgcaaggugccgaccgacuccuacaucacgaccuaccccgggcagggccugaacggguacaccgucgaggaggccaagaccgugcucaagaagugcaagagcgccuucuacauccugcccuccaucaucagcaacgagaagcaggagauccugggcaccguguccuggaaccuccgggagaugcuggcgcacgccgaggagacgcgcaagcugaugcccgucugcguggagaccaaggccaucgugagcaccauccagcggaaguacaagggcaucaagauccaggagggggucguggacuacggcgcccgcuucuacuucuacaccuccaagacgaccguggccagccugaucaacacccucaacgaccugaacgagacccuggucacgaugccgcucggguacgugacccacggccugaaccuggaggaggcggcccgguacaugcgcucccucaaggugcccgccaccgucagcguguccagccccgacgccgugaccgccuacaacggguaccugacguccagcuccaagacccccgaggagcacuucaucgagaccaucagccuggcgggcagcuacaaggacugguccuacagcggccaguccacccagcucgggaucgaguuccugaagcggggcgacaagagcgucuacuacacguccaacccgaccaccuuccaccuggacggggaggugaucaccuucgacaaccucaagacgcugcugagccuccgcgaggugcggaccaucaaggucuucaccaccguggacaacaucaaccugcacacgcagguggucgacauguccaugaccuacggccagcaguucggccccaccuaccuggacggggccgacgugaccaagaucaagccccacaacagccacgagggcaagacguucuacgugcucccgaacgacgacacccugcgcgucgaggccuucgaguacuaccacaccaccgaccccuccuuccuggggcgguacaugagcgcccucaaccacacgaagaaguggaaguacccccaggugaacggccugaccuccaucaagugggccgacaacaacugcuaccuggcgaccgcccuccugacccugcagcagaucgagcucaaguucaaccccccggcccugcaggacgccuacuaccgcgcgcgggccggggaggccgccaacuucugcgcccugauccucgcguacugcaacaagacggugggcgagcugggcgacguccgcgagaccaugagcuaccuguuccagcacgccaaccucgacuccugcaagcgggugcugaacgucgugugcaagaccugcgggcagcagcagaccacccugaagggcguggaggccgucauguacauggggacgcucagcuacgagcaguucaagaagggcgugcagauccccugcaccugcgggaagcaggccaccaaguaccuggugcagcaggagucccccuucgucaugaugagcgcccccccggcgcaguacgagcugaagcacggcaccuucacgugcgccuccgaguacaccggcaacuaccagugcgggcacuacaagcacaucaccagcaaggagacccucuacugcaucgacggcgcccugcugacgaagagcuccgaguacaaggggcccaucaccgacguguucuacaaggagaacagcuacaccaccacgaucaagcccgugaccuacaagcucgacggcgucgugugcaccgagaucgaccccaagcuggacaacuacuacaagaaggacaacuccuacuucaccgagcagccgaucgaccuggugcccaaccagcccuaccccaacgccagcuucgacaacuucaaguucgucugcgacaacaucaaguucgccgacgaccucaaccagcugacgggguacaagaagccggcgucccgcgagcugaaggugaccuucuuccccgaccucaacggcgacguggucgccaucgacuacaagcacuacacccccagcuucaagaagggcgccaagcugcugcacaagcccaucguguggcacgugaacaacgccaccaacaaggcgacguacaagccgaacaccuggugcauccggugccucugguccaccaagcccgucgagaccagcaacuccuucgacgugcugaagagcgaggacgcccaggggauggacaaccuggccugcgaggaccucaagcccguguccgaggaggucguggagaaccccacgauccagaaggacgugcuggagugcaacgucaagaccaccgagguggugggcgacaucauccugaagccggccaacaacagccucaagaucaccgaggaggucgggcacacggaccugauggccgcguacguggacaacuccagccugaccaucaagaagcccaacgagcucucccgcgugcugggccugaagacccucgccacccacgggcuggccgccgucaacagcgugcccugggacacgaucgccaacuacgcgaagccguuccugaacaagguggucuccaccaccaccaacaucgugacgcgcugccucaaccgggugugcaccaacuacaugcccuacuucuucacccugcugcuccagcugugcaccuucacccgcagcacgaacucccggaucaaggccagcaugcccaccaccaucgccaagaacaccgucaagagcgugggcaaguucugccuggaggccuccuucaacuaccucaagagccccaacuucuccaagcugaucaacaucaucaucugguuccugcuccugagcgugugccugggcucccucaucuacagcacggccgcgcuggggguccugauguccaaccucggcaugccgagcuacugcaccggguaccgcgagggcuaccugaacuccaccaacgugaccaucgccacguacugcaccggcagcauccccugcuccgugugccugagcgggcucgacucccuggacaccuaccccagccuggagaccauccagaucacgaucuccagcuucaagugggaccucaccgccuucggccuggucgccgagugguuccuggccuacauccucuucacccgguucuucuacgugcuggggcuggcggccaucaugcagcucuucuucuccuacuucgccgugcacuucaucagcaacuccuggcugauguggcugaucaucaaccugguccagauggcccccaucagcgcgauggugcgcauguacaucuucuucgccagcuucuacuacguguggaaguccuacguccacgugguggacggcugcaacagcuccaccugcaugaugugcuacaagcggaaccgcgccacgcgggucgagugcaccaccaucgugaacgggguccgccggagcuucuacguguacgccaacggcggcaagggguucugcaagcuccacaacuggaacugcgugaacugcgacaccuucugcgccggcuccacguucaucagcgacgaggucgcgcgcgaccugucccugcaguucaagcggccgaucaaccccaccgaccagagcuccuacaucguggacagcgugaccgucaagaacggguccauccaccucuacuucgacaaggccggccagaagaccuacgagcgccacagccugucccacuucgugaaccuggacaaccuccgggccaacaacacgaaggggagccugcccaucaacgugaucgucuucgacggcaaguccaagugcgaggagagcuccgccaagagcgccuccguguacuacagccagcugaugugccagcccauccuccugcuggaccaggcgcucgugagcgacgucggcgacuccgccgagguggccgugaagauguucgacgccuacgucaacaccuucagcuccaccuucaacgugccgauggagaagcugaagacccugguggccacggcggaggccgagcucgccaagaacgucagccuggacaacgugcuguccaccuucaucagcgccgcgcgccagggguucguggacuccgacgucgagaccaaggacgugguggagugccucaagcugagccaccaguccgacaucgaggucaccggcgacagcugcaacaacuacaugcugacguacaacaagguggagaacaugaccccccgggaccucggggccugcaucgacugcuccgcccgccacaucaacgcccagguggccaagagccacaacaucgcgcugaucuggaacgucaaggacuucaugucccugagcgagcagcuccggaagcagauccgcuccgccgccaagaagaacaaccugcccuucaagcugaccugcgccaccacgcgccagguggugaacgucgugaccaccaagaucgcccucaagggcggguga

SEQ ID NO: 18032 - RNA, 5841 nt, Artificial Sequence
  SARS-CoV-2__MT675950.1__non-structural protein 3 (NSP3) CDS gc
auggcccccaccaaggugaccuucggcgacgacacggucaucgaggugcagggguacaagagcgugaacaucaccuucgagcuggacgagcgcaucgacaagguccucaacgagaagugcuccgccuacaccguggagcugggcaccgaggugaacgaguucgcgugcgucguggccgacgccgugaucaagacgcugcagccggucagcgagcuccugaccccccuggggaucgaccucgacgagugguccauggccaccuacuaccuguucgacgagagcggcgaguucaagcuggccucccacauguacugcagcuucuacccccccgacgaggacgaggaggagggggacugcgaggaggaggaguucgagccguccacccaguacgaguacggcacggaggacgacuaccagggcaagccccucgaguucggggcgaccagcgccgcccugcagcccgaggaggagcaggaggaggacuggcuggacgacgacucccagcagaccgugggccagcaggacgggagcgaggacaaccagaccacgaccauccagaccaucguggagguccagccccagcucgagauggagcugaccccgguggugcagacgaucgaggucaacuccuucagcggcuaccugaagcucaccgacaacguguacaucaagaacgccgacaucguggaggaggcgaagaaggucaagcccaccgugguggucaacgccgccaacguguaccugaagcacgggggcggcguggccggggcccugaacaaggcgaccaacaacgccaugcaggucgaguccgacgacuacaucgccacgaacggcccccucaagguggggggcagcugcguccuguccggccacaaccuggccaagcacugccuccacgugguggggcccaacgucaacaagggcgaggacauccagcugcugaagagcgccuacgagaacuucaaccagcacgaggugcuccuggcgccgcugcucuccgccgggaucuucggcgccgaccccauccacagccugcgggugugcgucgacaccgugcgcaccaacguguaccuggccgucuucgacaagaaccucuacgacaagcugguguccagcuuccuggagaugaagagcgagaagcagguggagcagaagaucgccgagauccccaaggaggaggucaagcccuucaucaccgaguccaagccgagcguggagcagcggaagcaggacgacaagaagaucaaggcgugcguggaggaggucacgaccacccucgaggagaccaaguuccugacggagaaccugcuccuguacaucgacaucaacgggaaccugcaccccgacuccgccacccucgugagcgacaucgacaucaccuuccugaagaaggacgcccccuacaucgugggcgacgucgugcaggagggcgugcugaccgccgucgugauccccacgaagaaggccgggggcaccaccgagaugcucgcgaaggcccugcgcaaggugccgaccgacaacuacaucacgaccuaccccgggcagggccugaacggguacaccgucgaggaggccaagaccgugcucaagaagugcaaguccgccuucuacauccugcccagcaucaucuccaacgagaagcaggagauccugggcaccgugagcuggaaccuccgggagaugcuggcgcacgccgaggagacgcgcaagcugaugcccgucugcguggagaccaaggccaucguguccaccauccagcggaaguacaagggcaucaagauccaggagggggucguggacuacggcgcccgcuucuacuucuacaccagcaagacgaccguggccucccugaucaacacccucaacgaccugaacgagacccuggucacgaugccgcucggguacgugacccacggccugaaccuggaggaggcggcccgguacaugcgcagccucaaggugcccgccaccgucuccgugagcucccccgacgccgugaccgccuacaacggguaccugacgagcuccagcaagacccccgaggagcacuucaucgagaccaucucccuggcgggcagcuacaaggacuggagcuacuccggccagagcacccagcucgggaucgaguuccugaagcggggcgacaaguccgucuacuacacgagcaacccgaccaccuuccaccuggacggggaggugaucaccuucgacaaccucaagacgcugcugucccuccgcgaggugcggaccaucaaggucuucaccaccguggacaacaucaaccugcacacgcagguggucgacaugagcaugaccuacggccagcaguucggccccaccuaccuggacggggccgacgugaccaagaucaagccccacaacucccacgagggcaagacguucuacgugcucccgaacgacgacacccugcgcgucgaggccuucgaguacuaccacaccaccgaccccagcuuccuggggcgguacauguccgcccucaaccacacgaagaaguggaaguacccccaggugaacggccugaccagcaucaagugggccgacaacaacugcuaccuggcgaccgcccuccugacccugcagcagaucgagcucaaguucaaccccccggcccugcaggacgccuacuaccgcgcgcgggccggggaggccgccaacuucugcgcccugauccucgcguacugcaacaagacggugggcgagcugggcgacguccgcgagaccauguccuaccuguuccagcacgccaaccucgacagcugcaagcgggugcugaacgucgugugcaagaccugcgggcagcagcagaccacccugaagggcguggaggccgucauguacauggggacgcucuccuacgagcaguucaagaagggcgugcagauccccugcaccugcgggaagcaggccaccaaguaccuggugcagcaggagagccccuucgucaugauguccgcccccccggcgcaguacgagcugaagcacggcaccuucaucugcgccagcgaguacacgggcaacuaccagugcgggcacuacaagcacaucaccuccaaggagacccucuacugcaucgacggcgcccugcugaccaagagcagcgaguacaaggggcccaucacggacguguucuacaaggagaacuccuacaccaccaccaucaagcccgugacguacaagcucgacggcgucgugugcaccgagaucgaccccaagcuggacaacuacuacaagaaggacaacagcuacuucaccgagcagccgaucgaccuggugcccaaccagcccuaccccaacgccuccuucgacaacuucaaguucgucugcgacaacaucaaguucgccgacgaccucaaccagcugaccggguacaagaagccggcgagccgcgagcugaaggugacguucuuccccgaccucaacggcgacguggucgccaucgacuacaagcacuacacccccuccuucaagaagggcgccaagcugcugcacaagcccaucguguggcacgugaacaacgccaccaacaaggcgaccuacaagccgaacacguggugcauccggugccucuggagcaccaagcccgucgagaccuccaacagcuucgacgugcugaaguccgaggacgcccaggggauggacaaccuggccugcgaggaccucaagcccgugagcgaggaggucguggagaaccccaccauccagaaggacgugcuggagugcaacgucaagacgaccgagguggugggcgacaucauccugaagccggccaacaacucccucaagaucaccgaggaggucgggcacaccgaccugauggccgcguacguggacaacagcucccugacgaucaagaagcccaacgagcucagccgcgugcugggccugaagacccucgccacccacgggcuggccgccgucaacuccgugcccugggacaccaucgccaacuacgcgaagccguuccugaacaagguggucagcacgaccaccaacaucgugacccgcugccucaaccgggugugcacgaacuacaugcccuacuucuucacccugcugcuccagcugugcaccuucacccgcuccaccaacagccggaucaaggccuccaugcccacgaccaucgccaagaacaccgucaagagcgugggcaaguucugccuggaggccagcuucaacuaccucaagucccccaacuucagcaagcugaucaacaucaucaucugguuccugcuccuguccgugugccugggcagccucaucuacuccaccgccgcgcuggggguccugaugagcaaccucggcaugccguccuacugcacgggguaccgcgagggcuaccugaacagcaccaacgugaccaucgccaccuacugcacgggcuccauccccugcagcgugugccuguccgggcucgacagccuggacaccuaccccucccuggagaccauccagaucaccaucagcuccuucaagugggaccucacggccuucggccuggucgccgagugguuccuggccuacauccucuucacccgguucuucuacgugcuggggcuggcggccaucaugcagcucuucuucagcuacuucgccgugcacuucaucuccaacagcuggcugauguggcugaucaucaaccugguccagauggcccccaucuccgcgauggugcgcauguacaucuucuucgccagcuucuacuacguguggaagagcuacguccacgugguggacggcugcaacuccagcaccugcaugaugugcuacaagcggaaccgcgccacccgggucgagugcacgaccaucgugaacgggguccgccgguccuucuacguguacgccaacggcggcaagggguucugcaagcuccacaacuggaacugcgugaacugcgacaccuucugcgccggcagcaccuucaucuccgacgaggucgcgcgcgaccugagccugcaguucaagcggccgaucaaccccacggaccaguccagcuacaucguggacuccgugaccgucaagaacgggagcauccaccucuacuucgacaaggccggccagaagaccuacgagcgccacucccugagccacuucgugaaccuggacaaccuccgggccaacaacaccaaggggucccugcccaucaacgugaucgucuucgacggcaagagcaagugcgaggaguccagcgccaaguccgccagcguguacuacucccagcugaugugccagcccauccuccugcuggaccaggcgcucgugagcgacgucggcgacagcgccgagguggccgugaagauguucgacgccuacgucaacacguucuccagcaccuucaacgugccgauggagaagcugaagacccugguggccaccgcggaggccgagcucgccaagaacgucucccuggacaacgugcugagcacguucaucuccgccgcgcgccagggguucguggacagcgacgucgagaccaaggacgugguggagugccucaagcugucccaccagagcgacaucgaggucaccggcgacuccugcaacaacuacaugcugaccuacaacaagguggagaacaugacgccccgggaccucggggccugcaucgacugcagcgcccgccacaucaacgcccagguggccaagucccacaacaucgcgcugaucuggaacgucaaggacuucaugagccuguccgagcagcuccggaagcagauccgcagcgccgccaagaagaacaaccugcccuucaagcugaccugcgccaccacccgccagguggugaacgucgugacgaccaagaucgcccucaagggcggguga

SEQ ID NO: 18033 - RNA, 5841 nt, Artificial Sequence
  SARS-CoV-2__MT664106.1__non-structural protein 3 (NSP3) CDS gc
auggcccccaccaaggugaccuucggcgacgacacggucaucgaggugcagggguacaagagcgugaacaucaccuucgagcuggacgagcgcaucgacaagguccucaacgagaagugcuccgccuacaccguggagcugggcaccgaggugaacgaguucgcgugcgucguggccgacgccgugaucaagacgcugcagccggucagcgagcuccugaccccccuggggaucgaccucgacgagugguccauggccaccuacuaccuguucgacgagagcggcgaguucaagcuggccucccacauguacugcagcuucuacccccccgacgaggacgaggaggagggggacugcgaggaggaggaguucgagccguccacccaguacgaguacggcacggaggacgacuaccagggcaagccccucgaguucggggcgaccagcgccgcccugcagcccgaggaggagcaggaggaggacuggcuggacgacgacucccagcagaccgugggccagcaggacgggagcgaggacaaccagaccacgaccauccagaccaucguggagguccagccccagcucgagauggagcugaccccgguggugcagacgaucgaggucaacuccuucagcggcuaccugaagcucaccgacaacguguacaucaagaacgccgacaucguggaggaggcgaagaaggucaagcccaccgugguggucaacgccgccaacguguaccugaagcacgggggcggcguggccggggcccugaacaaggcgaccaacaacgccaugcaggucgaguccgacgacuacaucgccacgaacggcccccucaagguggggggcagcugcguccuguccggccacaaccuggccaagcacugccuccacgugguggggcccaacgucaacaagggcgaggacauccagcugcugaagagcgccuacgagaacuucaaccagcacgaggugcuccuggcgccgcugcucuccgccgggaucuucggcgccgaccccauccacagccugcgggugugcgucgacaccgugcgcaccaacguguaccuggccgucuucgacaagaaccucuacgacaagcugguguccagcuuccuggagaugaagagcgagaagcagguggagcagaagaucgccgagauccccaaggaggaggucaagcccuucaucaccgaguccaagccgagcguggagcagcggaagcaggacgacaagaagaucaaggcgugcguggaggaggucacgaccacccucgaggagaccaaguuccugacggagaaccugcuccuguacaucgacaucaacgggaaccugcaccccgacuccgccacccucgugagcgacaucgacaucaccuuccugaagaaggacgcccccuacaucgugggcgacgucgugcaggagggcgugcugaccgccgucgugauccccacgaagaaggccgggggcaccaccgagaugcucgcgaaggcccugcgcaaggugccgaccgacaacuacaucacgaccuaccccgggcagggccugaacggguacaccgucgaggaggccaagaccgugcucaagaagugcaaguccgccuucuacauccugcccagcaucaucuccaacgagaagcaggagauccugggcaccgugagcuggaaccuccgggagaugcuggcgcacgccgaggagacgcgcaagcugaugcccgucugcguggagaccaaggccaucguguccaccauccagcggaaguacaagggcaucaagauccaggagggggucguggacuacggcgcccgcuucuacuucuacaccagcaagacgaccguggccucccugaucaacacccucaacgaccugaacgagacccuggucacgaugccgcucggguacgugacccacggccugaaccuggaggaggcggcccgguacaugcgcagccucaaggugcccgccaccgucuccgugagcucccccgacgccgugaccgccuacaacggguaccugacgagcuccagcaagacccccgaggagcacuucaucgagaccaucucccuggcgggcagcuacaaggacuggagcuacuccggccagagcacccagcucgggaucgaguuccugaagcggggcgacaaguccgucuacuacacgagcaacccgaccaccuuccaccuggacggggaggugaucaccuucgacaaccucaagacgcugcugucccuccgcgaggugcggaccaucaaggucuucaccaccguggacaacaucaaccugcacacgcagguggucgacaugagcaugaccuacggccagcaguucggccccaccuaccuggacggggccgacgugaccaagaucaagccccacaacucccacgagggcaagacguucuacgugcucccgaacgacgacacccugcgcgucgaggccuucgaguacuaccacaccaccgaccccagcuuccuggggcgguacauguccgcccucaaccacacgaagaaguggaaguacccccaggugaacggccugaccagcaucaagugggccgacaacaacugcuaccuggcgaccgcccuccugacccugcagcagaucgagcucaaguucaaccccccggcccugcaggacgccuacuaccgcgcgcgggccggggaggccgccaacuucugcgcccugauccucgcguacugcaacaagacggugggcgagcugggcgacguccgcgagaccauguccuaccuguuccagcacgccaaccucgacagcugcaagcgggugcugaacgucgugugcaagaccugcgggcagcagcagaccacccugaagggcguggaggccgucauguacauggggacgcucuccuacgagcaguucaagaagggcgugcagauccccugcaccugcgggaagcaggccaccaaguaccuggugcagcaggagagccccuucgucaugauguccgcccccccggcgcaguacgagcugaagcacggcaccuucacgugcgccagcgaguacaccggcaacuaccagugcgggcacuacaagcacaucaccuccaaggagacccucuacugcaucgacggcgcccugcugacgaagagcagcgaguacaaggggcccaucaccgacguguucuacaaggagaacuccuacaccaccacgaucaagcccgugaccuacaagcucgacggcgucgugugcaccgagaucgaccccaagcuggacaacuacuacaagaaggacaacagcuacuucaccgagcagccgaucgaccuggugcccaaccagcccuaccccaacgccuccuucgacaacuucaaguucgucugcgacaacaucaaguucgccgacgaccucaaccagcugacgggguacaagaagccggcgagccgcgagcugaaggugaccuucuuccccgaccucaacggcgacguggucgccaucgacuacaagcacuacacccccuccuucaagaagggcgccaagcugcugcacaagcccaucguguggcacgugaacaacgccaccaacaaggcgacguacaagccgaacaccuggugcauccggugccucuggagcaccaagcccgucgagaccuccaacagcuucgacgugcugaaguccgagaacgcccaggggauggacaaccuggccugcgaggaccucaagcccgugagcgaggaggucguggagaaccccacgauccagaaggacgugcuggagugcaacgucaagaccaccgagguggugggcgacaucauccugaagccggccaacaacucccucaagaucaccgaggaggucgggcacacggaccugauggccgcguacguggacaacagcucccugaccaucaagaagcccaacgagcucagccgcgugcugggccugaagacccucgccacccacgggcuggccgccgucaacuccgugcccugggacacgaucgccaacuacgcgaagccguuccugaacaagguggucagcaccaccaccaacaucgugacgcgcugccucaaccgggugugcaccaacuacaugcccuacuucuucacccugcugcuccagcugugcaccuucacccgcuccacgaacagccggaucaaggccuccaugcccaccaccaucgccaagaacaccgucaagagcgugggcaaguucugccuggaggccagcuucaacuaccucaagucccccaacuucagcaagcugaucaacaucaucaucugguuccugcuccuguccgugugccugggcagccucaucuacuccacggccgcgcuggggguccugaugagcaaccucggcaugccguccuacugcaccggguaccgcgagggcuaccugaacagcaccaacgugaccaucgccacguacugcaccggcuccauccccugcagcgugugccuguccgggcucgacagccuggacaccuaccccucccuggagaccauccagaucacgaucagcuccuucaagugggaccucaccgccuucggccuggucgccgagugguuccuggccuacauccucuucacccgguucuucuacgugcuggggcuggcggccaucaugcagcucuucuucagcuacuucgccgugcacuucaucuccaacagcuggcugauguggcugaucaucaaccugguccagauggcccccaucuccgcgauggugcgcauguacaucuucuucgccagcuucuacuacguguggaagagcuacguccacgugguggacggcugcaacuccagcaccugcaugaugugcuacaagcggaaccgcgccacgcgggucgagugcaccaccaucgugaacgggguccgccgguccuucuacguguacgccaacggcggcaagggguucugcaagcuccacaacuggaacugcgugaacugcgacaccuucugcgccggcagcacguucaucuccgacgaggucgcgcgcgaccugagccugcaguucaagcggccgaucaaccccaccgaccaguccagcuacaucguggacuccgugaccgucaagaacgggagcauccaccucuacuucgacaaggccggccagaagaccuacgagcgccacucccugagccacuucgugaaccuggacaaccuccgggccaacaacacgaaggggucccugcccaucaacgugaucgucuucgacggcaagagcaagugcgaggaguccagcgccaaguccgccagcguguacuacucccagcugaugugccagcccauccuccugcuggaccaggcgcucgugagcgacgucggcgacagcgccgagguggccgugaagauguucgacgccuacgucaacaccuucuccagcaccuucaacgugccgauggagaagcugaagacccugguggccacggcggaggccgagcucgccaagaacgucucccuggacaacgugcugagcaccuucaucuccgccgcgcgccagggguucguggacagcgacgucgagaccaaggacgugguggagugccucaagcugucccaccagagcgacaucgaggucaccggcgacuccugcaacaacuacaugcugacguacaacaagguggagaacaugaccccccgggaccucggggccugcaucgacugcagcgcccgccacaucaacgcccagguggccaagucccacaacaucgcgcugaucuggaacgucaaggacuucaugagccuguccgagcagcuccggaagcagauccgcagcgccgccaagaagaacaaccugcccuucaagcugaccugcgccaccacgcgccagguggugaacgucgugaccaccaagaucgcccucaagggcggguga

SEQ ID NO: 18034 - RNA, 5841 nt, Artificial Sequence
  SARS-CoV-2__MT664171.1__non-structural protein 3 (NSP3) CDS gc
auggcccccaccaaggugaccuucggcgacgacacggucaucgaggugcagggguacaagagcgugaacaucaccuucgagcuggacgagcgcaucgacaagguccucaacgagaagugcuccgccuacaccguggagcugggcaccgaggugaacgaguucgcgugcgucguggccgacgccgugaucaagacgcugcagccggucagcgagcuccugaccccccuggggaucgaccucgacgagugguccauggccaccuacuaccuguucgacgagagcggcgaguucaagcuggccucccacauguacugcagcuucuacccccccgacgaggacgaggaggagggggacugcgaggaggaggaguucgagccguccacccaguacgaguacggcacggaggacgacuaccagggcaagccccucgaguucggggcgaccagcgccgcccugcagcccgaggaggagcaggaggaggacuggcuggacgacgacucccagcagaccgugggccagcaggacgggagcgaggacaaccagaccacgaccauccagaccaucguggagguccagccccagcucgagauggagcugaccccgguggugcagacgaucgaggucaacuccuucagcggcuaccugaagcucaccgacaacguguacaucaagaacgccgacaucguggaggaggcgaagaaggucaagcccaccgugguggucaacgccgccaacguguaccugaagcacgggggcggcguggccggggcccugaacaaggcgaccaacaacgccaugcaggucgaguccgacgacuacaucgccacgaacggcccccucaagguggggggcagcugcguccuguccggccacaaccuggccaagcacugccuccacgugguggggcccaacgucaacaagggcgaggacauccagcugcugaagagcgccuacgagaacuucaaccagcacgaggugcuccuggcgccgcugcucuccgccgggaucuucggcgccgaccccauccacagccugcgggugugcgucgacaccgugcgcaccaacguguaccuggccgucuucgacaagaaccucuacgacaagcugguguccagcuuccuggagaugaagagcgagaagcagguggagcagaagaucgccgagauccccaaggaggaggucaagcccuucaucaccgaguccaagccgagcguggagcagcggaagcaggacgacaagaagaucaaggcgugcguggaggaggucacgaccacccucgaggagaccaaguuccugacggagaaccugcuccuguacaucgacaucaacgggaaccugcaccccgacuccgccacccucgugagcgacaucgacaucaccuuccugaagaaggacgcccccuacaucgugggcgacgucgugcaggagggcgugcugaccgccgucgugauccccacgaagaaggccgggggcaccaccgagaugcucgcgaaggcccugcgcaaggugccgaccgacaacuacaucacgaccuaccccgggcagggccugaacggguacaccgucgaggaggccaagaccgugcucaagaagugcaaguccgccuucuacauccugcccagcaucaucuccaacgagaagcaggagauccugggcaccgugagcuggaaccuccgggagaugcuggcgcacgccgaggagacgcgcaagcugaugcccgucugcguggagaccaaggccaucguguccaccauccagcggaaguacaagggcaucaagauccaggucggggugguggacuacggcgcccgcuucuacuucuacaccagcaagacgaccgucgccucccugaucaacacccucaacgaccugaacgagacccuggugacgaugccgcucggguacgugacccacggccugaaccuggaggaggcggcccgguacaugcgcagccucaagguccccgccaccguguccgugagcucccccgacgccgucaccgccuacaacggguaccugacgagcuccagcaagacccccgaggagcacuucaucgagaccaucucccuggcgggcagcuacaaggacuggagcuacuccggccagagcacccagcucgggaucgaguuccugaagcggggcgacaaguccguguacuacacgagcaacccgaccaccuuccaccuggacggggaggugaucaccuucgacaaccucaagacgcugcugucccuccgcgagguccggaccaucaagguguucaccaccguggacaacaucaaccugcacacgcaggucguggacaugagcaugaccuacggccagcaguucggccccaccuaccuggacggggccgacgugaccaagaucaagccccacaacucccacgagggcaagacguucuacguccucccgaacgacgacacccugcgcguggaggccuucgaguacuaccacaccaccgaccccagcuuccuggggcgguacauguccgcccucaaccacacgaagaaguggaaguacccccaggugaacggccugaccagcaucaagugggccgacaacaacugcuaccuggcgaccgcccuccugacccugcagcagaucgagcucaaguucaaccccccggcccugcaggacgccuacuaccgcgcgcgggccggggaggccgccaacuucugcgcccugauccucgcguacugcaacaagacggucggcgagcugggcgacgugcgcgagaccauguccuaccuguuccagcacgccaaccucgacagcugcaagcggguccugaacguggugugcaagaccugcgggcagcagcagaccacccugaagggcgucgaggccgugauguacauggggacgcucuccuacgagcaguucaagaagggcgugcagauccccugcaccugcgggaagcaggccaccaaguaccugguccagcaggagagccccuucgugaugauguccgcccccccggcgcaguacgagcugaagcacggcaccuucacgugcgccagcgaguacaccggcaacuaccagugcgggcacuacaagcacaucaccuccaaggagacccucuacugcaucgacggcgcccugcugacgaagagcagcgaguacaaggggcccaucaccgacguguucuacaaggagaacuccuacaccaccacgaucaagcccgucaccuacaagcucgacggcguggugugcaccgagaucgaccccaagcuggacaacuacuacaagaaggacaacagcuacuucaccgagcagccgaucgaccugguccccaaccagcccuaccccaacgccuccuucgacaacuucaaguucgugugcgacaacaucaaguucgccgacgaccucaaccagcugacgggguacaagaagccggcgagccgcgagcugaaggugaccuucuuccccgaccucaacggcgacgucguggccaucgacuacaagcacuacacccccuccuucaagaagggcgccaagcugcugcacaagcccaucguguggcacgucaacaacgccaccaacaaggcgacguacaagccgaacaccuggugcauccggugccucuggagcaccaagcccguggagaccuccaacagcuucgacgugcugaaguccgaggacgcccaggggauggacaaccuggccugcgaggaccucaagcccgucagcgaggaggugguggagaaccccacgauccagaaggacguccuggagugcaacgugaagaccaccgagguggucggcgacaucauccugaagccggccaacaacucccucaagaucaccgaggagguggggcacacggaccugauggccgcguacguggacaacagcucccugaccaucaagaagcccaacgagcucagccgcguccugggccugaagacccucgccacccacgggcuggccgccgugaacuccgugcccugggacacgaucgccaacuacgcgaagccguuccugaacaaggucgugagcaccaccaccaacaucgugacgcgcugccucaaccgggucugcaccaacuacaugcccuacuucuucacccugcugcuccagcugugcaccuucacccgcuccacgaacagccggaucaaggccuccaugcccaccaccaucgccaagaacaccgugaagagcgugggcaaguucugccuggaggccagcuucaacuaccucaagucccccaacuucagcaagcugaucaacaucaucaucugguuccugcuccuguccgucugccugggcagccucaucuacuccacggccgcgcugggggugcugaugagcaaccucggcaugccguccuacugcaccggguaccgcgagggcuaccugaacagcaccaacgugaccaucgccacguacugcaccggcuccauccccugcagcgucugccuguccgggcucgacagccuggacaccuaccccucccuggagaccauccagaucacgaucagcuccuucaagugggaccucaccgccuucggccugguggccgagugguuccuggccuacauccucuucacccgguucuucuacgugcuggggcuggcggccaucaugcagcucuucuucagcuacuucgccguccacuucaucuccaacagcuggcugauguggcugaucaucaaccuggugcagauggcccccaucuccgcgauggugcgcauguacaucuucuucgccagcuucuacuacgucuggaagagcuacgugcacguggucgacggcugcaacuccagcaccugcaugaugugcuacaagcggaaccgcgccacgcggguggagugcaccaccaucgucaacggggugcgccgguccuucuacguguacgccaacggcggcaagggguucugcaagcuccacaacuggaacugcgucaacugcgacaccuucugcgccggcagcacguucaucuccgacgagguggcgcgcgaccugagccugcaguucaagcggccgaucaaccccaccgaccaguccagcuacaucguggacuccgucaccgugaagaacgggagcauccaccucuacuucgacaaggccggccagaagaccuacgagcgccacucccugagccacuucgugaaccuggacaaccuccgggccaacaacacgaaggggucccugcccaucaacgucaucguguucgacggcaagagcaagugcgaggaguccagcgccaaguccgccagcguguacuacucccagcugaugugccagcccauccuccugcuggaccaggcgcucgucagcgacgugggcgacagcgccgagguggccgucaagauguucgacgccuacgugaacaccuucuccagcaccuucaacgugccgauggagaagcugaagacccuggucgccacggcggaggccgagcucgugaagaacgugucccuggacaacguccugagcaccuucaucuccgccgcccgccagggguucguggacagcgacguggagaccaaggacgucguggagugccucaagcugucccaccagagcgacaucgaggugaccggcgacuccugcaacaacuacaugcugacguacaacaaggucgagaacaugaccccccgggaccucggggcgugcaucgacugcagcgcccgccacaucaacgcccagguggccaagucccacaacaucgcccugaucuggaacgugaaggacuucaugagccuguccgagcagcuccggaagcagauccgcagcgcggccaagaagaacaaccugcccuucaagcugaccugcgccaccacgcgccaggucgugaacguggucaccaccaagaucgcccucaagggcggguga

SEQ ID NO: 18035 - RNA, 5841 nt, Artificial Sequence
  SARS-CoV-2__MT666042.1__non-structural protein 3 (NSP3) CDS gc
auggcccccaccaaggugaccuucggcgacgacacggucaucgaggugcagggguacaagagcgugaacaucaccuucgagcuggacgagcgcaucgacaagguccucaacgagaagugcuccgccuacaccguggagcugggcaccgaggugaacgaguucgcgugcgucguggccgacgccgugaucaagacgcugcagccggucagcgagcuccugaccccccuggggaucgaccucgacgagugguccauggccaccuacuaccuguucgacgagagcggcgaguucaagcuggccucccacauguacugcagcuucuacccccccgacgaggacgaggaggagggggacugcgaggaggaggaguucgagccguccacccaguacgaguacggcacggaggacgacuaccagggcaagccccucgaguucggggcgaccagcgccgcccugcagcccgaggaggagcaggaggaggacuggcuggacgacgacucccagcagaccgugggccagcaggacgggagcgaggacaaccagaccacgaccauccagaccaucguggagguccagccccagcucgagauggagcugaccccgguggugcagacgaucgaggucaacuccuucagcggcuaccugaagcucaccgacaacguguacaucaagaacgccgacaucguggaggaggcgaagaaggucaagcccaccgugguggucaacgccgccaacguguaccugaagcacgggggcggcguggccggggcccugaacaaggcgaccaacaacgccaugcaggucgaguccgacgacuacaucgccacgaacggcccccucaagguggggggcagcugcguccuguccggccacaaccuggccaagcacugccuccacgugguggggcccaacgucaacaagggcgaggacauccagcugcugaagagcgccuacgagaacuucaaccagcacgaggugcuccuggcgccgcugcucuccgccgggaucuucggcgccgacagcauccacucccugcgggugugcgucgacaccgugcgcaccaacguguaccuggccgucuucgacaagaaccucuacgacaagcuggugagcagcuuccuggagaugaaguccgagaagcagguggagcagaagaucgccgagauccccaaggaggaggucaagcccuucaucaccgagagcaagcccuccguggagcagcggaagcaggacgacaagaagaucaaggcgugcguggaggaggucacgaccacccucgaggagaccaaguuccugacggagaaccugcuccuguacaucgacaucaacgggaaccugcacccggacagcgccacccucguguccgacaucgacaucaccuuccugaagaaggacgcccccuacaucgugggcgacgucgugcaggagggcgugcugaccgccgucgugauccccacgaagaaggccgggggcaccaccgagaugcucgcgaaggcccugcgcaaggugcccaccgacaacuacaucacgaccuacccggggcagggccugaacggguacaccgucgaggaggccaagaccgugcucaagaagugcaagagcgccuucuacauccugcccuccaucaucagcaacgagaagcaggagauccugggcaccguguccuggaaccuccgggagaugcuggcgcacgccgaggagacgcgcaagcugaugcccgucugcguggagaccaaggccaucgugagcaccauccagcggaaguacaagggcaucaagauccaggagggggucguggacuacggcgcccgcuucuacuucuacaccuccaagacgaccguggccagccugaucaacacccucaacgaccugaacgagacccuggucacgaugccccucggguacgugacccacggccugaaccuggaggaggcggcccgguacaugcgcucccucaaggugccggccaccgucagcguguccagccccgacgccgugaccgccuacaacggguaccugacguccagcuccaagacccccgaggagcacuucaucgagaccaucagccuggcgggcagcuacaaggacugguccuacagcggccaguccacccagcucgggaucgaguuccugaagcggggcgacaagaucgucuacuacacgagcaaccccaccaccuuccaccuggacggggaggugaucaccuucgacaaccucaagacgcugcugucccuccgcgaggugcggaccaucaaggucuucaccaccguggacaacaucaaccugcacacgcagguggucgacaugagcaugaccuacggccagcaguucggcccgaccuaccuggacggggccgacgugaccaagaucaagccccacaacucccacgagggcaagacguucuacgugcuccccaacgacuacacccugcgcgucgaggccuucgaguacuaccacaccaccgacccgagcuuccuggggcgguacauguccgcccucaaccacacgaagaaguggaaguacccccaggugaacggccugaccagcaucaagugggccgacaacaacugcuaccuggcgaccgcccuccugacccugcagcagaucgagcucaaguucaacccccccgcccugcaggacgccuacuaccgcgcgcgggccggggaggccgccaacuucugcgcccugauccucgcguacugcaacaagacggugggcgagcugggcgacguccgcgagaccauguccuaccuguuccagcacgccaaccucgacagcugcaagcgggugcugaacgucgugugcaagaccugcgggcagcagcagaccacccugaagggcguggaggccgucauguacauggggacgcucuccuacgagcaguucaagaagggcgugcagaucccgugcaccugcgggaagcaggccaccaaguaccuggugcagcaggagagccccuucgucaugauguccgccccccccgcgcaguacgagcugaagcacggcaccuucacgugcgccagcgaguacaccggcaacuaccagugcgggcacuacaagcacaucaccuccaaggagacccucuacugcaucgacggcgcccugcugacgaagagcagcgaguacaaggggccgaucaccgacguguucuacaaggagaacuccuacaccaccacgaucaagcccgugaccuacaagcucgacggcgucgugugcaccgagaucgaccccaagcuggacaacuacuacaagaaggacaacagcuacuucaccgagcagcccaucgaccuggugccgaaccagcccuaccccaacgccuccuucgacaacuucaaguucgucugcgacaacaucaaguucgccgacgaccucaaccagcugacgggguacaagaagcccgcgagccgcgagcugaaggugaccuucuucccggaccucaacggcgacguggucgccaucgacuacaagcacuacacccccuccuucaagaagggcgccaagcugcugcacaagcccaucguguggcacgugaacaacgccaccaacaaggcgacguacaagcccaacaccuggugcauccggugccucuggagcaccaagccggucgagaccuccaacagcuucgacgugcugaaguccgaggacgcccaggggauggacaaccuggccugcgaggaccucaagcccgugagcgaggaggucguggagaaccccacgauccagaaggacgugcuggagugcaacgucaagaccaccgagguggugggcgacaucauccugaagcccgccaacaacucccucaagaucaccgaggaggucgggcacacggaccugauggccgcguacguggacaacagcucccugaccaucaagaagccgaacgagcucagccgcgugcugggccugaagacccucgccacccacgggcuggccgccgucaacuccgugcccugggacacgaucgccaacuacgcgaagcccuuccugaacaagguggucagcaccaccaccaacaucgugacgcgcugccucaaccgggugugcaccaacuacaugccguacuucuucacccugcugcuccagcugugcaccuucacccgcuccacgaacagccggaucaaggccuccaugcccaccaccaucgccaagaacaccgucaagagcgugggcaaguucugccuggaggccagcuucaacuaccucaagucccccaacuucagcaagcugaucaacaucaucaucugguuccugcuccuguccgugugccugggcagccucaucuacuccacggccgcgcuggggguccugaugagcaaccucggcaugcccuccuacugcaccggguaccgcgagggcuaccugaacagcaccaacgugaccaucgccacguacugcaccggcuccaucccgugcagcgugugccuguccgggcucgacagccuggacaccuaccccucccuggagaccauccagaucacgaucagcuccuucaagugggaccucaccgccuucggccuggucgccgagugguuccuggccuacauccucuucacccgguucuucuacgugcuggggcuggcggccaucaugcagcucuucuucagcuacuucgccgugcacuucaucuccaacagcuggcugauguggcugaucaucaaccugguccagauggcccccaucuccgcgauggugcgcauguacaucuucuucgccagcuucuacuacguguggaagagcuacguccacgugguggacggcugcaacuccagcaccugcaugaugugcuacaagcggaaccgcgccacgcgggucgagugcaccaccaucgugaacgggguccgccgguccuucuacguguacgccaacggcggcaagggguucugcaagcuccacaacuggaacugcgugaacugcgacaccuucugcgccggcagcacguucaucuccgacgaggucgcgcgcgaccugagccugcaguucaagcggcccaucaacccgaccgaccaguccagcuacaucguggacuccgugaccgucaagaacgggagcauccaccucuacuucgacaaggccggccagaagaccuacgagcgccacucccugagccacuucgugaaccuggacaaccuccgggccaacaacacgaaggggucccugcccaucaacgugaucgucuucgacggcaagagcaagugcgaggaguccagcgccaaguccgccagcguguacuacucccagcugaugugccagcccauccuccugcuggaccaggcgcucgugagcgacgucggcgacagcgccgagguggccgugaagauguucgacgccuacgucaacaccuucuccagcaccuucaacgugcccauggagaagcugaagacccugguggccacggcggaggccgagcucgccaagaacgucucccuggacaacgugcugagcaccuucaucuccgccgcgcgccagggguucguggacagcgacgucgagaccaaggacgugguggagugccucaagcugucccaccagagcgacaucgaggucaccggcgacuccugcaacaacuacaugcugacguacaacaagguggagaacaugaccccgcgggaccucggggccugcaucgacugcagcgcccgccacaucaacgcccagguggccaagucccacaacaucgcgcugaucuggaacgucaaggacuucaugagccuguccgagcagcuccggaagcagauccgcagcgccgccaagaagaacaaccugcccuucaagcugaccugcgccaccacgcgccagguggugaacgucgugaccaccaagaucgcccucaagggcggguga

SEQ ID NO: 18036 - RNA, 5841 nt, Artificial Sequence
  SARS-CoV-2__MT666099.1__non-structural protein 3 (NSP3) CDS gc
auggcccccaccaaggugaccuucggcgacgacacggucaucgaggugcagggguacaagagcgugaacaucaccuucgagcuggacgagcgcaucgacaagguccucaacgagaagugcuccgccuacaccguggagcugggcaccgaggugaacgaguucgcgugcgucguggccgacgccgugaucaagacgcugcagccggucagcgagcuccugaccccccuggggaucgaccucgacgagugguccauggccaccuacuaccuguucgacgagagcggcgaguucaagcuggccucccacauguacugcagcuucuacccccccgacgaggacgaggaggagggggacugcgaggaggaggaguucgagccguccacccaguacgaguacggcacggaggacgacuaccagggcaagccccucgaguucggggcgaccagcgccgcccugcagcccgaggaggagcaggaggaggacuggcuggacgacgacucccagcagaccgugggccagcaggacgggagcgaggacaaccagaccacgaccauccagaccaucguggagguccagccccagcucgagauggagcugaccccgguggugcagacgaucgaggucaacuccuucagcggcuaccugaagcucaccgacaacguguacaucaagaacgccgacaucguggaggaggcgaagaaggucaagcccaccgugguggucaacgccgccaacguguaccugaagcacgggggcggcguggccggggcccugaacaaggcgaccaacaacgccaugcaggucgaguccgacgaccacaucgccacgaacggcccccucaagguggggggcagcugcguccuguccggccacaaccuggccaagcacugccuccacgugguggggcccaacgucaacaagggcgaggacauccagcugcugaagagcgccuacgagaacuucaaccagcacgaggugcuccuggcgccgcugcucuccgccgggaucuucggcgccgaccccauccacagccugcgggugugcgucgacaccgugcgcaccaacguguaccuggccgucuucgacaagaaccucuacgacaagcugguguccagcuuccuggagaugaagagcgagaagcagguggagcagaagaucgccgagauccccaaggaggaggucaagcccuucaucaccgaguccaagccgagcguggagcagcggaagcaggacgacaagaagaucaaggcgugcguggaggaggucacgaccacccucgaggagaccaaguuccugacggagaaccugcuccuguacaucgacaucaacgggaaccugcaccccgacuccgccacccucgugagcgacaucgacaucaccuuccugaagaaggacgcccccuacaucgugggcgacgucgugcaggagggcgugcugaccgccgucgugauccccacgaagaaggccgggggcaccaccgagaugcucgcgaaggcccugcgcaaggugccgaccgacaacuacaucacgaccuaccccgggcagggccugaacggguacaccgucgaggaggccaagaccgugcucaagaagugcaaguccgccuucuacauccugcccagcaucaucuccaacgagaagcaggagauccugggcaccgugagcuggaaccuccgggagaugcuggcgcacgccgaggagacgcgcaagcugaugcccgucugcguggagaccaaggccaucguguccaccauccagcggaaguacaagggcaucaagauccaggagggggucguggacuacggcgcccgcuucuacuucuacaccagcaagacgaccguggccucccugaucaacacccucaacgaccugaacgagacccuggucacgaugccgcucggguacgugacccacggccugaaccuggaggaggcggcccgguacaugcgcagccucaaggugcccgccaccgucuccgugagcucccccgacgccgugaccgccuacaacggguaccugacgagcuccagcaagacccccgaggagcacuucaucgagaccaucucccuggcgggcagcuacaaggacuggagcuacuccggccagagcacccagcucgggaucgaguuccugaagcggggcgacaaguccgucuacuacacgagcaacccgaccaccuuccaccuggacggggaggugaucaccuucgacaaccucaagacgcugcugucccuccgcgaggugcggaccaucaaggucuucaccaccguggacaacaucaaccugcacacgcagguggucgacaugagcaugaccuacggccagcaguucggccccaccuaccuggacggggccgacgugaccaagaucaagccccacaacucccacgagggcaagacguucuacgugcucccgaacgacgacacccugcgcgucgaggccuucgaguacuaccacaccaccgaccccagcuuccuggggcgguacauguccgcccucaaccacacgaagaaguggaaguacccccaggugaacggccugaccagcaucaagugggccgacaacaacugcuaccuggcgaccgcccuccugacccugcagcagaucgagcucaaguucaaccccccggcccugcaggacgccuacuaccgcgcgcgggccggggaggccgccaacuucugcgcccugauccucgcguacugcaacaagacggugggcgagcugggcgacguccgcgagaccauguccuaccuguuccagcacgccaaccucgacagcugcaagcgggugcugaacgucgugugcaagaccugcgggcagcagcagaccacccugaagggcguggaggccgucauguacauggggacgcucuccuacgagcaguucaagaagggcgugcagauccccugcaccugcgggaagcaggccaccaaguaccuggugcagcaggagagccccuucgucaugauguccgcccccccggcgcaguacgagcugaagcacggcaccuucacgugcgccagcgaguacaccggcaacuaccagugcgggcacuacaagcacaucaccuccaaggagacccucuacugcaucgacggcgcccugcugacgaagagcagcgaguacaaggggcccaucaccgacguguucuacaaggagaacuccuacaccaccacgaucaagcccgugaccuacaagcucgacggcgucgugugcaccgagaucgaccccaagcuggacaacuacuacaagaaggacaacagcuacuucaccgagcagccgaucgaccuggugcccaaccagcccuaccccaacgccuccuucgacaacuucaaguucgucugcgacaacaucaaguucgccgacgaccucaaccagcugacgggguacaagaagccggcgagccgcgagcugaaggugaccuucuuccccgaccucaacggcgacguggucgccaucgacuacaagcacuacacccccuccuucaagaagggcgccaagcugcugcacaagcccaucguguggcacgugaacaacgccaccaacaaggcgacguacaagccgaacaccuggugcauccggugccucuggagcaccaagcccgucgagaccuccaacagcuucgacgugcugaaguccgaggacgcccaggggauggacaaccuggccugcgaggaccucaagcccgugagcgaggaggucguggagaaccccacgauccagaaggacgugcuggagugcaacgucaagaccaccgagguggugggcgacaucauccugaagccggccaacaacucccucaagaucaccgaggaggucgggcacacggaccugauggccgcguacguggacaacagcucccugaccaucaagaagcccaacgagcucagccgcgugcugggccugaagacccucgccacccacgggcuggccgccgucaacuccgugcccugggacacgaucgccaacuacgcgaagccguuccugaacaagguggucagcaccaccaccaacaucgugacgcgcugccucaaccgggugugcaccaacuacaugcccuacuucuucacccugcugcuccagcugugcaccuucacccgcuccacgaacagccggaucaaggccuccaugcccaccaccaucgccaagaacaccgucaagagcgugggcaaguucugccuggaggccagcuucaacuaccucaagucccccaacuucagcaagcugaucaacaucaucaucugguuccugcuccuguccgugugccugggcagccucaucuacuccacggccgcgcuggggguccugaugagcaaccucggcaugccguccuacugcaccggguaccgcgagggcuaccugaacagcaccaacgugaccaucgccacguacugcaccggcuccauccccugcagcgugugccuguccgggcucgacagccuggacaccuaccccucccuggagaccauccagaucacgaucagcuccuucaagugggaccucaccgccuucggccuggucgccgagugguuccuggccuacauccucuucacccgguucuucuacgugcuggggcuggcggccaucaugcagcucuucuucagcuacuucgccgugcacuucaucuccaacagcuggcugauguggcugaucaucaaccugguccagauggcccccaucuccgcgauggugcgcauguacaucuucuucgccagcuucuacuacguguggaagagcuacguccacgugguggacggcugcaacuccagcaccugcaugaugugcuacaagcggaaccgcgccacgcgggucgagugcaccaccaucgugaacgggguccgccgguccuucuacguguacgccaacggcggcaagggguucugcaagcuccacaacuggaacugcgugaacugcgacaccuucugcgccggcagcacguucaucuccgacgaggucgcgcgcgaccugagccugcaguucaagcggccgaucaaccccaccgaccaguccagcuacaucguggacuccgugaccgucaagaacgggagcauccaccucuacuucgacaaggccggccagaagaccuacgagcgccacucccugagccacuucgugaaccuggacaaccuccgggccaacaacacgaaggggucccugcccaucaacgugaucgucuucgacggcaagagcaagugcgaggaguccagcgccaaguccgccagcguguacuacucccagcugaugugccagcccauccuccugcuggaccaggcgcucgugagcgacgucggcgacagcgccgagguggccgugaagauguucgacgccuacgucaacaccuucuccagcaccuucaacgugccgauggagaagcugaagacccugguggccacggcggaggccgagcucgccaagaacgucucccuggacaacgugcugagcaccuucaucuccgccgcgcgccagggguucguggacagcgacgucgagaccaaggacgugguggagugccucaagcugucccaccagagcgacaucgaggucaccggcgacuccugcaacaacuacaugcugacguacaacaagguggagaacaugaccccccgggacuucggggccugcaucgacugcagcgcccgccacaucaacgcccagguggccaagucccacaacaucgcgcucaucuggaacgucaaggacuucaugagccuguccgagcagcugcggaagcagauccgcagcgccgccaagaagaacaaccuccccuucaagcugaccugcgccaccacgcgccagguggugaacgucgugaccaccaagaucgcccugaagggcggguga

SEQ ID NO: 18037 - RNA, 5841 nt, Artificial Sequence
  SARS-CoV-2__MT655744.1__non-structural protein 3 (NSP3) CDS gc
auggcccccaccaaggugaccuucggcgacgacacggucaucgaggugcagggguacaagagcgugaacaucaccuucgagcuggacgagcgcaucgacaagguccucaacgagaagugcuccgccuacaccguggagcugggcaccgaggugaacgaguucgcgugcgucguggccgacgccgugaucaagacgcugcagccggucagcgagcuccugaccccccuggggaucgaccucgacgagugguccauggccaccuacuaccuguucgacgagagcggcgaguucaagcuggccucccacauguacugcagcuucuacccccccgacgaggacgaggaggagggggacugcgaggaggaggaguucgagccguccacccaguacgaguacggcacggaggacgacuaccagggcaagccccucgaguucggggcgaccagcgccgcccugcagcccgaggaggagcaggaggaggacuggcuggacgacgacucccagcagaccgugggccagcaggacgggagcgaggacaaccagaccacgaccauccagaccaucguggagguccagccccagcucgagauggagcugaccccgguggugcagacgaucgaggucaacuccuucagcggcuaccugaagcucaccgacaacguguacaucaagaacgccgacaucguggaggaggcgaagaaggucaagcccaccgugguggucaacgccgccaacguguaccugaagcacgggggcggcguggccggggcccugaacaaggcgaccaacaacgccaugcaggucgaguccgacgacuacaucgccacgaacggcccccucaagguggggggcagcugcguccuguccggccacaaccuggccaagcacugccuccacgugguggggcccaacgucaacaagggcgaggacauccagcugcugaagagcgccuacgagaacuucaaccagcacgaggugcuccuggcgccgcugcucuccgccgggaucuucggcgccgaccccauccacagccugcgggugugcgucgacaccgugcgcaccaacguguaccuggccgucuucgacaagaaccucuacgacaagcugguguccagcuuccuggagaugaagagcgagaagcagguggagcagaagaucgccgagauccccaaggaggaggucaagcccuucaucaccgaguccaagccgagcguggagcagcggaagcaggacgacaagaagaucaaggcgugcguggaggaggucacgaccacccucgaggagaccaaguuccugacggagaaccugcuccuguacaucgacaucaacgggaaccugcaccccgacuccgccacccucgugagcgacaucgacaucaccuuccugaagaaggacgcccccuacaucgugggcgacgucgugcaggagggcgugcugaccgccgucgugauccccacgaagaaggccgggggcaccaccgagaugcucgcgaaggcccugcgcaaggugccgaccgacaacuacaucacgaccuaccccgggcagggccugaacggguacaccgucgaggaggccaagaccgugcucaagaagugcaaguccgccuucuacauccugcccagcaucaucuccaacgagaagcaggagauccugggcaccgugagcuggaaccuccgggagaugcuggcgcacgccgaggagacgcgcaagcugaugcccgucugcguggagaccaaggccaucguguccaccauccagcggaaguacaagggcaucaagauccaggagggggucguggacuacggcgcccgcuucuacuucuacaccagcaagacgaccguggccucccugaucaacacccucaacgaccugaacgagacccuggucacgaugccgcucggguacgugacccacggccugaaccuggaggaggcggcccgguacaugcgcagccucaaggugcccgccaccgucuccgugagcucccccgacgccgugaccgccuacaacggguaccugacgagcuccagcaagacccccgaggagcacuucaucgagaccaucucccuggcgggcagcuacaaggacuggagcuacuccggccagagcacccagcucgggaucgaguuccugaagcggggcgacaaguccgucuacuacacgagcaacccgaccaccuuccaccuggacggggaggugaucaccuucgacaaccucaagacgcugcugucccuccgcgaggugcggaccaucaaggucuucaccaccguggacaacaucaaccugcacacgcagguggucgacaugagcaugaccuacggccagcaguucggccccaccuaccuggacggggccgacgugaccaagaucaagccccacaacucccacgagggcaagacguucuacgugcucccgaacgacgacacccugcgcgucgaggccuucgaguacuaccacaccaccgaccccagcuuccuggggcgguacauguccgcccucaaccacacgaagaaguggaaguacccccaggugaacggccugaccagcaucaagugggccgacaacaacugcuaccuggcgaccgcccuccugacccugcagcagaucgagcucaaguucaaccccccggcccugcaggacgccuacuacggggcgcgcgccggcgaggccgccaacuucugcgcccugauccucgcguacugcaacaagacggugggcgagcugggggacguccgggagaccauguccuaccuguuccagcacgccaaccucgacagcugcaagcgcgugcugaacgucgugugcaagaccugcggccagcagcagaccacccugaaggggguggaggccgucauguacaugggcacgcucuccuacgagcaguucaagaagggggugcagauccccugcaccugcggcaagcaggccaccaaguaccuggugcagcaggagagccccuucgucaugauguccgcccccccggcgcaguacgagcugaagcacggcaccuucacgugcgccagcgaguacaccgggaacuaccagugcggccacuacaagcacaucaccuccaaggagacccucuacugcaucgacggggcccugcugacgaaguucagcgaguacaagggccccaucaccgacguguucuacaaggagaacagcuacaccaccacgaucaagcccgugaccuacaagcucgacggggucgugugcaccgagaucgaccccaagcuggacaacuacuacaagaaggacaacuccuacuucaccgagcagccgaucgaccuggugcccaaccagcccuaccccaacgccagcuucgacaacuucaaguucgucugcgacaacaucaaguucgccgacgaccucaaccagcugacgggcuacaagaagccggcgucccgggagcugaaggugaccuucuuccccgaccucaacggcgacguggucgccaucgacuacaagcacuacacccccagcuucaagaagggggccaagcugcugcacaagcccaucguguggcacgugaacaacgccaccaacaaggcgacguacaagccgaacaccuggugcauccgcugccucugguccaccaagcccgucgagaccagcaacuccuucgacgugcugaagagcgaggacgcccagggcauggacaaccuggccugcgaggaccucaagcccguguccgaggaggucguggagaaccccacgauccagaaggacgugcuggagugcaacgucaagaccaccgagguggugggggacaucauccugaagccggccaacaacagccucaagaucaccgaggaggucggccacacggaccugauggccgcguacguggacaacuccagccugaccaucaagaagcccaacgagcucucccgggugcuggggcugaagacccucgccacccacggccuggccgccgucaacagcgugcccugggacacgaucgccaacuacgcgaagccguuccugaacaagguggucuccaccaccaccaacaucgugacgcgcugccucaaccgcgugugcaccaacuacaugcccuacuucuucacccugcugcuccagcugugcaccuucacccggagcacgaacucccgcaucaaggccagcaugcccaccaccaucgccaagaacaccgucaaguccgugggcaaguucugccuggaggccagcuucaacuaccucaagagccccaacuucuccaagcugaucaacaucaucaucugguuccugcuccugagcgugugccuggggucccucaucuacagcacggccgcgcugggcguccugauguccaaccucgggaugccgagcuacugcaccggcuaccgggagggcuaccugaacuccaccaacgugaccaucgccacguacugcaccgggagcauccccugcuccgugugccugagcggccucgacucccuggacaccuaccccagccuggagaccauccagaucacgaucuccagcuucaagugggaccucaccgccuucgggcuggucgccgagugguuccuggccuacauccucuucacccgcuucuucuacgugcugggccuggcggccaucaugcagcucuucuucuccuacuucgccgugcacuucaucagcaacuccuggcugauguggcugaucaucaaccugguccagauggcccccaucagcgcgauggugcggauguacaucuucuucgccuccuucuacuacguguggaagagcuacguccacgugguggacgggugcaacagcuccaccugcaugaugugcuacaagcgcaaccgggccacgcgcgucgagugcaccaccaucgugaacggcguccggcgcagcuucuacguguacgccaacggcgggaagggcuucugcaagcuccacaacuggaacugcgugaacugcgacaccuucugcgccggguccacguucaucagcgacgaggucgcgcgggaccugucccugcaguucaagcgcccgaucaaccccaccgaccagagcuccuacaucguggacagcgugaccgucaagaacggcuccauccaccucuacuucgacaaggccgggcagaagaccuacgagcggcacagccugucccacuucgugaaccuggacaaccuccgcgccaacaacacgaagggcagccugcccaucaacgugaucgucuucgacggcaaguccaagugcgaggagagcuccgccaagagcgccuccguguacuacagccagcugaugugccagcccauccuccugcuggaccaggcgcucguguccgacgucggggacagcgccgagguggccgugaagauguucgacgccuacgucaacaccuucagcuccaccuucaacgugccgauggagaagcugaagacccugguggccacggcggaggccgagcucgccaagaacgucagccuggacaacgugcuguccaccuucaucagcgccgcgcggcagggcuucguggacuccgacgucgagaccaaggacgugguggagugccucaagcugagccaccaguccgacaucgaggucaccggggacagcugcaacaacuacaugcugacguacaacaagguggagaacaugaccccccgcgaccucggcgccugcaucgacugcuccgcccggcacaucaacgcccagguggccaagagccacaacaucgcgcugaucuggaacgucaaggacuucaugucccugagcgagcagcuccgcaagcagauccgguccgccgccaagaagaacaaccugcccuucaagcugaccugcgccaccacgcgccagguggugaacgucgugaccaccaagaucgcccucaaggggggcuga

SEQ ID NO: 18038 - RNA, 5841 nt, Artificial Sequence
  SARS-CoV-2__MT656257.1__non-structural protein 3 (NSP3) CDS gc
auggcccccaccaaggugaccuucggcgacgacacggucaucgaggugcagggguacaagagcgugaacaucaccuucgagcuggacgagcgcaucgacaagguccucaacgagaagugcuccgccuacaccguggagcugggcaccgaggugaacgaguucgcgugcgucguggccgacgccgugaucaagauccugcagccggucagcgagcuccugacgccccuggggaucgaccucgacgagugguccauggccaccuacuaccuguucgacgagagcggcgaguucaagcuggccucccacauguacugcagcuucuacccccccgacgaggacgaggaggagggggacugcgaggaggaggaguucgagccguccacccaguacgaguacggcaccgaggacgacuaccagggcaagccccucgaguucggggcgacgagcgccgcccugcagcccgaggaggagcaggaggaggacuggcuggacgacgacucccagcagaccgugggccagcaggacgggagcgaggacaaccagaccaccacgauccagaccaucguggagguccagccccagcucgagauggagcugaccccgguggugcagaccaucgaggucaacuccuucagcggcuaccugaagcucacggacaacguguacaucaagaacgccgacaucguggaggaggcgaagaaggucaagcccaccgugguggucaacgccgccaacguguaccugaagcacgggggcggcguggccggggcccugaacaaggcgaccaacaacgccaugcaggucgaguccgacgacuacaucgccaccaacggcccccucaagguggggggcagcugcguccuguccggccacaaccuggccaagcacugccuccacgugguggggcccaacgucaacaagggcgaggacauccagcugcugaagagcgccuacgagaacuucaaccagcacgaggugcuccuggcgccgcugcucuccgccgggaucuucggcgccgaccccauccacagccugcgggugugcgucgacacggugcgcaccaacguguaccuggccgucuucgacaagaaccucuacgacaagcuggugcuguccuuccucgagaugaagagcgagaagcagguggagcagaagaucgccgagauccccaaggaggaggucaagcccuucaucaccgagagcaagccguccguggagcagcggaagcaggacgacaagaagaucaaggcgugcguggaggaggucaccacgacccuggaggagaccaaguuccugaccgagaaccuccugcuguacaucgacaucaacgggaaccuccaccccgacagcgccacgcugguguccgacaucgacaucaccuuccugaagaaggacgcccccuacaucgugggcgacgucgugcaggagggcgugcucaccgccgucgugauccccaccaagaaggccgggggcacgaccgagaugcuggcgaaggcccugcgcaaggugccgaccgacaacuacaucaccacguaccccgggcagggccucaacggguacaccgucgaggaggccaagaccgugcugaagaagugcaagagcgccuucuacauccugcccuccaucaucagcaacgagaagcaggagauccucggcaccguguccuggaaccugcgggagaugcuggcgcacgccgaggagacccgcaagcugaugcccgucugcguggagacgaaggccaucgugagcaccauccagcggaaguacaagggcaucaagauccaggagggggucguggacuacggcgcccgcuucuacuucuacaccuccaagaccacgguggccagccucaucaacacccugaacgaccugaacgagacccucgucaccaugccgcugggguacgugacgcacggccugaaccucgaggaggcggcccgguacaugcgcucccugaaggugcccgccaccgucagcguguccagccccgacgccgugaccgccuacaacggguaccugaccuccagcuccaagacgcccgaggagcacuucaucgagaccaucagccucgcgggcuccuacaaggacuggagcuacagcggccaguccacccagcuggggaucgaguuccugaagcggggcgacaagagcgucuacuacaccuccaacccgacgaccuuccaccucgacggggaggugaucaccuucgacaaccugaagacccugcucagccugcgcgaggugcggacgaucaaggucuucaccaccguggacaacaucaaccugcacacccagguggucgacauguccaugacguacggccagcaguucggccccaccuaccucgacggggccgacgugaccaagaucaagccccacaacagccacgagggcaagaccuucuacgugcugccgaacgacgacacgcugcgcgucgaggccuucgaguacuaccacaccaccgaccccuccuuccucgggcgguacaugagcgcccugaaccacaccaagaaguggaaguacccccaggugaacggccugacguccaucaagugggccgacaacaacugcuaccucgcgaccgcccugcugacccuccagcagaucgagcugaaguucaaccccccggcccugcaggacgccuacuaccgcgcgcgggccggggaggccgccaacuucugcgcccucauccuggcguacugcaacaagaccgugggcgagcugggcgacguccgcgagacgaugagcuaccucuuccagcacgccaaccuggacuccugcaagcgggugcugaacgucgugugcaagaccugcgggcagcagcagaccacccucaagggcguggaggccgucauguacauggggacccugagcuacgagcaguucaagaagggcgugcagauccccugcacgugcgggaagcaggccaccaaguaccuggugcagcaggagucccccuucgucaugaugagcgcccccccggcgcaguacgagcucaagcacggcaccuucaccugcgccuccgaguacacgggcaacuaccagugcgggcacuacaagcacaucaccagcaaggagacccuguacugcaucgacggcgcccugcucaccaaguccagcgaguacaaggggcccaucacggacguguucuacaaggagaacagcuacaccaccaccaucaagcccgugacguacaagcuggacggcgucgugugcaccgagaucgaccccaaccuggacaacuacuacaagaaggacaacuccuacuucaccgagcagccgaucgaccucgugcccaaccagcccuaccccaacgccagcuucgacaacuucaaguucgucugcgacaacaucaaguucgccgacgaccugaaccagcugaccggguacaagaagccggcgucccgcgagcucaaggugacguucuuccccgaccugaacggcgacguggucgccaucgacuacaagcacuacacccccagcuucaagaagggcgccaagcugcuccacaagcccaucguguggcacgugaacaacgccaccaacaaggcgaccuacaagccgaacacguggugcauccggugccugugguccaccaagcccgucgagaccagcaacuccuucgacgugcugaagagcgaggacgcccaggggauggacaaccucgccugcgaggaccugaagcccguguccgaggaggucguggagaaccccaccauccagaaggacgugcuggagugcaacgucaagacgaccgagguggugggcgacaucauccucaagccggccaacaacagccugaagaucaccgaggaggucgggcacaccgaccugauggccgcguacguggacaacuccagccucacgaucaagaagcccaacgagcugucccgcgugcugggccucaagacccuggccacccacgggcuggccgccgucaacagcgugcccugggacaccaucgccaacuacgcgaagccguuccucaacaagguggucuccacgaccaccaacaucgugacccgcugccugaaccgggugugcacgaacuacaugcccuacuucuucacccugcuccugcagcugugcaccuucacccgcagcaccaacucccggaucaaggccagcaugcccacgaccaucgccaagaacaccgucaaguccgugggcaaguucugccucgaggccagcuucaacuaccugaagagccccaacuucuccaagcugaucaacaucaucaucugguuccuccugcugagcgugugccucggcucccugaucuacagcaccgccgcgcuggggguccucauguccaaccugggcaugccgagcuacugcacgggguaccgcgagggcuaccugaacuccaccaacgugaccaucgccaccuacugcacgggcagcauccccugcuccgugugccucagcgggcuggacucccuggacaccuaccccagccucgagaccauccagaucaccaucuccagcuucaagugggaccugacggccuucggccuggucgccgagugguuccucgccuacauccuguucacccgguucuucuacgugcuggggcucgcggccaucaugcagcuguucuucuccuacuucgccgugcacuucaucagcaacuccuggcugauguggcugaucaucaaccucguccagauggcccccaucagcgcgauggugcgcauguacaucuucuucgccuccuucuacuacguguggaagagcuacguccacgugguggacggcugcaacagcuccaccugcaugaugugcuacaagcggaaccgcgccacccgggucgagugcacgaccaucgugaacgggguccgccggagcuucuacguguacgccaacggcggcaagggguucugcaagcugcacaacuggaacugcgugaacugcgacaccuucugcgccggcuccaccuucaucagcgacgaggucgcgcgcgaccugucccuccaguucaagcggccgaucaaccccacggaccagagcuccuacaucguggacagcgugaccgucaagaacggguccauccaccuguacuucgacaaggccggccagaagaccuacgagcgccacagccugucccacuucgugaaccucgacaaccugcgggccaacaacaccaaggggagccugcccaucaacgugaucgucuucgacggcaaguccaagugcgaggagagcuccgccaagagcgccuccguguacuacagccagcucaugugccagcccauccugcugcucgaccaggcgcugguguccgacgucggcgacagcgccgagguggccgugaagauguucgacgccuacgucaacacguucagcuccaccuucaacgugccgauggagaagcugaagacccucguggccaccgcggaggccgagcuggccaagaacgucagccuggacaacgugcucuccacguucaucagcgccgcgcgccagggguucguggacuccgacgucgagaccaaggacgugguggagugccugaagcugagccaccaguccgacaucgaggucaccggcgacagcugcaacaacuacaugcucaccuacaacaagguggagaacaugacgccccgggaccugggggccugcaucgacugcuccgcccgccacaucaacgcccagguggccaagagccacaacaucgcgcugaucuggaacgucaaggacuucaugucccucagcgagcagcugcggaagcagauccgcuccgccgccaagaagaacaaccugcccuucaagcucaccugcgccaccacccgccagguggugaacgucgugacgaccaagaucgcccugaagggcggguga

SEQ ID NO: 18039 - RNA, 5841 nt, Artificial Sequence
  SARS-CoV-2__MT657958.1__non-structural protein 3 (NSP3) CDS gc
auggcccccaccaaggugaccuucggcgacgacacggucaucgaggugcagggguacaagagcgugaacaucaccuucgagcuggacgagcgcaucgacaagguccucaacgagaagugcuccgccuacaccguggagcugggcaccgaggugaacgaguucgcgugcgucguggccgacgccgugaucaagacgcugcagccggucagcgagcuccugaccccccuggggaucgaccucgacgagugguccauggccaccuacuaccuguucgacgagagcggcgaguucaagcuggccucccacauguacugcagcuucuacccccccgacgaggacgaggaggagggggacugcgaggaggaggaguucgagccguccacccaguacgaguacggcacggaggacgacuaccagggcaagccccucgaguucggggcgaccagcgccgcccugcagcccgaggaggagcaggaggaggacuggcuggacgacgacucccagcagaccgugggccggcaggacgggagcgaggacaaccagaccacgaccauccagaccaucguggagguccagccccagcucgagauggagcugaccccgguggugcagacgaucgaggucaacuccuucagcggcuaccugaagcucaccgacaacguguacaucaagaacgccgacaucguggaggaggcgaagaaggucaagcccaccgugguggucaacgccgccaacguguaccugaagcacgggggcggcguggccggggcccugaacaaggcgaccaacaacgccaugcaggucgaguccgacgacuacaucgccacgaacggcccccucaagguggggggcagcugcguccuguccggccacaaccuggccaagcacugccuccacgugguggggcccaacgucaacaagggcgaggacauccagcugcugaagagcgccuacgagaacuucaaccagcacgaggugcuccuggcgccgcugcucuccgccgggaucuucggcgccgaccccauccacagccugcgcgugugcgucgacaccgugcggaccaacguguaccuggccgucuucgacaagaaccucuacgacaagcugguguccagcuuccuggagaugaagagcgagaagcagguggagcagaagaucgccgagauccccaaggaggaggucaagcccuucaucaccgaguccaagccgagcguggagcagcgcaagcaggacgacaagaagaucaaggcgugcguggaggaggucacgaccacccucgaggagaccaaguuccugacggagaaccugcuccuguacaucgacaucaacgggaaccugcaccccgacuccgccacccucgugagcgacaucgacaucaccuuccugaagaaggacgcccccuacaucgugggcgacgucgugcaggagggcgugcugaccgccgucgugauccccacgaagaaggccgggggcaccaccgagaugcucgcgaaggcccugcggaaggugccgaccgacaacuacaucacgaccuaccccgggcagggccugaacggguacaccgucgaggaggccaagaccgugcucaagaagugcaaguccgccuucuacauccugcccagcaucaucuccaacgagaagcaggagauccugggcaccgugagcuggaaccuccgcgagaugcuggcgcacgccgaggagacgcggaagcugaugcccgucugcguggagaccaaggccaucguguccaccauccagcgcaaguacaagggcaucaagauccaggagggggucguggacuacggcgcccgguucuacuucuacaccagcaagacgaccguggccucccugaucaacacccucaacgaccugaacgagacccuggucacgaugccgcucggguacgugacccacggccugaaccuggaggaggcggcccgcuacaugcggagccucaaggugcccgccaccgucuccgugagcucccccgacgccgugaccgccuacaacggguaccugacgagcuccagcaagacccccgaggagcacuucaucgagaccaucucccuggcgggcagcuacaaggacuggagcuacuccggccagagcacccagcucgggaucgaguuccugaagcgcggcgacaaguccgucuacuacacgagcaacccgaccaccuuccaccuggacggggaggugaucaccuucgacaaccucaagacgcugcugucccuccgggaggugcgcaccaucaaggucuucaccaccguggacaacaucaaccugcacacgcagguggucgacaugagcaugaccuacggccagcaguucggccccaccuaccuggacggggccgacgugaccaagaucaagccccacaacucccacgagggcaagacguucuacgugcucccgaacgacgacacccugcgggucgaggccuucgaguacuaccacaccaccgaccccagcuuccuggggcgcuacauguccgcccucaaccacacgaagaaguggaaguacccccaggugaacggccugaccagcaucaagugggccgacaacaacugcuaccuggcgaccgcccuccugacccugcagcagaucgagcucaaguucaaccccccggcccugcaggacgccuacuaccgggcgcgcgccggggaggccgccaacuucugcgcccugauccucgcguacugcaacaagacggugggcgagcugggcgacguccgggagaccauguccuaccuguuccagcacgccaaccucgacagcugcaagcgcgugcugaacgucgugugcaagaccugcgggcagcagcagaccacccugaagggcguggaggccgucauguacauggggacgcucuccuacgagcaguucaagaagggcgugcagauccccugcaccugcgggaagcaggccaccaaguaccuggugcagcaggagagccccuucgucaugauguccgcccccccggcgcaguacgagcugaagcacggcaccuucacgugcgccagcgaguacaccggcaacuaccagugcgggcacuacaagcacaucaccuccaaggagacccucuacugcaucgacggcgcccugcugacgaagagcagcgaguacaaggggcccaucaccgacguguucuacaaggagaacuccuacaccaccacgaucaagcccgugaccuacaagcucgacggcgucgugugcaccgagaucgaccccaagcuggacaacuacuacaagaaggacaacagcuacuucaccgagcagccgaucgaccuggugcccaaccagcccuaccccaacgccuccuucgacaacuucaaguucgucugcgacaacaucaaguucgccgacgaccucaaccagcugacgggguacaagaagccggcgagccgggagcugaaggugaccuucuuccccgaccucaacggcgacguggucgccaucgacuacaagcacuacacccccuccuucaagaagggcgccaagcugcugcacaagcccaucguguggcacgugaacaacgccaccaacaaggcgacguacaagccgaacaccuggugcauccgcugccucuggagcaccaagcccgucgagaccuccaacagcuucgacgugcugaaguccgaggacgcccaggggauggacaaccuggccugcgaggaccucaagcccgugagcgaggaggucguggagaaccccacgauccagaaggacgugcuggagugcaacgucaagaccaccgagguggugggcgacaucauccugaagccggccaacaacucccucaagaucaccgaggaggucgggcacacggaccugauggccgcguacguggacaacagcucccugaccaucaagaagcccaacgagcucagccgcgugcugggccugaagacccucgccacccacgggcuggccgccgucaacuccgugcccugggacacgaucgccaacuacgcgaagccguuccugaacaagguggucagcaccaccaccaacaucgugacgcggugccucaaccgcgugugcaccaacuacaugcccuacuucuucacccugcugcuccagcugugcaccuucacccgguccacgaacagccgcaucaaggccuccaugcccaccaccaucgccaagaacaccgucaagagcgugggcaaguucugccuggaggccagcuucaacuaccucaagucccccaacuucagcaagcugaucaacaucaucaucugguuccugcuccuguccgugugccugggcagccucaucuacuccacggccgcgcuggggguccugaugagcaaccucggcaugccguccuacugcaccggguaccgggagggcuaccugaacagcaccaacgugaccaucgccacguacugcaccggcuccauccccugcagcgugugccuguccgggcucgacagccuggacaccuaccccucccuggagaccauccagaucacgaucagcuccuucaagugggaccucaccgccuucggccuggucgccgagugguuccuggccuacauccucuucacccgcuucuucuacgugcuggggcuggcggccaucaugcagcucuucuucagcuacuucgccgugcacuucaucuccaacagcuggcugauguggcugaucaucaaccugguccagauggcccccaucuccgcgauggugcggauguacaucuucuucgccagcuucuacuacguguggaagagcuacguccacgugguggacggcugcaacuccagcaccugcaugaugugcuacaagcgcaaccgggccacgcgcgucgagugcaccaccaucgugaacgggguccggcgcuccuucuacguguacgccaacggcggcaagggguucugcaagcuccacaacuggaacugcgugaacugcgacaccuucugcgccggcagcacguucaucuccgacgaggucgcgcgggaccugagccugcaguucaagcgcccgaucaaccccaccgaccaguccagcuacaucguggacuccgugaccgucaagaacgggagcauccaccucuacuucgacaaggccggccagaagaccuacgagcggcacucccugagccacuucgugaaccuggacaaccuccgcgccaacaacacgaaggggucccugcccaucaacgugaucgucuucgacggcaagagcaagugcgaggaguccagcgccaaguccgccagcguguacuacucccagcugaugugccagcccauccuccugcuggaccaggcgcucgugagcgacgucggcgacagcgccgagguggccgugaagauguucgacgccuacgucaacaccuucuccagcaccuucaacgugccgauggagaagcugaagacccugguggccacggcggaggccgagcucgccaagaacgucucccuggacaacgugcugagcaccuucaucuccgccgcgcggcagggguucguggacagcgacgucgagaccaaggacgugguggagugccucaagcugucccaccagagcgacaucgaggucaccggcgacuccugcaacaacuacaugcugacguacaacaagguggagaacaugaccccccgcgaccucggggccugcaucgacugcagcgcccggcacaucaacgcccagguggccaagucccacaacaucgcgcugaucuggaacgucaaggacuucaugagccuguccgagcagcuccgcaagcagauccgcagcgccgccaagaagaacaaccugcccuucaagcugaccugcgccaccacgcggcagguggugaacgucgugaccaccaagaucgcccucaagggcggguga

SEQ ID NO: 18040 - RNA, 5841 nt, Artificial Sequence
  SARS-CoV-2__MT646054.1__non-structural protein 3 (NSP3) CDS gc
auggcccccaccaaggugaccuucggcgacgacacggucaucgaggugcagggguacaagagcgugaacaucaccuucgagcuggacgagcgcaucgacaagguccucaacgagaagugcuccgccuacaccguggagcugggcaccgaggugaacgaguucgcgugcgucguggccgacgccgugaucaagacgcugcagccggucagcgagcuccugaccccccuggggaucgaccucgacgagugguccauggccaccuacuaccuguucgacgagagcggcgaguucaagcuggccucccacauguacugcagcuucuacccccccgacgaggacgaggaggagggggacugcgaggaggaggaguucgagccguccacccaguacgaguacggcacggaggacgacuaccagggcaagccccucgaguucggggcgaccagcgccgcccugcagcccgaggaggagcaggaggaggacuggcuggacgacgacucccagcagaccgugggccagcaggacgggagcgaggacaaccagaccacgaccauccagaccaucguggagguccagccccagcucgagauggagcugaccccgguggugcagacgaucgaggucaacuccuucagcggcuaccugaagcucaccgacaacguguacaucaagaacgccgacaucguggaggaggcgaagaaggucaagcccaccgugguggucaacgccgccaacguguaccugaagcacgggggcggcguggccggggcccugaacaaggcgaccaacaacgccaugcaggucgaguccgacgacuacaucgccacgaacggcccccucaagguggggggcagcugcguccuguccggccacaaccuggccaagcacugccuccacgugguggggcccaacgucaacaagggcgaggacauccagcugcugaagagcgccuacgagaacuucaaccagcacgaggugcuccuggcgccgcugcucuccgccgggaucuucggcgccgaccccauccacagccugcgggugugcgucgacaccgugcgcaccaacguguaccuggccgucuucgacaagaaccucuacgacaagcugguguccagcuuccuggagaugaagagcgagaagcagguggagcagaagaucgccgagauccccaaggaggaggucaagcccuucaucaccgaguccaagccgagcguggagcagcggaagcaggacgacaagaagaucaaggcgugcguggaggaggucacgaccacccucgaggagaccaaguuccugacggagaaccugcuccuguacaucgacaucaacgggaaccugcaccccgacuccgccacccucgugagcgacaucgacaucaccuuccugaagaaggacgcccccuacaucgugggcgacgucgugcaggagggcgugcugaccgccgucgugauccccacgaagaaggccgggggcaccaccgagaugcucgcgaaggcccugcgcaaggugccgaccgacaacuacaucacgaccuaccccgggcagggccugaacggguacaccgucgaggaggccaagaccgugcucaagaagugcaaguccgccuucuacauccugcccagcaucaucuccaacgagaagcaggagauccugggcaccgugagcuggaaccuccgggagaugcuggcgcacgccgaggagacgcgcaagcugaugcccgucugcguggagaccaaggccaucguguccaccauccagcggaaguacaagggcaucaagauccaggagggggucguggacuacggcgcccgcuucuacuucuacaccagcaagacgaccguggccucccugaucaacacccucaacgaccugcacgagacccuggucacgaugccgcucggguacgugacccacggccugaaccuggaggaggcggcccgguacaugcgcagccucaaggugcccgccaccgucuccgugagcucccccgacgccgugaccgccuacaacggguaccugacgagcuccagcaagacccccgaggagcacuucaucgagaccaucucccuggcgggcagcuacaaggacuggagcuacuccggccagagcacccagcucgggaucgaguuccugaagcggggcgacaaguccgucuacuacacgagcaacccgaccaccuuccaccuggacggggaggugaucaccuucgacaaccucaagacgcugcugucccuccgcgaggugcggaccaucaaggucuucaccaccguggacaacaucaaccugcacacgcagguggucgacaugagcaugaccuacggccagcaguucggccccaccuaccuggacggggccgacgugaccaagaucaagccccacaacucccacgagggcaagacguucuacgugcucccgaacgacgacacccugcgcgucgaggccuucgaguacuaccacaccaccgaccccagcuuccuggggcgguacauguccgcccucaaccacacgaagaaguggaaguacccccaggugaacggccugaccagcaucaagugggccgacaacaacugcuaccuggcgaccgcccuccugacccugcagcagaucgagcucaaguucaaccccccggcccugcaggacgccuacuaccgcgcgcgggccggggaggccgccaacuucugcgcccugauccucgcguacugcaacaagacggugggcgagcugggcgacguccgcgagaccauguccuaccuguuccagcacgccaaccucgacagcugcaagcgggugcugaacgucgugugcaagaccugcgggcagcagcagaccacccugaagggcguggaggccgucauguacauggggacgcucuccuacgagcaguucaagaagggcgugcagauccccugcaccugcgggaagcaggccaccaaguaccuggugcagcaggagagccccuucgucaugauguccgcccccccggcgcaguacgagcugaagcacggcaccuucacgugcgccagcgaguacaccggcaacuaccagugcgggcacuacaagcacaucaccuccaaggagacccucuacugcaucgacggcgcccugcugacgaagagcagcgaguacaaggggcccaucaccgacguguucuacaaggagaacuccuacaccaccacgaucaagcccgugaccuacaagcucgacggcgucgugugcaccgagaucgaccccaagcuggacaacuacuacaagaaggacaacagcuacuucaccgagcagccgaucgaccuggugcccaaccagcccuaccccaacgccuccuucgacaacuucaaguucgucugcgacaacaucaaguucgccgacgaccucaaccagcugacgggguacaagaagccggcgagccgcgagcugaaggugaccuucuuccccgaccucaacggcgacguggucgccaucgacuacaagcacuacacccccuccuucaagaagggcgccaagcugcugcacaagcccaucguguggcacgugaacaacgccaccaacaaggcgacguacaagccgaacaccuggugcauccggugccucuggagcaccaagcccgucgagaccuccaacagcuucgacgugcugaaguccgaggacgcccaggggauggacaaccuggccugcgaggaccucaagcccgugagcgaggaggucguggagaaccccacgauccagaaggacgugcuggagugcaacgucaagaccaccgagguggugggcgacaucauccugaagccggccaacaacucccucaagaucaccgaggaggucgggcacacggaccugauggccgcguacguggacaacagcucccugaccaucaagaagcccaacgagcucagccgcgugcugggccugaagacccucgccacccacgggcuggccgccgucaacuccgugcccugggacacgaucgccaacuacgcgaagccguuccugaacaagguggucagcaccaccaccaacaucgugacgcgcugccucaaccgggugugcaccaacuacaugcccuacuucuucacccugcugcuccagcugugcaccuucacccgcuccacgaacagccggaucaaggccuccaugcccaccaccaucgccaagaacaccgucaagagcgugggcaaguucugccuggaggccagcuucaacuaccucaagucccccaacuucagcaagcugaucaacaucaucaucugguuccugcuccuguccgugugccugggcagccucaucuacuccacggccgcgcuggggguccugaugagcaaccucggcaugccguccuacugcaccggguaccgcgagggcuaccugaacagcaccaacgugaccaucgccacguacugcaccggcuccauccccugcagcgugugccuguccgggcucgacagccuggacaccuaccccucccuggagaccauccagaucacgaucagcuccuucaagugggaccucaccgccuucggccuggucgccgagugguuccuggccuacauccucuucacccgguucuucuacgugcuggggcuggcggccaucaugcagcucuucuucagcuacuucgccgugcacuucaucuccaacagcuggcugauguggcugaucaucaaccugguccagauggcccccaucuccgcgauggugcgcauguacaucuucuucgccagcuucuacuacguguggaagagcuacguccacgugguggacggcugcaacuccagcaccugcaugaugugcuacaagcggaaccgcgccacgcgggucgagugcaccaccaucgugaacgggguccgccgguccuucuacguguacgccaacggcggcaagggguucugcaagcuccacaacuggaacugcgugaacugcgacaccuucugcgccggcagcacguucaucuccgacgaggucgcgcgcgaccugagccugcaguucaagcggccgaucaaccccaccgaccaguccagcuacaucguggacuccgugaccgucaagaacgggagcauccaccucuacuucgacaaggccggccagaagaccuacgagcgccacucccugagccacuucgugaaccuggacaaccuccgggccaacaacacgaaggggucccugcccaucaacgugaucgucuucgacggcaagagcaagugcgaggaguccagcgccaaguccgccagcguguacuacucccagcugaugugccagcccauccuccugcuggaccaggcgcucgugagcgacgucggcgacagcgccgagguggccgugaagauguucgacgccuacgucaacaccuucuccagcaccuucaacgugccgauggagaagcugaagacccugguggccacggcggaggccgagcucgccaagaacgucucccuggacaacgugcugagcaccuucaucuccgccgcgcgccagggguucguggacagcgacgucgagaccaaggacgugguggagugccucaagcugucccaccagagcgacaucgaggucaccggcgacuccugcaacaacuacaugcugacguacaacaagguggagaacaugaccccccgggaccucggggccugcaucgacugcagcgcccgccacaucaacgcccagguggccaagucccacaacaucgcgcugaucuggaacgucaaggacuucaugagccuguccgagcagcuccggaagcagauccgcagcgccgccaagaagaacaaccugcccuucaagcugaccugcgccaccacgcgccagguggugaacgucgugaccaccaagaucgcccucaagggcggguga

SEQ ID NO: 18041 - RNA, 5841 nt, Artificial Sequence
  SARS-CoV-2__MT646073.1__non-structural protein 3 (NSP3) CDS gc
auggcccccaccaaggugaccuucggcgacgacacggucaucgaggugcagggguacaagagcgugaacaucaccuucgagcuggacgagcgcaucgacaagguccucaacgagaagugcuccgccuacaccguggagcugggcaccgaggugaacgaguucgcgugcgucguggccgacgccgugaucaagacgcugcagccggucagcgagcuccugaccccccuggggaucgaccucgacgagugguccauggccaccuacuaccuguucgacgagagcggcgaguucaagcuggccucccacauguacugcagcuucuacccccccgacgaggacgaggaggagggggacugcgaggaggaggaguucgagccguccacccaguacgaguacggcacggaggacgacuaccagggcaagccccucgaguucggggcgaccagcgccgcccugcagcccgaggaggagcaggaggaggacuggcuggacgacgacucccagcagaccgugggccagcaggacgggagcgaggacaaccagaccacgaccauccagaccaucguggagguccagccccagcucgagauggagcugaccccgguggugcagacgaucgaggucaacuccuucagcggcuaccugaagcucaccgacaacguguacaucaagaacgccgacaucguggaggaggcgaagaaggucaagcccaccgugguggucaacgccgccaacguguaccugaagcacgggggcggcguggccggggcccugaacaaggcgaccaacaacgccaugcaggucgaguccgacgacuacaucgccacgaacggcccccucaagguggggggcagcugcguccuguccggccacaaccuggccaagcacugccuccacgugguggggcccaacgucaacaagggcgaggacauccagcugcugaagagcgccuacgagaacuucaaccagcacgaggugcuccuggcgccgcugcucuccgccgggaucuucggcgccgaccccauccacagccugcgggugugcgucgacaccgugcgcaccaacguguaccuggccgucuucgacaagaaccucuacgacaagcugguguccagcuuccuggagaugaagagcgagaagcagguggagcagaagaucgccgagauccccaaggaggaggucaagcccuucaucaccgaguccaagccgagcguggagcagcggaagcaggacgacaagaagaucaaggcgugcguggaggaggucacgaccacccucgaggagaccaaguuccugacggagaaccugcuccuguacaucgacaucaacgggaaccugcaccccgacuccgccacccucgugagcgacaucgacaucaccuuccugaagaaggacgcccccuacaucgugggcgacgucgugcaggagggcgugcugaccgccgucgugauccccacgaagaaggccgggggcaccaccgagaugcucgcgaaggcccugcgcaaggugccgaccgacaacuacaucacgaccuaccccgggcagggccugaacggguacaccgucgaggaggccaagaccgugcucaagaagugcaaguccgccuucuacauccugcccagcaucaucuccaacgagaagcaggagauccugggcaccgugagcuggaaccuccgggagaugcuggcgcacgccgaggagacgcgcaagcugaugcccgucugcguggagaccaaggccaucguguccaccauccagcggaaguacaagggcaucaagauccaggacggggucguggacuacggcgcccgcuucuacuucuacaccagcaagacgaccguggccucccugaucaacacccucaacgaccugaacgagacccuggucacgaugccgcucggguacgugacccacggccugaaccuggaggaggcggcccgguacaugcgcagccucaaggugcccgccaccgucuccgugagcucccccgacgccgugaccgccuacaacggguaccugacgagcuccagcaagacccccgaggagcacuucaucgagaccaucucccuggcgggcagcuacaaggacuggagcuacuccggccagagcacccagcucgggaucgaguuccugaagcggggcgacaaguccgucuacuacacgagcaacccgaccaccuuccaccuggacggggaggugaucaccuucgacaaccucaagacgcugcugucccuccgcgaggugcggaccaucaaggucuucaccaccguggacaacaucaaccugcacacgcagguggucgacaugagcaugaccuacggccagcaguucggccccaccuaccuggacggggccgacgugaccaagaucaagccccacaacucccacgagggcaagacguucuacgugcucccgaacgacgacacccugcgcgucgaggccuucgaguacuaccacaccaccgaccccagcuuccuggggcgguacauguccgcccucaaccacacgaagaaguggaaguacccccaggugaacggccugaccagcaucaagugggccgacaacaacugcuaccuggcgaccgcccuccugacccugcagcagaucgagcucaaguucaaccccccggcccugcaggacgccuacuaccgcgcgcgggccggggaggccgccaacuucugcgcccugauccucgcguacugcaacaagacggugggcgagcugggcgacguccgcgagaccauguccuaccuguuccagcacgccaaccucgacagcugcaagcgggugcugaacgucgugugcaagaccugcgggcagcagcagaccacccugaagggcguggaggccgucauguacauggggacgcucuccuacgagcaguucaagaagggcgugcagauccccugcaccugcgggaagcaggccaccaaguaccuggugcagcaggagagccccuucgucaugauguccgcccccccggcgcaguacgagcugaagcacggcaccuucacgugcgccagcgaguacaccggcaacuaccagugcgggcacuacaagcacaucaccuccaaggagacccucuacugcaucgacggcgcccugcugacgaagagcagcgaguacaaggggcccaucaccgacguguucuacaaggagaacuccuacaccaccacgaucaagcccgugaccuacaagcucgacggcgucgugugcaccgagaucgaccccaagcuggacaacuacuacaagaaggacaacagcuacuucaccgagcagccgaucgaccuggugcccaaccagcccuaccccaacgccuccuucgacaacuucaaguucgucugcgacaacaucaaguucgccgacgaccucaaccagcugacgggguacaagaagccggcgagccgcgagcugaaggugaccuucuuccccgaccucaacggcgacguggucgccaucgacuacaagcacuacacccccuccuucaagaagggcgccaagcugcugcacaagcccaucguguggcacgugaacaacgccaccaacaaggcgacguacaagccgaacaccuggugcauccggugccucuggagcaccaagcccgucgagaccuccaacagcuucgacgugcugaaguccgaggacgcccaggggauggacaaccuggccugcgaggaccucaagcccgugagcgaggaggucguggagaaccccacgauccagaaggacgugcuggagugcaacgucaagaccaccgagguggugggcgacaucauccugaagccggccaacaacucccucaagaucaccgaggaggucgggcacacggaccugauggccgcguacguggacaacagcucccugaccaucaagaagcccaacgagcucagccgcgugcugggccugaagacccucgccacccacgggcuggccgccgucaacuccgugcccugggacacgaucgccaacuacgcgaagccguuccugaacaagguggucagcaccaccaccaacaucgugacgcgcugccucaaccgggugugcaccaacuacaugcccuacuucuucacccugcugcuccagcugugcaccuucacccgcuccacgaacagccggaucaaggccuccaugcccaccaccaucgccaagaacaccgucaagagcgugggcaaguucugccuggaggccagcuucaacuaccucaagucccccaacuucagcaagcugaucaacaucaucaucugguuccugcuccuguccgugugccugggcagccucaucuacuccacggccgcgcuggggguccugaugagcaaccucggcaugccguccuacugcaccggguaccgcgagggcuaccugaacagcaccaacgugaccaucgccacguacugcaccggcuccauccccugcagcgugugccuguccgggcucgacagccuggacaccuaccccucccuggagaccauccagaucacgaucagcuccuucaagugggaccucaccgccuucggccuggucgccgagugguuccuggccuacauccucuucacccgguucuucuacgugcuggggcuggcggccaucaugcagcucuucuucagcuacuucgccgugcacuucaucuccaacagcuggcugauguggcugaucaucaaccugguccagauggcccccaucuccgcgauggugcgcauguacaucuucuucgccagcuucuacuacguguggaagagcuacguccacgugguggacggcugcaacuccagcaccugcaugaugugcuacaagcggaaccgcgccacgcgggucgagugcaccaccaucgugaacgggguccgccgguccuucuacguguacgccaacggcggcaagggguucugcaagcuccacaacuggaacugcgugaacugcgacaccuucugcgccggcagcacguucaucuccgacgaggucgcgcgcgaccugagccugcaguucaagcggccgaucaaccccaccgaccaguccagcuacaucguggacuccgugaccgucaagaacgggagcauccaccucuacuucgacaaggccggccagaagaccuacgagcgccacucccugagccacuucgugaaccuggacaaccuccgggccaacaacacgaaggggucccugcccaucaacgugaucgucuucgacggcaagagcaagugcgaggaguccagcgccaaguccgccagcguguacuacucccagcugaugugccagcccauccuccugcuggaccaggcgcucgugagcgacgucggcgacagcgccgagguggccgugaagauguucgacgccuacgucaacaccuucuccagcaccuucaacgugccgauggagaagcugaagacccugguggccacggcggaggccgagcucgccaagaacgucucccuggacaacgugcugagcaccuucaucuccgccgcgcgccagggguucguggacagcgacgucgagaccaaggacgugguggagugccucaagcugucccaccagagcgacaucgaggucaccggcgacuccugcaacaacuacaugcugacguacaacaagguggagaacaugaccccccgggaccucggggccugcaucgacugcagcgcccgccacaucaacgcccagguggccaagucccacaacaucgcgcugaucuggaacgucaaggacuucaugagccuguccgagcagcuccggaagcagauccgcagcgccgccaagaagaacaaccugcccuucaagcugaccugcgccaccacgcgccagguggugaacgucgugaccaccaagaucgcccucaagggcggguga

SEQ ID NO: 18042 - RNA, 5841 nt, Artificial Sequence
  SARS-CoV-2__MT641485.1__non-structural protein 3 (NSP3) CDS gc
auggcccccaccaaggugaccuucggcgacgacacggucaucgaggugcagggguacaagagcgugaacaucaccuucgagcuggacgagcgcaucgacaagguccucaacgagaagugcuccgccuacaccguggagcugggcaccgaggugaacgaguucgcgugcgucguggccgacgccgugaucaagacgcugcagccggucagcgagcuccugaccccccuggggaucgaccucgacgagugguccauggccaccuacuaccuguucgacgagagcggcgaguucaagcuggccucccacauguacugcagcuucuacccccccgacgaggacgaggaggagggggacugcgaggaggaggaguucgagccguccacccaguacgaguacggcacggaggacgacuaccagggcaagccccucgaguucggggcgaccagcgccgcccugcagcccgaggaggagcaggaggaggacuggcuggacgacgacucccagcagaccgugggccagcaggacgggagcgaggacaaccagaccacgaccauccagaccaucguggagguccagccccagcucgagauggagcugaccccgguggugcagacgaucgaggucaacuccuucagcggcuaccugaagcucaccgacaacguguacaucaagaacgccgacaucguggaggaggcgaagaaggucaagcccaccgugguggucaacgccgccaacguguaccugaagcacgggggcggcguggccggggcccugaacaaggcgaccaacaacgccaugcaggucgaguccgacgacuacaucgccacgaacggcccccucaagguggggggcagcugcguccuguccggccacaaccuggccaagcacugccuccacgugguggggcccaacgucaacaagggcgaggacauccagcugcugaagagcgccuacgagaacuucaaccagcacgaggugcuccuggcgccgcugcucuccgccgggaucuucggcgccgaccccauccacagccugcgggugugcgucgacaccgugcgcaccaacguguaccuggccgucuucgacaagaaccucuacgacaagcugguguccagcuuccuggagaugaagagcgagaagcagguggagcagaagaucgccgagauccccaaggaggaggucaagcccuucaucaccgaguccaagccgagcguggagcagcggaagcaggacgacaacaagaucaaggcgugcguggaggaggucacgaccacccucgaggagaccaaguuccugacggagaaccugcuccuguacaucgacaucaacgggaaccugcaccccgacuccgccacccucgugagcgacaucgacaucaccuuccugaagaaggacgcccccuacaucgugggcgacgucgugcaggagggcgugcugaccgccgucgugauccccacgaagaaggccgggggcaccaccgagaugcucgcgaaggcccugcgcaaggugccgaccgacaacuacaucacgaccuaccccgggcagggccugaacggguacaccgucgaggaggccaagaccgugcucaagaagugcaaguccgccuucuacauccugcccagcaucaucuccaacgagaagcaggagauccugggcaccgugagcuggaaccuccgggagaugcuggcgcacgccgaggagacgcgcaagcugaugcccgucugcguggagaccaaggccaucguguccaccauccagcggaaguacaagggcaucaagauccaggagggggucguggacuacggcgcccgcuucuacuucuacaccagcaagacgaccguggccucccugaucaacacccucaacgaccugaacgagacccuggucacgaugccgcucggguacgugacccacggccugaaccuggaggaggcggcccgguacaugcgcagccucaaggugcccgccaccgucuccgugagcucccccgacgccgugaccgccuacaacggguaccugacgagcuccagcaagacccccgaggagcacuucaucgagaccaucucccuggcgggcagcuacaaggacuggagcuacuccggccagagcacccagcucgggaucgaguuccugaagcggggcgacaaguccgucuacuacacgagcaacccgaccaccuuccaccuggacggggaggugaucaccuucgacaaccucaagacgcugcugucccuccgcgaggugcggaccaucaaggucuucaccaccguggacaacaucaaccugcacacgcagguggucgacaugagcaugaccuacggccagcaguucggccccaccuaccuggacggggccgacgugaccaagaucaagccccacaacucccacgagggcaagacguucuacgugcucccgaacgacgacacccugcgcgucgaggccuucgaguacuaccacaccaccgaccccagcuuccuggggcgguacauguccgcccucaaccacacgaagaaguggaaguacccccaggugaacggccugaccagcaucaagugggccgacaacaacugcuaccuggcgaccgcccuccugacccugcagcagaucgagcucaaguucaaccccccggcccugcaggacgccuacuaccgcgcgcgggccggggaggccgccaacuucugcgcccugauccucgcguacugcaacaagacggugggcgagcugggcgacguccgcgagaccauguccuaccuguuccagcacgccaaccucgacagcugcaagcgggugcugaacgucgugugcaagaccugcgggcagcagcagaccacccugaagggcguggaggccgucauguacauggggacgcucuccuacgagcaguucaagaagggcgugcagauccccugcaccugcgggaagcaggccaccaaguaccuggugcagcaggagagccccuucgucaugauguccgcccccccggcgcaguacgagcugaagcacggcaccuucacgugcgccagcgaguacaccggcaacuaccagugcgggcacuacaagcacaucaccuccaaggagacccucuacugcaucgacggcgcccugcugacgaagagcagcgaguacaaggggcccaucaccgacguguucuacaaggagaacuccuacaccaccacgaucaagcccgugaccuacaagcucgacggcgucgugugcaccgagaucgaccccaagcuggacaacuacuacaagaaggacaacagcuacuucaccgagcagccgaucgaccuggugcccaaccagcccuaccccaacgccuccuucgacaacuucaaguucgucugcgacaacaucaaguucgccgacgaccucaaccagcugacgggguacaagaagccggcgagccgcgagcugaaggugaccuucuuccccgaccucaacggcgacguggucgccaucgacuacaagcacuacacccccuccuucaagaagggcgccaagcugcugcacaagcccaucguguggcacgugaacaacgccaccaacaaggcgacguacaagccgaacaccuggugcauccggugccucuggagcaccaagcccgucgagaccuccaacagcuucgacgugcugaaguccgaggacgcccaggggauggacaaccuggccugcgaggaccucaagcccgugagcgaggaggucguggagaaccccacgauccagaaggacgugcuggagugcaacgucaagaccaccgagguggugggcgacaucauccugaagccggccaacaacucccucaagaucaccgaggaggucgggcacacggaccugauggccgcguacguggacaacagcucccugaccaucaagaagcccaacgagcucagccgcgugcugggccugaagacccucgccacccacgggcuggccgccgucaacuccgugcccugggacacgaucgccaacuacgcgaagccguuccugaacaagguggucagcaccaccaccaacaucgugacgcgcugccucaaccgggugugcaccaacuacaugcccuacuucuucacccugcugcuccagcugugcaccuucacccgcuccacgaacagccggaucaaggccuccaugcccaccaccaucgccaagaacaccgucaagagcgugggcaaguucugccuggaggccagcuucaacuaccucaagucccccaacuucagcaagcugaucaacaucaucaucugguuccugcuccuguccgugugccugggcagccucaucuacuccacggccgcgcuggggguccugaugagcaaccucggcaugccguccuacugcaccggguaccgcgagggcuaccugaacagcaccaacgugaccaucgccacguacugcaccggcuccauccccugcagcgugugccuguccgggcucgacagccuggacaccuaccccucccuggagaccauccagaucacgaucagcuccuucaagugggaccucaccgccuucggccuggucgccgagugguuccuggccuacauccucuucacccgguucuucuacgugcuggggcuggcggccaucaugcagcucuucuucagcuacuucgccgugcacuucaucuccaacagcuggcugauguggcugaucaucaaccugguccagauggcccccaucuccgcgauggugcgcauguacaucuucuucgccagcuucuacuacguguggaagagcuacguccacgugguggacggcugcaacuccagcaccugcaugaugugcuacaagcggaaccgcgccacgcgggucgagugcaccaccaucgugaacgggguccgcaaguccuucuacguguacgccaacggcggcaagggguucugcaagcuccacaacuggaacugcgugaacugcgacaccuucugcgccggcagcacguucaucuccgacgaggucgcgcgggaccugagccugcaguucaagcgcccgaucaaccccaccgaccaguccagcuacaucguggacuccgugaccgucaagaacgggagcauccaccucuacuucgacaaggccggccagaagaccuacgagcggcacucccugagccacuucgugaaccuggacaaccuccgcgccaacaacacgaaggggucccugcccaucaacgugaucgucuucgacggcaagagcaagugcgaggaguccagcgccaaguccgccagcguguacuacucccagcugaugugccagcccauccuccugcuggaccaggcgcucgugagcgacgucggcgacagcgccgagguggccgugaagauguucgacgccuacgucaacaccuucuccagcaccuucaacgugccgauggagaagcugaagacccugguggccacggcggaggccgagcucgccaagaacgucucccuggacaacgugcugagcaccuucaucuccgccgcgcggcagggguucguggacagcgacgucgagaccaaggacgugguggagugccucaagcugucccaccagagcgacaucgaggucaccggcgacuccugcaacaacuacaugcugacguacaacaagguggagaacaugaccccccgcgaccucggggccugcaucgacugcagcgcccggcacaucaacgcccagguggccaagucccacaacaucgcgcugaucuggaacgucaaggacuucaugagccuguccgagcagcuccgcaagcagauccggagcgccgccaagaagaacaaccugcccuucaagcugaccugcgccaccacgcgccagguggugaacgucgugaccaccaagaucgcccucaagggcggguga

SEQ ID NO: 18043 - RNA, 5841 nt, Artificial Sequence
  SARS-CoV-2__MT641489.1__non-structural protein 3 (NSP3) CDS gc
auggcccccaccaaggugaccuucggcgacgacacggucaucgaggugcagggguacaagagcgugaacaucaccuucgagcuggacgagcgcaucgacaagguccucaacgagaagugcuccgccuacaccguggagcugggcaccgaggugaacgaguucgcgugcgucguggccgacgccgugaucaagacgcugcagccggucagcgagcuccugaccccccuggggaucgaccucgacgagugguccauggccaccuacuaccuguucgacgagagcggcgaguucaagcuggccucccacauguacugcagcuucuacccccccgacgaggacgaggaggagggggacugcgaggaggaggaguucgagccguccacccaguacgaguacggcacggaggacgacuaccagggcaagccccucgaguucggggcgaccagcgccgcccugcagcccgaggaggagcaggaggaggacuggcuggacgacgacucccagcagaccgugggccagcaggacgggagcgaggacaaccagaccacgaccauccagaccaucguggagguccagccccagcucgagauggagaucaccccgguggugcagacgaucgaggucaacuccuucagcggcuaccugaagcugaccgacaacguguacaucaagaacgccgacaucguggaggaggcgaagaaggucaagcccaccgugguggucaacgccgccaacguguaccucaagcacgggggcggcguggccggggcccugaacaaggcgaccaacaacgccaugcaggucgaguccgacgacuacaucgccacgaacggcccccugaagguggggggcagcugcguccucuccggccacaaccuggccaagcacugccugcacgugguggggcccaacgucaacaagggcgaggacauccagcuccugaagagcgccuacgagaacuucaaccagcacgaggugcugcucgcgccgcugcuguccgccgggaucuucggcgccgaccccauccacagccuccgggugugcgucgacaccgugcgcaccaacguguaccuggccgucuucgacaagaaccuguacgacaagcucguguccagcuuccuggagaugaagagcgagaagcagguggagcagaagaucgccgagauccccaaggaggaggucaagcccuucaucaccgaguccaagccgagcguggagcagcggaagcaggacgacaagaagaucaaggcgugcguggaggaggucacgaccacccuggaggagaccaaguuccucacgcugaaccugcuccuguacaucgacaucaacgggaaccugcaccccgacuccgccacccucgugagcgacaucgacaucaccuuccugaagaaggacgcccccuacaucgugggcgacgucgugcaggagggcgugcugaccgccgucgugauccccacgaagaaggccgggggcaccaccgagaugcucgcgaaggcccugcgcaaggugccgaccgacaacuacaucacgaccuaccccgggcagggccugaacggguacaccgucgaggaggccaagaccgugcucaagaagugcaaguccgccuucuacauccugcccagcaucaucuccaacgagaagcaggagauccugggcaccgugagcuggaaccuccgggagaugcuggcgcacgccgaggagacgcgcaagcugaugcccgucugcguggagaccaaggccaucguguccaccauccagcggaaguacaagggcaucaagauccaggagggggucguggacuacggcgcccgcuucuacuucuacaccagcaagacgaccguggccucccugaucaacacccucaacgaccugaacgagacccuggucacgaugccgcucggguacgugacccacggccugaaccuggaggaggcggcccgguacaugcgcagccucaaggugcccgccaccgucuccgugagcucccccgacgccgugaccgccuacaacggguaccugacgagcuccagcaagacccccgaggagcacuucaucgagaccaucucccuggcgggcagcuacaaggacuggagcuacuccggccagagcacccagcucgggaucgaguuccugaagcggggcgacaaguccgucuacuacacgagcaacccgaccaccuuccaccuggacggggaggugaucaccuucgacaaccucaagacgcugcugucccuccgcgaggugcggaccaucaaggucuucaccaccguggacaacaucaaccugcacacgcagguggucgacaugagcaugaccuacggccagcaguucggccccaccuaccuggacggggccgacgugaccaagaucaagccccacaacucccacgagggcaagacguucuacgugcucccgaacgacgacacccugcgcgucgaggccuucgaguacuaccacaccaccgaccccagcuuccuggggcgguacauguccgcccucaaccacacgaagaaguggaaguacccccaggugaacggccugaccagcaucaagugggccgacaacaacugcuaccuggcgaccgcccuccugacccugcagcagaucgagcucaaguucaaccccccggcccugcaggacgccuacuaccgcgcgcgggccggggaggccgccaacuucugcgcccugauccucgcguacugcaacaagacggugggcgagcugggcgacguccgcgagaccauguccuaccuguuccagcacgccaaccucgacagcugcaagcgggugcugaacgucgugugcaagaccugcgggcagcagcagaccacccugaagggcguggaggccgucauguacauggggacgcucuccuacgagcaguucaagaagggcgugcagauccccugcaccugcgggaagcaggccaccaaguaccuggugcagcaggagagccccuucgucaugauguccgcccccccggcgcaguacgagcugaagcacggcaccuucacgugcgccagcgaguacaccggcaacuaccagugcgggcacuacaagcacaucaccuccaaggagacccucuacugcaucgacggcgcccugcugacgaagagcagcgaguacaaggggcccaucaccgacguguucuacaaggagaacuccuacaccaccacgaucaagcccgugaccuacaagcucgacggcgucgugugcaccgagaucgaccccaagcuggacaacuacuacaagaaggacaacagcuacuucaccgagcagccgaucgaccuggugcccaaccagcccuaccccaacgccuccuucgacaacuucaaguucgucugcgacaacaucaaguucgccgacgaccucaaccagcugacgggguacaagaagccggcgagccgcgagcugaaggugaccuucuuccccgaccucaacggcgacguggucgccaucgacuacaagcacuacacccccuccuucaagaagggcgccaagcugcugcacaagcccaucguguggcacgugaacaacgccaccaacaaggcgacguacaagccgaacaccuggugcauccggugccucuggagcaccaagcccgucgagaccuccaacagcuucgacgugcugaaguccgaggacgcccaggggauggacaaccuggccugcgaggaccucaagcccgugagcgaggaggucguggagaaccccacgauccagaaggacgugcuggagugcaacgucaagaccaccgagguggugggcgacaucauccugaagccggccaacaacucccucaagaucaccgaggaggucgggcacacggaccugauggccgcguacguggacaacagcucccugaccaucaagaagcccaacgagcucagccgcgugcugggccugaagacccucgccacccacgggcuggccgccgucaacuccgugcccugggacacgaucgccaacuacgcgaagccguuccugaacaagguggucagcaccaccaccaacaucgugacgcgcugccucaaccgggugugcaccaacuacaugcccuacuucuucacccugcugcuccagcugugcaccuucacccgcuccacgaacagccggaucaaggccuccaugcccaccaccaucgccaagaacaccgucaagagcgugggcaaguucugccuggaggccagcuucaacuaccucaagucccccaacuucagcaagcugaucaacaucaucaucugguuccugcuccuguccgugugccugggcagccucaucuacuccacggccgcgcuggggguccugaugagcaaccucggcaugccguccuacugcaccggguaccgcgagggcuaccugaacagcaccaacgugaccaucgccacguacugcaccggcuccauccccugcagcgugugccuguccgggcucgacagccuggacaccuaccccucccuggagaccauccagaucacgaucagcuccuucaagugggaccucaccgccuucggccuggucgccgagugguuccuggccuacauccucuucacccgguucuucuacgugcuggggcuggcggccaucaugcagcucuucuucagcuacuucgccgugcacuucaucuccaacagcuggcugauguggcugaucaucaaccugguccagauggcccccaucuccgcgauggugcgcauguacaucuucuucgccagcuucuacuacguguggaagagcuacguccacgugguggacggcugcaacuccagcaccugcaugaugugcuacaagcggaaccgcgccacgcgggucgagugcaccaccaucgugaacgggguccgccgguccuucuacguguacgccaacggcggcaagggguucugcaagcuccacaacuggaacugcgugaacugcgacaccuucugcgccggcagcacguucaucuccgacgaggucgcgcgcgaccugagccugcaguucaagcggccgaucaaccccaccgaccaguccagcuacaucguggacuccgugaccgucaagaacgggagcauccaccucuacuucgacaaggccggccagaagaccuacgagcgccacucccugagccacuucgugaaccuggacaaccuccgggccaacaacacgaaggggucccugcccaucaacgugaucgucuucgacggcaagagcaagugcgaggaguccagcgccaaguccgccagcguguacuacucccagcugaugugccagcccauccuccugcuggaccaggcgcucgugagcgacgucggcgacagcgccgagguggccgugaagauguucgacgccuacgucaacaccuucuccagcaccuucaacgugccgauggagaagcugaagacccugguggccacggcggaggccgagcucgccaagaacgucucccuggacaacgugcugagcaccuucaucuccgccgcgcgccagggguucguggacagcgacgucgagaccaaggacgugguggagugccucaagcugucccaccagagcgacaucgaggucaccggcgacuccugcaacaacuacaugcugacguacaacaagguggagaacaugaccccccgggaccucggggccugcaucgacugcagcgcccgccacaucaacgcccagguggccaagucccacaacaucgcgcugaucuggaacgucaaggacuucaugagccuguccgagcagcuccggaagcagauccgcagcgccgccaagaagaacaaccugcccuucaagcugaccugcgccaccacgcgccagguggugaacgucgugaccaccaagaucgcccucaagggcggguga

SEQ ID NO: 18044 - RNA, 5841 nt, Artificial Sequence
  SARS-CoV-2__MT641492.1__non-structural protein 3 (NSP3) CDS gc
auggcccccaccaaggugaccuucggcgacgacacggucaucgaggugcagggguacaagagcgugaacaucaccuucgagcuggacgagcgcaucgacaagguccucaacgagaagugcuccgccuacaccguggagcugggcaccgaggugaacgaguucgcgugcgucguggccgacgccgugaucaagacgcugcagccggucagcgagcuccugaccccccuggggaucgaccucgacgagugguccauggccaccuacuaccuguucgacgagagcggcgaguucaagcuggccucccacauguacugcagcuucuacccccccgacgaggacgaggaggagggggacugcgaggaggaggaguucgagccguccacccaguacgaguacggcacggaggacgacuaccagggcaagccccucgaguucggggcgaccagcgccgcccugcagcccgaggaggagcaggaggaggacuggcuggacgacgacucccagcagaccgugggccagcaggacgggagcgaggacaaccagaccacgaccauccagaccaucguggagguccagccccagcucgagauggagcugaccccgguggugcagacgaucgaggucaacuccuucagcggcuaccugaagcucaccgacaacguguacaucaagaacgccgacaucguggaggaggcgaagaaggucaagcccaccgugguggucaacgccgccaacguguaccugaagcacgggggcggcguggccggggcccugaacaaggcgaccaacaacgccaugcaggucgaguccgacgacuacaucgccacgaacggcccccucaagguggggggcagcugcguccuguccggccacaaccuggccaagcacugccuccacgugguggggcccaacgucaacaagggcgaggacauccagcugcugaagagcgccuacgagaacuucaaccagcacgaggugcuccuggcgccgcugcucuccgccgggaucuucggcgccgaccccauccacagccugcgggugugcgucgacaccgugcgcaccaacguguaccuggccgucuucgacaagaaccucuacgacaagcugguguccagcuuccuggagaugaagagcgagaagcagguggagcagaagaucgccgagauccccaaggaggaggucaagcccuucaucaccgaguccaagccgagcguggagcagcggaagcaggacgacaagaagaucaaggcgugcguggaggaggucacgaccacccucgaggagaccaaguuccugacggagaaccugcuccuguacaucgacaucaacgggaaccugcaccccgacuccgccacccucgugagcgacaucgacaucaccuuccugaagaaggacgcccccuacaucgugggcgacgucgugcaggagggcgugcugaccgccgucgugauccccacgaagaaggccgggggcaccaccgagaugcucgcgaaggcccugcgcaaggugccgaccgacaacuacaucacgaccuaccccgggcagggccugaacggguacaccgucgaggaggccaagaccgugcucaagaagugcaaguccgccuucuacauccugcccagcaucaucuccaacgagaagcaggagauccugggcaccgugagcuggaaccuccgggagaugcuggcgcacgccgaggagacgcgcaagcugaugcccgucugcguggagaccaaggccaucguguccaccauccagcggaaguacaagggcaucaagauccaggagggggucguggacuacggcgcccgcuucuacuucuacaccagcaagacgaccguggccucccugaucaacacccucaacgaccugaacgagacccuggucacgaugccgcucggguacgugacccacggccugaaccuggaggaggcggcccgguacaugcgcagccucaaggugcccgccaccgucuccgugagcucccccgacgccgugaccgccuacaacggguaccugacgagcuccagcaagacccccgaggagcacuucaucgagaccaucucccuggcgggcagcuacaaggacuggagcuacuccggccagagcacccagcucgggaucgaguuccugaagcggggcgacaaguccgucuacuacacgagcaacccgaccaccuuccaccuggacggggaggugaucaccuucgacaaccucaagacgcugcugucccuccgcgaggugcggaccaucaaggucuucaccaccguggacaacaucaaccugcacacgcagguggucgacaugagcaugaccuacggccagcaguucggccccaccuaccuggacggggccgacgugaccaagaucaagccccacaacucccacgagggcaagacguucuacgugcucccgaacgacgacacccugcgcgucgaggccuucgaguacuaccacaccaccgaccccagcuuccuggggcgguacauguccgcccucaaccacacgaagaaguggaaguacccccaggugaacggccugaccagcaucaagugggccgacaacaacugcuaccuggcgaccgcccuccugacccugcagcagaucgagcucaaguucaaccccccggcccugcaggacgccuacuaccgcgcgcgggccggggaggccgccaacuucugcgcccugauccucgcguacugcaacaagacggugggcgagcugggcgacguccgcgagaccauguccuaccuguuccagcacgccaaccucgacagcugcaagcgggugcugaacgucgugugcaagaccugcgggcagcagcagaccacccugaagggcguggaggccgucauguacauggggacgcucuccuacgagcaguucaagaagggcgugcagauccccugcaccugcgggaagcaggccaccaaguaccuggugcagcaggagagccccuucgucaugauguccgcccccccggcgcaguacgagcugaagcacggcaccuucacgugcgccagcgaguacaccggcaacuaccagugcgggcacuacaagcacaucaccuccaaggagacccucuacugcaucgacggcgcccugcugacgaagagcagcgaguacaaggggcccaucaccgacguguucuacaaggagaacuccuacaccaccacgaucaagcccgugaccuacaagcucgacggcgucgugugcaccgagaucgaccccaagcuggacaacuacuacaagaaggacaacagcuacuucaccgagcagccgaucgaccuggugcccaaccagcccuaccccaacgccuccuucgacaacuucaaguucgucugcgacaacaucaaguucgccgacgaccucaaccagcugacgggguacaagaagccggcgagccgcgagcugaaggugaccuucuuccccgaccucaacggcgacguggucgccaucgacuacaagcacuacacccccuccuucaagaagggcgccaagcugcugcacaagcccaucguguggcacgugaacaacgccaccaacaaggcgacguacaagccgaacaccuggugcauccggugccucuggagcaccaagcccgucgagaccuccaacagcuucgacgugcugaaguccgaggacgcccaggggauggacaaccuggccugcgaggaccucaagcccgugagcgaggaggucguggagaaccccacgauccagaaggacgugcuggagugcaacgucaagaccaccgagguggugggcgacaucauccugaagccggccaacaacucccucaagaucaccgaggaggucgggcacacggaccugauggccgcguacguggacaacagcucccugaccaucaagaagcccaacgagcucagccgcgugcugggccugaagacccucgccacccacgggcuggccgccgucaacuccgugcccugggacacgaucgccaacuacgcgaagccguuccugaacaagguggucagcaccaccaccaacaucgugacgcgcugccucaaccgggugugcaccaacuacaugcccuacuucuucacccugaugcugcagcucugcaccuucacccgcuccacgaacagccggaucaaggccuccaugcccaccaccaucgccaagaacaccgucaagagcgugggcaaguucugccuggaggccagcuucaacuaccugaagucccccaacuucagcaagcucaucaacaucaucaucugguuccugcugcucuccgugugccugggcagccugaucuacuccacggccgcgcucgggguccugaugagcaaccugggcaugccguccuacugcaccggguaccgcgagggcuaccucaacagcaccaacgugaccaucgccacguacugcaccggcuccauccccugcagcgugugccuguccgggcuggacagccucgacaccuaccccucccuggagaccauccagaucacgaucagcuccuucaagugggaccugaccgccuucggccucgucgccgagugguuccuggccuacauccuguucacccgguucuucuacgugcucgggcuggcggccaucaugcagcuguucuucagcuacuucgccgugcacuucaucuccaacagcuggcucauguggcugaucaucaaccugguccagauggcccccaucuccgcgauggugcgcauguacaucuucuucgccagcuucuacuacguguggaagagcuacguccacgugguggacggcugcaacuccagcaccugcaugaugugcuacaagcggaaccgcgccacgcgggucgagugcaccaccaucgugaacgggguccgccgguccuucuacguguacgccaacggcggcaagggguucugcaagcugcacaacuggaacugcgugaacugcgacaccuucugcgccggcagcacguucaucuccgacgaggucgcgcgcgaccucagccugcaguucaagcggccgaucaaccccaccgaccaguccagcuacaucguggacuccgugaccgucaagaacgggagcauccaccuguacuucgacaaggccggccagaagaccuacgagcgccacucccucagccacuucgugaaccuggacaaccugcgggccaacaacacgaaggggucccuccccaucaacgugaucgucuucgacggcaagagcaagugcgaggaguccagcgccaaguccgccagcguguacuacucccagcugaugugccagcccauccugcuccuggaccaggcgcuggugagcgacgucggcgacagcgccgagguggccgugaagauguucgacgccuacgucaacaccuucuccagcaccuucaacgugccgauggagaagcucaagacccugguggccacggcggaggccgagcuggccaagaacgucucccucgacaacgugcugagcaccuucaucuccgccgcgcgccagggguucguggacagcgacgucgagaccaaggacgugguggagugccugaagcucucccaccagagcgacaucgaggucaccggcgacuccugcaacaacuacaugcugacguacaacaagguggagaacaugaccccccgggaccugggggccugcaucgacugcagcgcccgccacaucaacgcccagguggccaagucccacaacaucgcgcucaucuggaacgucaaggacuucaugagccuguccgagcagcugcggaagcagauccgcagcgccgccaagaagaacaaccuccccuucaagcugaccugcgccaccacgcgccagguggugaacgucgugaccaccaagaucgcccugaagggcggguga

SEQ ID NO: 18045 - RNA, 5841 nt, Artificial Sequence
  SARS-CoV-2__MT641496.1__non-structural protein 3 (NSP3) CDS gc
auggcccccaccaaggugaccuucggcgacgacacggucaucgaggugcagggguacaagagcgugaacaucaccuucgagcuggacgagcgcaucgacaagguccucaacgagaagugcuccgccuacaccguggagcugggcaccgaggugaacgaguucgcgugcgucguggccgacgccgugaucaagacgcugcagccggucagcgagcuccugaccccccuggggaucgaccucgacgagugguccauggccaccuacuaccuguucgacgagagcggcgaguucaagcuggccucccacauguacugcagcuucuacccccccgacgaggacgaggaggagggggacugcgaggaggaggaguucgagccguccacccaguacgaguacggcacggaggacgacuaccagggcaagccccucgaguucggggcgaccagcgccgcccugcagcccgaggaggagcaggaggaggacuggcuggacgacgacucccagcagaccgugggccagcaggacgggagcgaggacaaccagaccacgaccauccagaccaucguggagguccagccccagcucgagauggagcugaccccgguggugcagacgaucgaggucaacuccuucagcggcuaccugaagcucaccgacaacguguacaucaagaacgccgacaucguggaggaggcgaagaaggucaagcccaccgugguggucaacgccgccaacguguaccugaagcacgggggcggcguggccggggcccugaacaaggcgaccaacaacgccaugcaggucgaguccgacgacuacaucgccacgaacggcccccucaagguggggggcagcugcguccuguccggccacaaccuggccaagcacugccuccacgugguggggcccaacgucaacaagggcgaggacauccagcugcugaagagcgccuacgagaacuucaaccagcacgaggugcuccuggcgccgcugcucuccgccgggaucuucggcgccgaccccauccacagccugcgggugugcgucgacaccgugcgcaccaacguguaccuggccgucuucgacaagaaccucuacgacaagcugguguccagcuuccuggagaugaagagcgagaagcagguggagcagaagaucgccgagauccccaaggaggaggucaagcccuucaucaccgaguccaagccgagcguggagcagcggaagcaggacgacaagaagaucaaggcgugcguggaggaggucacgaccacccucgaggagaccaaguuccugacggagaaccugcuccuguacaucgacaucaacgggaaccugcaccccgacuccgccacccucgugagcgacaucgacaucaccuuccugaagaaggacgcccccuacaucgugggcgacgucgugcaggagggcgugcugaccgccgucgugauccccacgaagaaggccgggggcaccaccgagaugcucgcgaaggcccugcgcaaggugccgaccgacaacuacaucacgaccuaccccgggcagggccugaacggguacaccgucgaggaggccaagaccgugcucaagaagugcaaguccgccuucuacauccugcccagcaucaucuccaacgagaagcaggagauccugggcaccgugagcuggaaccuccgggagaugcuggcgcacgccgaggagacgcgcaagcugaugcccgucugcguggagaccaaggccaucguguccaccauccagcggaaguacaagggcaucaagauccaggagggggucguggacuacggcgcccgcuucuacuucuacaccagcaagacgaccguggccucccugaucaacacccucaacgaccugaacgagacccuggucacgaugccgcucggguacgugacccacggccugaaccuggaggaggcggcccgguacaugcgcagccucaaggugcccgccaccgucuccgugagcucccccgacgccgugaccgccuacaacggguaccugacgagcuccagcaagacccccgaggagcacuucaucgagaccaucucccuggcgggcagcuacaaggacuggagcuacuccggccagagcacccagcucgggaucgaguuccugaagcggggcgacaaguccgucuacuacacgagcaacccgaccaccuuccaccuggacggggaggugaucaccuucgacaaccucaagacgcugcugucccuccgcgaggugcggaccaucaaggucuucaccaccguggacaacaucaaccugcacacgcagguggucgacaugagcaugaccuacggccagcaguucggccccaccuaccuggacggggccgacgugaccaagaucaagccccacaacucccacgagggcaagacguucuacgugcucccgaacgacgacacccugcgcgucgaggccuucgaguacuaccacaccaccgaccccagcuuccuggggcgguacauguccgcccucaaccacacgaagaaguggaaguacccccaggugaacggccugaccagcaucaagugggccgacaacaacugcuaccuggcgaccgcccuccugacccugcagcagaucgagcucaaguucaaccccccggcccugcaggacgccuacuaccgcgcgcgggccggggaggccgccaacuucugcgcccugauccucgcguacugcaacaagacggugggcgagcugggcgacguccgcgagaccauguccuaccuguuccagcacgccaaccucgacagcugcaagcgggugcugaacgucgugugcaagaccugcgggcagcagcagaccacccugaagggcguggaggccgucauguacauggggacgcucuccuacgagcaguucaagaagggcgugcagauccccugcaccugcgggaagcaggccaccaaguaccuggugcagcaggagagccccuucgucaugauguccgcccccccggcgcaguacgagcugaagcacggcaccuucacgugcgccagcgaguacaccggcaacuaccagugcgggcacuacaagcacaucaccuccaaggagacccucuacugcaucgacggcgcccugcugacgaagagcagcgaguacaaggggcccaucaccgacguguucuacaaggagaacuccuacaccaccacgaucaagcccgugaccuacaagcucgacggcgucgugugcaccgagaucgaccccaagcuggacaacuacuacaagaaggacaacagcuacuucaccgagcagccgaucgaccuggugcccaaccagcccuaccccaacgccuccuucgacaacuucaaguucgucugcgacaacaucaaguucgccgacgaccucaaccagcugacgggguacaagaagccggcgagccgcgagcugaaggugaccuucuuccccgaccucaacggcgacguggucgccaucgacuacaagcacuacacccccuccuucaagaagggcgccaagcugcugcacaagcccaucguguggcacgugaacaacgccaccaacaaggcgacguacaagccgaacaccuggugcauccggugccucuggagcaccaagcccgucgagaccuccaacagcuucgacgugcugaaguccgaggacgcccaggggauggacaaccuggccugcgaggaccucaagcccgugagcgaggaggucguggagaaccccacgauccagaaggacgugcuggagugcaacgucaagaccaccgagguggugggcgacaucauccugaagccggccaacaacucccucaagaucaccgaggaggucgggcacacggaccugauggccgcguacguggacaacagcucccugaccaucaagaagcccaacgagcucagccgcgugcugggccugaagacccucgccacccacgggcuggccgccgucaacuccgugcccugggacacgaucgccaacuacgcgaagccguuccugaacaagguggucagcaccaccaccaacaucgugacgcgcugccucaaccgggugugcaccaacuacaugcccuacuucuucacccugcugcuccagcugugcaccuucacccgcuccacgaacagccggaucaaggccuccaugcccaccaccaucgccaagaacaccgucaagagcgugggcaaguucugccuggaggccagcuucaacuaccucaagucccccaacuucagcaagcugaucaacaucaucaucugguuccugcuccuguccgugugccugggcagccucaucuacuccacggccgcgcuggggguccugaugagcaaccucggcaugccguccuacugcaccggguaccgcgagggcuaccugaacagcaccaacgugaccaucgccacguacugcaccggcuccauccccugcagcgugugccuguccgggcucgacagccuggacaccuaccccucccuggagaccauccagaucacgaucagcuccuucaagugggaccucaccgccuucggccuggucgccgagugguuccuggccuacauccucuucacccgguucuucuacgugcuggggcuggcggccaucaugcagcucuucuucagcuacuucgccgugcacuucaucuccaacagcuggcugauguggcugaucaucaaccugguccagauggcccccaucuccgcgauggugcgcauguacaucuucuucgccagcuucuacuacguguggaagagcuacguccacgugguggacggcugcaacuccagcaccugcaugaugugcuacaagcggaaccgcgccacgcgggucgagugcaccaccaucgugaacgggguccgccgguccuucuacguguacgccaacggcggcaagggguucugcaagcuccacaacuggaacugcgugaacugcgacaccuucugcgccggcagcacguucaucuccgacgaggucgcgcgcgaccugagccugcaguucaagcggccgaucaaccccaccgaccaguccagcuacaucguggacuccgugaccgucaacaacgggagcauccaccucuacuucgacaaggccggccagaagaccuacgagcgccacucccugagccacuucgugaaccuggacaaccuccgggccaacaacacgaaggggucccugcccaucaacgugaucgucuucgacggcaagagcaagugcgaggaguccagcgccaaguccgccagcguguacuacucccagcugaugugccagcccauccuccugcuggaccaggcgcucgugagcgacgucggcgacagcgccgagguggccgugaagauguucgacgccuacgucaacaccuucuccagcaccuucaacgugccgauggagaagcugaagacccugguggccacggcggaggccgagcucgccaagaacgucucccuggacaacgugcugagcaccuucaucuccgccgcgcgccagggguucguggacagcgacgucgagaccaaggacgugguggagugccucaagcugucccaccagagcgacaucgaggucaccggcgacuccugcaacaacuacaugcugacguacaacaagguggagaacaugaccccccgggaccucggggccugcaucgacugcagcgcccgccacaucaacgcccagguggccaagucccacaacaucgcgcugaucuggaacgucaaggacuucaugagccuguccgagcagcuccggaagcagauccgcagcgccgccaagaagaacaaccugcccuucaagcugaccugcgccaccacgcgccagguggugaacgucgugaccaccaagaucgcccucaagggcggguga

SEQ ID NO: 18046 - RNA, 5841 nt, Artificial Sequence
  SARS-CoV-2__MT641501.1__non-structural protein 3 (NSP3) CDS gc
auggcccccaccaaggugaccuucggcgacgacacggucaucgaggugcagggguacaagagcgugaacaucaccuucgagcuggacgagcgcaucgacaagguccucaacgagaagugcuccgccuacaccguggagcugggcaccgaggugaacgaguucgcgugcgucguggccgacgccgugaucaagacgcugcagccggucagcgagcuccugaccccccuggggaucgaccucgacgagugguccauggccaccuacuaccuguucgacgagagcggcgaguucaagcuggccucccacauguacugcagcuucuacccccccgacgaggacgaggaggagggggacugcgaggaggaggaguucgagccguccacccaguacgaguacggcacggaggacgacuaccagggcaagccccucgaguucggggcgaccagcgccgcccugcagcccgaggaggagcaggaggaggacuggcuggacgacgacucccagcagaccgugggccagcaggacgggagcgaggacaaccagaccacgaccauccagaccaucguggagguccagccccagcucgagauggagcugaccccgguggugcagacgaucgaggucaacuccuucagcggcuaccugaagcucaccgacaacguguacaucaagaacgccgacaucguggaggaggcgaagaaggucaagcccaccgugguggucaacgccgccaacguguaccugaagcacgggggcggcguggccggggcccugaacaaggcgaccaacaacgccaugcaggucgaguccgacgacuacaucgccacgaacggcccccucaagguggggggcagcugcguccuguccggccacaaccuggccaagcacugccuccacgugguggggcccaacgucaacaagggcgaggacauccagcugcugaagagcgccuacgagaacuucaaccagcacgaggugcuccuggcgccgcugcucuccgccgggaucuucggcgccgaccccauccacagccugcgggugugcgucgacaccgugcgcaccaacguguaccuggccgucuucgacaagaaccucuacgacaagcugguguccagcuuccuggagaugaagagcgagaagcagguggagcagaagaucgccgagauccccaaggaggaggucaagcccuucaucaccgaguccaagccgagcguggagcagcggaagcaggacgacaagaagaucaaggcgugcguggaggaggucacgaccacccucgaggagaccaaguuccugacggagaaccugcuccuguacaucgacaucaacgggaaccugcaccccgacuccgccacccucgugagcgacaucgacaucaccuuccugaagaaggacgcccccuacaucgugggcgacgucgugcaggagggcgugcugaccgccgucgugauccccacgaagaaggccgggggcaccaccgagaugcucgcgaaggcccugcgcaaggugccgaccgacaacuacaucacgaccuaccccgggcagggccugaacggguacaccgucgaggaggccaagaccgugcucaagaagugcaaguccgccuucuacauccugcccagcaucaucuccaacgagaagcaggagauccugggcaccgugagcuggaaccuccgggagaugcuggcgcacgccgaggagacgcgcaagcugaugcccgucugcguggagaccaaggccaucguguccaccauccagcggaaguacaagggcaucaagauccaggagggggucguggacuacggcgcccgcuucuacuucuacaccagcaagacgaccguggccucccugaucaacacccucaacgaccugaacgagacccuggucacgaugccgcucggguacgugacccacggccugaaccuggaggaggcggcccgguacaugcgcagccucaaggugcccgccaccgucuccgugagcucccccgacgccgugaccgccuacaacggguaccugacgagcuccagcaagacccccgaggagcacuucaucgagaccaucucccuggcgggcagcuacaaggacuggagcuacuccggccagagcacccagcucgggaucgaguuccugaagcggggcgacaaguccgucuacuacacgagcaacccgaccaccuuccaccuggacggggaggugaucaccuucgacaaccucaagacgcugcugucccuccgcgaggugcggaccaucaaggucuucaccaccguggacaacaucaaccugcacacgcagguggucgacaugagcaugaccuacggccagcaguucggccccaccuaccuggacggggccgacgugaccaagaucaagccccacaacucccacgagggcaagacguucuacgugcucccgaacgacgacacccugcgcgucgaggccuucgaguacuaccacaccaccgaccccagcuuccuggggcgguacauguccgcccucaaccacacgaagaaguggaaguacccccaggugaacggccugaccagcaucaagugggccgacaacaacugcuaccuggcgaccgcccuccugacccugcagcagaucgagcucaaguucaaccccccggcccugcaggacgccuacuaccgcgcgcgggccggggaggccgccaacuucugcgcccugauccucgcguacugcaacaagacggugggcgagcugggcgacguccgcgagaccauguccuaccuguuccagcacgccaaccucgacagcugcaagcgggugcugaacgucgugugcaagaccugcgggcagcagcagaccacccugaagggcguggaggccgucauguacauggggacgcucuccuacgagcaguucaagaagggcgugcagauccccugcaccugcgggaagcaggccaccaaguaccuggugcagcaggagagccccuucgucaugauguccgcccccccggcgcaguacgagcugaagcacggcaccuucaucugcgccagcgaguacacgggcaacuaccagugcgggcacuacaagcacaucaccuccaaggagacccucuacugcaucgacggcgcccugcugaccaagagcagcgaguacaaggggcccaucacggacguguucuacaaggagaacuccuacaccaccaccaucaagcccgugacguacaagcucgacggcgucgugugcaccgagaucgaccccaagcuggacaacuacuacaagaaggacaacagcuacuucaccgagcagccgaucgaccuggugcccaaccagcccuaccccaacgccuccuucgacaacuucaaguucgucugcgacaacaucaaguucgccgacgaccucaaccagcugaccggguacaagaagccggcgagccgcgagcugaaggugacguucuuccccgaccucaacggcgacguggucgccaucgacuacaagcacuacacccccuccuucaagaagggcgccaagcugcugcacaagcccaucguguggcacgugaacaacgccaccaacaaggcgaccuacaagccgaacacguggugcauccggugccucuggagcaccaagcccgucgagaccuccaacagcuucgacgugcugaaguccgaggacgcccaggggauggacaaccuggccugcgaggaccucaagcccgugagcgaggaggucguggagaaccccaccauccagaaggacgugcuggagugcaacgucaagacgaccgagguggugggcgacaucauccugaagccggccaacaacucccucaagaucaccgaggaggucgggcacaccgaccugauggccgcguacguggacaacagcucccugacgaucaagaagcccaacgagcucagccgcgugcugggccugaagacccucgccacccacgggcuggccgccgucaacuccgugcccugggacaccaucgccaacuacgcgcgcccguuccugaacaagguggucagcacgaccaccaacaucgugacccggugccucaaccgcgugugcacgaacuacaugcccuacuucuucacccugcugcuccagcugugcaccuucacccgguccaccaacagccgcaucaaggccuccaugcccacgaccaucgccaagaacaccgucaagagcgugggcaaguucugccuggaggccagcuucaacuaccucaagucccccaacuucagcaagcugaucaacaucaucaucugguuccugcuccuguccgugugccugggcagccucaucuacuccaccgccgcgcuggggguccugaugagcaaccucggcaugccguccuacugcacgggguaccgggagggcuaccugaacagcaccaacgugaccaucgccaccuacugcacgggcuccauccccugcagcgugugccuguccgggcucgacagccuggacaccuaccccucccuggagaccauccagaucaccaucagcuccuucaagugggaccucacggccuucggccuggucgccgagugguuccuggccuacauccucuucacccgcuucuucuacgugcuggggcuggcggccaucaugcagcucuucuucagcuacuucgccgugcacuucaucuccaacagcuggcugauguggcugaucaucaaccugguccagauggcccccaucuccgcgauggugcggauguacaucuucuucgccagcuucuacuacguguggaagagcuacguccacgugguggacggcugcaacuccagcaccugcaugaugugcuacaagcgcaaccgggccacccgcgucgagugcacgaccaucgugaacgggguccggcgcuccuucuacguguacgccaacggcggcaagggguucugcaagcuccacaacuggaacugcgugaacugcgacaccuucugcgccggcagcaccuucaucuccgacgaggucgcgcgggaccugagccugcaguucaagcgcccgaucaaccccacggaccaguccagcuacaucguggacuccgugaccgucaagaacgggagcauccaccucuacuucgacaaggccggccagaagaccuacgagcggcacucccugagccacuucgugaaccuggacaaccuccgcgccaacaacaccaaggggucccugcccaucaacgugaucgucuucgacggcaagagcaagugcgaggaguccagcgccaaguccgccagcguguacuacucccagcugaugugccagcccauccuccugcuggaccaggcgcucgugagcgacgucggcgacagcgccgagguggccgugaagauguucgacgccuacgucaacacguucuccagcaccuucaacgugccgauggagaagcugaagacccugguggccaccgcggaggccgagcucgccaagaacgucucccuggacaacgugcugagcacguucaucuccgccgcgcggcagggguucguggacagcgacgucgagaccaaggacgugguggagugccucaagcugucccaccagagcgacaucgaggucaccggcgacuccugcaacaacuacaugcugaccuacaacaagguggagaacaugacgccccgcgaccucggggccugcaucgacugcagcgcccggcacaucaacgcccagguggccaagucccacaacaucgcgcugaucuggaacgucaaggacuucaugagccuguccgagcagcuccgcaagcagauccgcagcgccgccaagaagaacaaccugcccuucaagcugaccugcgccaccacccggcagguggugaacgucgugacgaccaagaucgcccucaagggcggguga

SEQ ID NO: 18047 - RNA, 5841 nt, Artificial Sequence
  SARS-CoV-2__MT641511.1__non-structural protein 3 (NSP3) CDS gc
auggcccccaccaaggugaccuucggcgacgacacggucaucgaggugcagggguacaagagcgugaacaucaccuucgagcuggacgagcgcaucgacaagguccucaacgagaagugcuccgccuacaccguggagcugggcaccgaggugaacgaguucgcgugcgucguggccgacgccgugaucaagacgcugcagccggucagcgagcuccugaccccccuggggaucgaccucgacgagugguccauggccaccuacuaccuguucgacgagagcggcgaguucaagcuggccucccacauguacugcagcuucuacccccccgacgaggacgaggaggagggggacugcgaggaggaggaguucgagccguccacccaguacgaguacggcacggaggacgacuaccagggcaagccccucgaguucggggcgaccagcgccgcccugcagcccgaggaggagcaggaggaggacuggcuggacgacgacucccagcagaccgugggccagcaggacgggagcgaggacaaccagaccacgaccauccagaccaucguggagguccagccccagcucgagauggagcugaccccgguggugcagacgaucgaggucaacuccuucagcggcuaccugaagcucaccgacaacguguacaucaagaacgccgacaucguggaggaggcgaagaaggucaagcccaccgugguggucaacgccgccaacguguaccugaagcacgggggcggcguggccggggcccugaacaaggcgaccaacaacgccaugcaggucgaguccgacgacuacaucgccacgaacggcccccucaagguggggggcagcugcguccuguccggccacaaccuggccaagcacugccuccacgugguggggcccaacgucaacaagggcgaggacauccagcugcugaagagcgccuacgagaacuucaaccagcacgaggugcuccuggcgccgcugcucuccgccgggaucuucggcgccgaccccauccacagccugcgggugugcgucgacaccgugcgcaccaacguguaccuggccgucuucgacaagaaccucuacgacaagcugguguccagcuuccuggagaugaagagcgagaagcagguggagcagaagaucgccgagauccccaaggaggaggucaagcccuucaucaccgaguccaagccgagcguggagcagcggaagcaggacgacaagaagaucaaggcgugcguggaggaggucacgaccacccucgaggagaccaaguuccugacggagaaccugcuccuguacaucgacaucaacgggaaccugcaccccgacuccgccacccucgugagcgacaucgacaucaccuuccugaagaaggacgcccccuacaucgugggcgacgucgugcaggagggcgugcugaccgccgucgugauccccacgaagaaggccgggggcaccaccgagaugcucgcgaaggcccugcgcaaggugccgaccgacaacuacaucacgaccuaccccgggcagggccugaacggguacaccgucgaggaggccaagaccgugcucaagaagugcaaguccgccuucuacauccugcccagcaucaucuccaacgagaagcaggagauccugggcaccgugagcuggaaccuccgggagaugcuggcgcacgccgaggagacgcgcaagcugaugcccgucugcguggagaccaaggccaucguguccaccauccagcggaaguacaagggcaucaagauccaggagggggucguggacuacggcgcccgcuucuacuucuacaccagcaagacgaccguggccucccugaucaacacccucaacgaccugaacgagacccuggucacgaugccgcucggguacgugacccacggccugaaccuggaggaggcggcccgguacaugcgcagccucaaggugcccgccaccgucuccgugagcucccccgacgccgugaccgccuacaacggguaccugacgagcuccagcaagacccccgaggagcacuucaucgagaccaucucccuggcgggcagcuacaaggacuggagcuacuccggccagagcacccagcucgggaucgaguuccugaagcggggcgacaaguccgucuacuacacgagcaacccgaccaccuuccaccuggacggggaggugaucaccuucgacaaccucaagacgcugcugucccuccgcgaggugcggaccaucaaggucuucaccaccguggacaacaucaaccugcacacgcagguggucgacaugagcaugaccuacggccagcaguucggccccaccuaccuggacggggccgacgugaccaagaucaagccccacaacucccacgagggcaagacguucuacgugcucccgaacgacgacacccugcgcgucgaggccuucgaguacuaccacaccaccgaccccagcuuccuggggcgguacauguccgcccucaaccacacgaagaaguggaaguacccccaggugaacggccugaccagcaucaagugggccgacaacaacugcuaccuggcgaccgcccuccugacccugcagcagaucgagcucaaguucaaccccccggcccugcaggacgccuacuaccgcgcgcgggccggggaggccgccaacuucugcgcccugauccucgcguacugcaacaagacggugggcgagcugggcgacguccgcgagaccauguccuaccuguuccagcacgccaaccucgacagcugcaagcgggugcugaacgucgugugcaagaccugcgggcagcagcagaccacccugaagggcguggaggccgucauguacauggggacgcucuccuacgagcaguucaagaagggcgugcagauccccugcaccugcgggaagcaggccaccaaguaccuggugcagcaggagagccccuucgucaugauguccgcccccccggcgcaguacgagcugaagcacggcaccuucacgugcgccagcgaguacaccggcaacuaccagugcgggcacuacaagcacaucaccuccaaggagacccucuacugcaucgacggcgcccugcugacgaagagcagcgaguacaaggggcccaucaccgacguguucuacaaggagaacuccuacaccaccacgaucaagcccgugaccuacaagcucgacggcgucgugugcaccgagaucgaccccaagcuggacaacuacuacaagaaggacaacagcuacuucaccgagcagccgaucgaccuggugcccaaccagcccuaccccaacgccuccuucgacaacuucaaguucgucugcgacaacaucaaguucgccgacgaccucaaccagcugacgggguacaagaagccggcgagccgcgagcugaaggugaccuucuuccccgaccucaacggcgacguggucgccaucgacuacaagcacuacacccccuccuucaagaagggcgccaagcugcugcacaagcccaucguguggcacgugaacaacgccaccaacaaggcgacguacaagccgaacaccuggugcauccggugccucuggagcaccaagcccgucgagaccuccaacagcuucgacgugcugaaguccgaggacgcccaggggauggacaaccuggccugcgaggaccucaagcccgugagcgaggaggucguggagaaccccacgauccagaaggacgugcuggagugcaacgucaagaccaccgagguggugggcgacaucauccugaagccggccaacaacucccucaagaucaccgaggaggucgggcacacggaccugauggccgcguacguggacaacagcucccugaccaucaagaagcccaacgagcucagccgcgugcugggccugaagacccucgccacccacgggcuggccgccgucaacuccgugcccugggacacgaucgccaacuacgcgaagccguuccugaacaagguggucagcaccaccaccaacaucgugacgcgcugccucaaccgggugugcaccaacuacaugcccuacuucuucacccugcugcuccagcugugcaccuucacccgcuccacgaacagccggaucaaggccuccaugcccaccaccaucgccaagaacaccgucaagagcgugggcaaguucugccuggaggccagcuucaacuaccucaagucccccaacuucagcaagcugaucaacaucaucaucugguuccugcuccuguccgugugccugggcagccucaucuacuccacggccgcgcuggggguccugaugagcaaccucggcaugccguccuacugcaccggguaccgcgagggcuaccugaacagcaccaacgugaccaucgccacguacugcaccggcuccauccccugcagcgugugccuguccgggcucgacagccuggacaccuaccccucccuggagaccauccagaucacgaucagcuccuucaagugggaccucaccgccuucggccuggucgccgagugguuccuggccuacauccucuucacccgguucuucuacgugcuggggcuggcggccaucaugcagcucuucuucagcuacuucgccgugcacuucaucuccaacagcuggcugauguggcugaucaucaaccugguccagauggcccccaucuccgcgauggugcgcauguacaucuucuucgccagcuucuacuacguguggaagagcuacguccacgugguggacggcugcaacuccagcaccugcaugaugugcuacaagcggaaccgcgccacgcgggucgagugcaccaccaucgugaacgggguccgccgguccuucuacguguacgccaacggcggcaagggguucugcaagcuccacaacuggaacugcgugaacugcgacaccuucugcgccggcagcacguucaucuccgacgaggucgcgcgcgaccugagccugcaguucaagcggccgaucaaccccaccgaccaguccagcuacaucguggacuccgugaccgucaagaacgggagcauccaccucuacuucgacaaggccggccagaagaccuacgagcgccacucccugagccacuucgugaaccuggacaaccuccgggccaacuccacgaaggggagccugcccaucaacgugaucgucuucgacggcaaguccaagugcgaggagagcuccgccaagagcgccuccguguacuacagccagcugaugugccagcccauccuccugcuggaccaggcgcucgugagcgacgucggcgacuccgccgagguggccgugaagauguucgacgccuacgucaacaccuucagcuccaccuucaacgugccgauggagaagcugaagacccugguggccacggcggaggccgagcucgccaagaacgucagccuggacaacgugcuguccaccuucaucagcgccgcgcgccagggguucguggacuccgacgucgagaccaaggacgugguggagugccucaagcugagccaccaguccgacaucgaggucaccggcgacagcugcaacaacuacaugcugacguacaacaagguggagaacaugaccccccgggaccucggggccugcaucgacugcuccgcccgccacaucaacgcccagguggccaagagccacaacaucgcgcugaucuggaacgucaaggacuucaugucccugagcgagcagcuccggaagcagauccgcuccgccgccaagaagaacaaccugcccuucaagcugaccugcgccaccacgcgccagguggugaacgucgugaccaccaagaucgcccucaagggcggguga

SEQ ID NO: 18048 - RNA, 5841 nt, Artificial Sequence
  SARS-CoV-2__MT641518.1__non-structural protein 3 (NSP3) CDS gc
auggcccccaccaaggugaccuucggcgacgacacggucaucgaggugcagggguacaagagcgugaacaucaccuucgagcuggacgagcgcaucgacaagguccucaacgagaagugcuccgccuacaccguggagcugggcaccgaggugaacgaguucgcgugcgucguggccgacgccgugaucaagacgcugcagccggucagcgagcuccugaccccccuggggaucgaccucgacgagugguccauggccaccuacuaccuguucgacgagagcggcgaguucaagcuggccucccacauguacugcagcuucuacccccccgacgaggacgaggaggagggggacugcgaggaggaggaguucgagccguccacccaguacgaguacggcacggaggacgacuaccagggcaagccccucgaguucggggcgaccagcgccgcccugcagcccgaggaggagcaggaggaggacuggcuggacgacgacucccagcagaccgugggccagcaggacgggagcgaggacaaccagaccacgaccauccagaccaucguggagguccagccccagcucgagauggagcugaccccgguggugcagacgaucgaggucaacuccuucagcggcuaccugaagcucaccgacaacguguacaucaagaacgccgacaucguggaggaggcgaagaaggucaagcccaccgugguggucaacgccgccaacguguaccugaagcacgggggcggcguggccggggcccugaacaaggcgaccaacaacgccaugcaggucgaguccgacgacuacaucgccacgaacggcccccucaagguggggggcagcugcguccuguccggccacaaccuggccaagcacugccuccacgugguggggcccaacgucaacaagggcgaggacauccagcugcugaagagcgccuacgagaacuucaaccagcacgaggugcuccuggcgccgcugcucuccgccgggaucuucggcgccgaccccauccacagccugcgggugugcgucgacaccgugcgcaccaacguguaccuggccgucuucgacaagaaccucuacgacaagcugguguccagcuuccuggagaugaagagcgagaagcagguggagcagaagaucgccgagauccccaaggaggaggucaagcccuucaucaccgaguccaagccgagcguggagcagcggaagcaggacgacaagaagaucaaggcgugcguggaggaggucacgaccacccucgaggagaccaaguuccugacggagaaccugcuccuguacaucgacaucaacgggaaccugcaccccgacuccgccacccucgugagcgacaucgacaucaccuuccugaagaaggacgcccccuacaucgugggcgacgucgugcaggagggcgugcugaccgccgucgugauccccacgaagaaggccgggggcaccaccgagaugcucgcgaaggcccugcgcaaggugccgaccgacaacuacaucacgaccuaccccgggcagggccugaacggguacaccgucgaggaggccaagaccgugcucaagaagugcaaguccgccuucuacauccugcccagcaucaucuccaacgagaagcaggagauccugggcaccgugagcuggaaccuccgggagaugcuggcgcacgccgaggagacgcgcaagcugaugcccgucugcguggagaccaaggccaucguguccaccauccagcggaaguacaagggcaucaagauccaggagggggucguggacuacggcgcccgcuucuacuucuacaccagcaagacgaccguggccucccugaucaacacccucaacgaccugaacgagacccuggucacgaugccgcucggguacgugacccacggccugaaccuggaggaggcggcccgguacaugcgcagccucaaggugcccgccaccgucuccgugagcucccccgacgccgugaccgccuacaacggguaccugacgagcuccagcaagacccccgaggagcacuucaucgagaccaucucccuggcgggcagcuacaaggacuggagcuacuccggccagagcacccagcucgggaucgaguuccugaagcggggcgacaaguccgucuacuacacgagcaacccgaccaccuuccaccuggacggggaggugaucaccuucgacaaccucaagacgcugcugucccuccgcgaggugcggaccaucaaggucuucaccaccguggacaacaucaaccugcacacgcagguggucgacaugagcaugaccuacggccagcaguucggccccaccuaccuggacggggccgacgugaccaagaucaagccccacaacucccacgagggcaagacguucuacgugcucccgaacgacgacacccugcgcgucgaggccuucgaguacuaccacaccaccgaccccagcuuccuggggcgguacauguccgcccucaaccacacgaagaaguggaaguacccccaggugaacggccugaccagcaucaagugggccgacaacaacugcuaccuggcgaccgcccuccugacccugcagcagaucgagcucaaguucaaccccccggcccugcaggacgccuacuaccgcgcgcgggccggggaggccgccaacuucugcgcccugauccucgcguacugcaacaagacggugggcgagcugggcgacguccgcgagaccauguccuaccuguuccagcacgccaaccucgacagcugcaagcgggugcugaacgucgugugcaagaccugcgggcagcagcagaccacccugaagggcguggaggccgucauguacauggggacgcucuccuacgagcaguucaagaagggcgugcagauccccugcaccugcgggaagcaggccaccaaguaccuggugcagcaggagagccccuucgucaugauguccgcccccccggcgcaguacgagcugaagcacggcaccuucacgugcgccagcgaguacaccggcaacuaccagugcgggcacuacaagcacaucaccuccaaggagacccucuacugcaucgacggcgcccugcugacgaagagcagcgaguacaaggggcccaucaccgacguguucuacaaggagaacuccuacaccaccacgaucaagcccgugaccuacaagcucgacggcgucgugugcaccgagaucgaccccaagcuggacaacuacuacaagaaggacaacagcuacuucaccgagcagccgaucgaccuggugcccaaccagcccuaccccaacgccuccuucgacaacuucaaguucgucugcgacaacaucaaguucgccgacgaccucaaccagcugacgggguacaagaagccggcgagccgcgagcugaaggugaccuucuuccccgaccucaacggcgacguggucgccaucgacuacaagcacuacacccccuccuucaagaagggcgccaagcugcugcacaagcccaucguguggcacgugaacaacgccaccaacaaggcgacguacaagccgaacaccuggugcauccggugccucuggagcaccaagcccgucgagaccuccaacagcuucgacgugcugaaguccgaggacgcccaggggauggacaaccuggccugcgaggaccucaagcccgugagcgaggaggucguggagaaccccacgauccagaaggacgugcuggagugcaacgucaagaccaccgagguggugggcgacaucauccugaagccggccaacaacucccucaagaucaccgaggaggucgggcacacggaccugauggccgcguacguggacaacagcucccugaccaucaagaagcccaacgagcucagccgcgugcugggccugaagacccucgccacccacgggcuggccgccgucaacuccgugcccugggacacgaucgccaacuacgcgaagccguuccugaacaagguggucagcaccaccaccaacaucgugacgcgcugccucaaccgggugugcaccaacuacaugcccuacuucuucacccugcugcuccagcugugcaccuucacccgcuccacgaacagccggaucaaggccuccaugcccaccaccaucgccaagaacaccgucaagagcgugggcaaguucugccuggaggccagcuucaacuaccucaagucccccaacuucagcaagcugaucaacaucaucaucugguuccugcuccuguccgugugccugggcagccucaucuacuccacggccgcgcuggggguccugaugagcaaccucggcaugccguccuacugcaccggguaccgcgagggcuaccugaacagcaccaacgugaccaucgccacguacugcaccggcuccauccccugcagcgugugccuguccgggcucgacagccuggacaccuaccccucccuggagaccauccagaucacgaucagcuccuucaagugggaccucaccgccuucggccuggucgccgagugguuccuggccuacauccucuucacccgguucuucuacgugcuggggcuggcggccaucaugcagcucuucuucagcuacuucgccgugcacuucaucuccaacagcuggcugauguggcugaucaucaaccugguccagauggcccccaucuccgcgauggugcgcauguacaucuucuucgccagcuucuacuacguguggaagagcuacguccacgugguggacggcugcaacuccagcaccugcaugaugugcuacaagcggaaccgcgccacgcgggucgagugcaccaccaucgugaacgggguccgccgguccuucuacguguacgccaacggcggcaagggguucugcaagcuccacaacuggaacugcgugaacugcgacaccuucugcgccggcagcacguucaucuccgacgaggucgcgcgcgaccugagccugcaguucaagcggccgaucaaccccaccgaccaguccagcuacaucguggacuccgugaccgucaagaacgggagcauccaccucuacuucgacaaggccggccagaagaccuacgagcgccacucccugagccacuucgugaaccuggacaaccuccgggccaacaacacgaaggggucccugcccaucaacgugaucgucuucgacggcaagagcaagugcgaggaguccagcgccaaguccgccagcguguacuacucccagcugaugugccagcccauccuccugcuggaccaggcgcucgugagcgacgucggcgacagcgccgagguggccgugaagauguucgacgccuacgucaacaccuucuccagcaccuucaacgugccgauggagaagcugaagacccugguggccacggcggaggccgagcucgccaagaacgucucccuggacaacgugcugagcaccuucaucuccgccgcgcgccagggguucguggacagcgacgucgagaccaaggacgugguggagugccucaagcugucccaccaguucgacaucgaggucaccggcgacagcugcaacaacuacaugcugacguacaacaagguggagaacaugaccccccgggaccucggggccugcaucgacugcuccgcccgccacaucaacgcccagguggccaagagccacaacaucgcgcugaucuggaacgucaaggacuucaugucccugagcgagcagcuccggaagcagauccgcuccgccgccaagaagaacaaccugcccuucaagcugaccugcgccaccacgcgccagguggugaacgucgugaccaccaagaucgcccucaagggcggguga

SEQ ID NO: 18049 - RNA, 5841 nt, Artificial Sequence
  SARS-CoV-2__MT641645.1__non-structural protein 3 (NSP3) CDS gc
auggcccccaccaaggugaccuucggcgacgacacggucaucgaggugcagggguacaagagcgugaacaucaccuucgagcuggacgagcgcaucgacaagguccucaacgagaagugcuccgccuacaccguggagcugggcaccgaggugaacgaguucgcgugcgucguggccgacgccgugaucaagacgcugcagccggucagcgagcuccugaccccccuggggaucgaccucgacgagugguccauggccaccuacuaccuguucgacgagagcggcgaguucaagcuggccucccacauguacugcagcuucuacccccccgacgaggacgaggaggagggggacugcgaggaggaggaguucgagccguccauccaguacgaguacggcaccgaggacgacuaccagggcaagccccucgaguucggggcgacgagcgccgcccugcagcccgaggaggagcaggaggaggacuggcuggacgacgacucccagcagaccgugggccagcaggacgggagcgaggacaaccagaccaccacgauccagaccaucguggagguccagccccagcucgagauggagcugaccccgguggugcagaccaucgaggucaacuccuucagcggcuaccugaagcucacggacaacguguacaucaagaacgccgacaucguggaggaggcgaagaaggucaagcccaccgugguggucaacgccgccaacguguaccugaagcacgggggcggcguggccggggcccugaacaaggcgaccaacaacgccaugcaggucgaguccgacgacuacaucgccaccaacggcccccucaagguggggggcagcugcguccuguccggccacaaccuggccaagcacugccuccacgugguggggcccaacgucaacaagggcgaggacauccagcugcugaagagcgccuacgagaacuucaaccagcacgaggugcuccuggcgccgcugcucuccgccgggaucuucggcgccgaccccauccacagccugcgggugugcgucgacacggugcgcaccaacguguaccuggccgucuucgacaagaaccucuacgacaagcugguguccagcuuccuggagaugaagagcgagaagcagguggagcagaagaucgccgagauccccaaggaggaggucaagcccuucaucaccgaguccaagccgagcguggagcagcggaagcaggacgacaagaagaucaaggcgugcguggaggaggucaccacgacccucgaggagaccaaguuccugaccgagaaccugcuccuguacaucgacaucaacgggaaccugcaccccgacuccgccacgcucgugagcgacaucgacaucaccuuccugaagaaggacgcccccuacaucgugggcgacgucgugcaggagggcgugcugaccgccgucgugauccccaccaagaaggccgggggcacgaccgagaugcucgcgaaggcccugcgcaaggugccgaccgacaacuacaucaccacguaccccgggcagggccugaacggguacaccgucgaggaggccaagaccgugcucaagaagugcaaguccgccuucuacauccugcccagcaucaucuccaacgagaagcaggagauccugggcaccgugagcuggaaccuccgggagaugcuggcgcacgccgaggagacccgcaagcugaugcccgucugcguggagacgaaggccaucguguccaccauccagcggaaguacaagggcaucaagauccaggagggggucguggacuacggcgcccgcuucuacuucuacaccagcaagaccacgguggccucccugaucaacacccucaacgaccugaacgagacccuggucaccaugccgcucggguacgugacgcacggccugaaccuggaggaggcggcccgguacaugcgcagccucaaggugcccgccaccgucuccgugagcucccccgacgccgugaccgccuacaacggguaccugaccagcuccagcaagacgcccgaggagcacuucaucgagaccaucucccuggcgggcagcuacaaggacuggagcuacuccggccagagcacccagcucgggaucgaguuccugaagcggggcgacaaguccgucuacuacaccagcaacccgacgaccuuccaccuggacggggaggugaucaccuucgacaaccucaagacccugcugucccuccgcgaggugcggacgaucaaggucuucaccaccguggacaacaucaaccugcacacccagguggucgacaugagcaugacguacggccagcaguucggccccaccuaccuggacggggccgacgugaccaagaucaagccccacaacucccacgagggcaagaccuucuacgugcucccgaacgacgacacgcugcgcgucgaggccuucgaguacuaccacaccaccgaccccagcuuccuggggcgguacauguccgcccucaaccacaccaagaaguggaaguacccccaggugaacggccugacgagcaucaagugggccgacaacaacugcuaccuggcgaccgcccuccugacccugcagcagaucgagcucaaguucaaccccccggcccugcaggacgccuacuaccgcgcgcgggccggggaggccgccaacuucugcgcccugauccucgcguacugcaacaagaccgugggcgagcugggcgacguccgcgagacgauguccuaccuguuccagcacgccaaccucgacagcugcaagcgggugcugaacgucgugugcaagaccugcgggcagcagcagaccacccugaagggcguggaggccgucauguacauggggacccucuccuacgagcaguucaagaagggcgugcagauccccugcacgugcgggaagcaggccaccaaguaccuggugcagcaggagagccccuucgucaugauguccgcccccccggcgcaguacgagcugaagcacggcaccuucaccugcgccagcgaguacacgggcaacuaccagugcgggcacuacaagcacaucaccuccaaggagacccucuacugcaucgacggcgcccugcugaccaagagcagcgaguacaaggggcccaucacggacguguucuacaaggagaacuccuacaccaccaccaucaagcccgugacguacaagcucgacggcgucgugugcaccgagaucgaccccaagcuggacaacuacuacaagaaggacaacagcuacuucaccgagcagccgaucgaccuggugcccaaccagcccuaccccaacgccuccuucgacaacuucaaguucgucugcgacaacaucaaguucgccgacgaccucaaccagcugaccggguacaagaagccggcgagccgcgagcugaaggugacguucuuccccgaccucaacggcgacguggucgccaucgacuacaagcacuacacccccuccuucaagaagggcgccaagcugcugcacaagcccaucguguggcacgugaacaacgccaccaacaaggcgaccuacaagccgaacacguggugcauccggugccucuggagcaccaagcccgucgagaccuccaacagcuucgacgugcugaaguccgaggacgcccaggggauggacaaccuggccugcgaggaccucaagcccgugagcgaggaggucguggagaaccccaccauccagaaggacgugcuggagugcaacgucaagacgaccgagguggugggcgacaucauccugaagccggccaacaacucccucaagaucaccgaggaggucgggcacaccgaccugauggccgcguacguggacaacagcucccugacgaucaagaagcccaacgagcucagccgcgugcugggccugaagacccucgccacccacgggcuggccgccgucaacuccgugcccugggacaccaucgccaacuacgcgaagccguuccugaacaagguggucagcacgaccaccaacaucgugacccgcugccucaaccgggugugcacgaacuacaugcccuacuucuucacccugcugcuccagcugugcaccuucacccgcuccaccaacagccggaucaaggccuccaugcccacgaccaucgccaagaacaccgucaagagcgugggcaaguucugccuggaggccagcuucaacuaccucaagucccccaacuucagcaagcugaucaacaucaucaucugguuccugcuccuguccgugugccugggcagccucaucuacuccaccgccgcgcuggggguccugaugagcaaccucggcaugccguccuacugcacgggguaccgcgagggcuaccugaacagcaccaacgugaccaucgccaccuacugcacgggcuccauccccugcagcgugugccuguccgggcucgacagccuggacaccuaccccucccuggagaccauccagaucaccaucagcuccuucaagugggaccucacggccuucggccuggucgccgagugguuccuggccuacauccucuucacccgguucuucuacgugcuggggcuggcggccaucaugcagcucuucuucagcuacuucgccgugcacuucaucuccaacagcuggcugauguggcugaucaucaaccugguccagauggcccccaucuccgcgauggugcgcauguacaucuucuucgccagcuucuacuacguguggaagagcuacguccacgugguggacggcugcaacuccagcaccugcaugaugugcuacaagcggaaccgcgccacccgggucgagugcacgaccaucgugaacgggguccgccgguccuucuacguguacgccaacggcggcaagggguucugcaagcuccacaacuggaacugcgugaacugcgacaccuucugcgccggcagcaccuucaucuccgacgaggucgcgcgcgaccugagccugcaguucaagcggccgaucaaccccacggaccaguccagcuacaucguggacuccgugaccgucaagaacgggagcauccaccucuacuucgacaaggccggccagaagaccuacgagcgccacucccugagccacuucgugaaccuggacaaccuccgggccaacaacaccaaggggucccugcccaucaacgugaucgucuucgacggcaagagcaagugcgaggaguccagcgccaaguccgccagcguguacuacucccagcugaugugccagcccauccuccugcuggaccaggcgcucgugagcgacgucggcgacagcgccgagguggccgugaagauguucgacgccuacgucaacacguucuccagcaccuucaacgugccgauggagaagcugaagacccugguggccaccgcggaggccgagcucgccaagaacgucucccuggacaacgugcugagcacguucaucuccgccgcgcgccagggguucguggacagcgacgucgagaccaaggacgugguggagugccucaagcugucccaccagagcgacaucgaggucaccggcgacuccugcaacaacuacaugcugaccuacaacaagguggagaacaugacgccccgggaccucggggccugcaucgacugcagcgcccgccacaucaacgcccagguggccaagucccacaacaucgcgcugaucuggaacgucaaggacuucaugagccuguccgagcagcuccggaagcagauccgcagcgccgccaagaagaacaaccugcccuucaagcugaccugcgccaccacccgccagguggugaacgucgugacgaccaagaucgcccucaagggcggguga

SEQ ID NO: 18050 - RNA, 5841 nt, Artificial Sequence
  SARS-CoV-2__MT641656.1__non-structural protein 3 (NSP3) CDS gc
auggcccccaccaaggugaccuucggcgacgacacggucaucgaggugcagggguacaagagcgugaacaucaccuucgagcuggacgagcgcaucgacaagguccucaacgagaagugcuccgccuacaccguggagcugggcaccgaggugaacgaguucgcgugcgucguggccgacgccgugaucaagacgcugcagccggucagcgagcuccugaccccccuggggaucgaccucgacgagugguccauggccaccuacuaccuguucgacgagagcggcgaguucaagcuggccucccacauguacugcagcuucuacccccccgacgaggacgaggaggagggggacugcgaggaggaggaguucgagccguccacccaguacgaguacggcacggaggacgacuaccagggcaagccccucgaguucggggcgaccagcgccgcccugcagcccgaggaggagcaggaggaggacuggcuggacgacgacucccagcagaccgugggccagcaggacgggagcgaggacaaccagaccacgaccauccagaccaucguggagguccagccccagcucgagauggagcugaccccgguggugcagacgaucgaggucaacuccuucagcggcuaccugaagcucaccgacaacguguacaucaagaacgccgacaucguggaggaggcgaagaaggucaagcccaccgugguggucaacgccgccaacguguaccugaagcacgggggcggcguggccggggcccugaacaaggcgaccaacaacgccaugcaggucgaguccgacgacuacaucgccacgaacggcccccucaagguggggggcagcugcguccuguccggccacaaccuggccaagcacugccuccacgugguggggcccaacgucaacaagggcgaggacauccagcugcugaagagcgccuacgagaacuucaaccagcacgaggugcuccuggcgccgcugcucuccgccgggaucuucggcgccgaccccauccacagccugcgggugugcgucgacaccgugcgcaccaacguguaccuggccgucuucgacaagaaccucuacgacaagcugguguccagcuuccuggagaugaagagcgagaagcagguggagcagaagaucgccgagauccccaaggaggaggucaagcccuucaucaccgaguccaagccgagcguggagcagcggaagcaggacgacaagaagaucaaggcgugcguggaggaggucacgaccacccucgaggagaccaaguuccugacggagaaccugcuccuguacaucgacaucaacgggaaccugcaccccgacuccgccacccucgugagcgacaucgacaucaccuuccugaagaaggacgcccccuacaucgugggcgacgucgugcaggagggcgugcugaccgccgucgugauccccacgaagaaggccgggggcaccaccgagaugcucgcgaaggcccugcgcaaggugccgaccgacaacuacaucacgaccuaccccgggcagggccugaacggguacaccgucgaggaggccaagaccgugcucaagaagugcaaguccgccuucuacauccugcccagcaucaucuccaacgagaagcaggagauccugggcaccgugagcuggaaccuccgggagaugcuggcgcacgccgaggagacgcgcaagcugaugcccgucugcguggagaccaaggccaucguguccaccauccagcggaaguacaagggcaucaagauccaggagggggucguggacuacggcgcccgcuucuacuucuacaccagcaagacgaccguggucucccugaucaacacccucaacgaccugaacgagacccuggugacgaugccgcucggguacgugacccacggccugaaccuggaggaggccgcgcgguacaugcgcagccucaagguccccgccaccguguccgugagcucccccgacgccgucaccgccuacaacggguaccugacgagcuccagcaagacccccgaggagcacuucaucgagaccaucucccuggccggcagcuacaaggacuggagcuacuccggccagagcacccagcucgggaucgaguuccugaagcggggcgacaaguccguguacuacacgagcaacccgaccaccuuccaccuggacggggaggugaucaccuucgacaaccucaagacgcugcugucccuccgcgagguccggaccaucaagguguucaccaccguggacaacaucaaccugcacacgcaggucguggacaugagcaugaccuacggccagcaguucggccccaccuaccuggacggggcggacgugaccaagaucaagccccacaacucccacgagggcaagacguucuacguccucccgaacgacgacacccugcgcguggaggccuucgaguacuaccacaccaccgaccccagcuuccuggggcgguacauguccgcccucaaccacacgaagaaguggaaguacccccaggugaacggccugaccagcaucaagugggccgacaacaacugcuaccuggccaccgcgcuccugacccugcagcagaucgagcucaaguucaaccccccggcccugcaggacgccuacuaccgcgcccgggcgggggaggccgccaacuucugcgcccugauccucgccuacugcaacaagacggucggcgagcugggcgacgugcgcgagaccauguccuaccuguuccagcacgcgaaccucgacagcugcaagcggguccugaacguggugugcaagaccugcgggcagcagcagaccacccugaagggcgucgaggccgugauguacauggggacgcucuccuacgagcaguucaagaagggcgugcagauccccugcaccugcgggaagcaggccaccaaguaccugguccagcaggagagccccuucgugaugauguccgcccccccggcccaguacgagcugaagcacggcaccuucacgugcgcgagcgaguacaccggcaacuaccagugcgggcacuacaagcacaucaccuccaaggagacccucuacugcaucgacggcgcccugcugacgaagagcagcgaguacaaggggcccaucaccgacguguucuacaaggagaacuccuacaccaccacgaucaagcccgucaccuacaagcucgacggcguggugugcaccgagaucgaccccaagcuggacaacuacuacaagaaggacaacagcuacuucaccgagcagccgaucgaccugguccccaaccagcccuaccccaacgccuccuucgacaacuucaaguucgugugcgacaacaucaaguucgccgacgaccucaaccagcugacgggguacaagaagccggccagccgcgagcugaaggugaccuucuuccccgaccucaacggcgacgucguggcgaucgacuacaagcacuacacccccuccuucaagaagggcgccaagcugcugcacaagcccaucguguggcacgucaacaacgccaccaacaaggccacguacaagccgaacaccuggugcauccggugccucuggagcaccaagcccguggagaccuccaacagcuucgacgugcugaaguccgaggacgcgcaggggauggacaaccuggccugcgaggaccucaagcccgucagcgaggaggugguggagaaccccacgauccagaaggacguccuggagugcaacgugaagaccaccgagguggucggcgacaucauccugaagccggccaacaacucccucaagaucaccgaggagguggggcacacggaccugauggccgccuacguggacaacagcucccugaccaucaagaagcccaacgagcucagccgcguccugggccugaagacccucgcgacccacgggcuggccgccgugaacuccgugcccugggacacgaucgccaacuacgccaagccguuccugaacaaggucgugagcaccaccaccaacaucgugacgcgcugccucaaccgggucugcaccaacuacaugcccuacuucuucacccugcugcuccagcugugcaccuucacccgcuccacgaacagccggaucaaggcguccaugcccaccaccaucgccaagaacaccgugaagagcgugggcaaguucugccuggaggccagcuucaacuaccucaagucccccaacuucagcaagcugaucaacaucaucaucugguuccugcuccuguccgucugccugggcagccucaucuacuccacggccgcccugggggugcugaugagcaaccucggcaugccguccuacugcaccggguaccgcgagggcuaccugaacagcaccaacgugaccaucgcgacguacugcaccggcuccauccccugcagcgucugccuguccgggcucgacagccuggacaccuaccccucccuggagaccauccagaucacgaucagcuccuucaagugggaccucaccgccuucggccugguggccgagugguuccuggccuacauccucuucacccgguucuucuacgugcuggggcuggccgcgaucaugcagcucuucuucagcuacuucgccguccacuucaucuccaacagcuggcugauguggcugaucaucaaccuggugcagauggcccccaucuccgccauggugcgcauguacaucuucuucgcgagcuucuacuacgucuggaagagcuacgugcacguggucgacggcugcaacuccagcaccugcaugaugugcuacaagcggaaccgcgccacgcggguggagugcaccaccaucgucaacggggugcgccgguccuucuacguguacgccaacggcggcaagggguucugcaagcuccacaacuggaacugcgucaacugcgacaccuucugcgccggcagcacguucaucuccgacgagguggcccgcgaccugagccugcaguucaagcggccgaucaaccccaccgaccaguccagcuacaucguggacuccgucaccgugaagaacgggagcauccaccucuacuucgacaaggcgggccagaagaccuacgagcgccacucccugagccacuucgugaaccuggacaaccuccgggccaacaacacgaaggggucccugcccaucaacgucaucguguucgacggcaagagcaagugcgaggaguccagcgccaaguccgccagcguguacuacucccagcugaugugccagcccauccuccugcuggaccaggcccucgucagcgacgugggcgacagcgcggagguggccgucaagauguucgacgccuacgugaacaccuucuccagcaccuucaacgugccgauggagaagcugaagacccuggucgccacggccgaggcggagcucgccaagaacgugucccuggacaacgugcugagcaccuucaucuccgccgcccgccagggguucgucgacagcgacguggagaccaaggacguggucgagugccucaagcugucccaccagagcgacaucgaggugaccggcgacuccugcaacaacuacaugcugacguacaacaagguggagaacaugaccccccgggaccucggggcgugcaucgacugcagcgcccgccacaucaacgcccaggucgccaagucccacaacaucgcccugaucuggaacgugaaggacuucaugagccuguccgagcagcuccggaagcagauccgcagcgcggccaagaagaacaaccugcccuucaagcugaccugcgccaccacgcgccagguggucaacguggugaccaccaagaucgcccucaagggcggguga

SEQ ID NO: 18051 - RNA, 5841 nt, Artificial Sequence
  SARS-CoV-2__MT641665.1__non-structural protein 3 (NSP3) CDS gc
auggcccccaccaaggugaccuucggcgacgacacggucaucgaggugcagggguacaagagcgugaacaucaccuucgagcuggacgagcgcaucgacaagguccucaacgagaagugcuccgccuacaccguggagcugggcaccgaggugaacgaguucgcgugcgucguggccgacgccgugaucaagacgcugcagccggucagcgagcuccugaccccccuggggaucgaccucgacgagugguccauggccaccuacuaccuguucgacgagagcggcgaguucaagcuggccucccacauguacugcagcuucuacccccccgacgaggacgaggaggagggggacugcgaggaggaggaguucgagccgcucacccaguacgaguacggcacggaggacgacuaccagggcaagccccuggaguucggggcgaccuccgccgcccugcagcccgaggaggagcaggaggaggacuggcucgacgacgacagccagcagaccgugggccagcaggacggguccgaggacaaccagaccacgaccauccagaccaucguggagguccagccccagcuggagauggagcugaccccgguggugcagacgaucgaggucaacagcuucuccggcuaccucaagcugaccgacaacguguacaucaagaacgccgacaucguggaggaggcgaagaaggucaagcccaccgugguggucaacgccgccaacguguaccugaagcacgggggcggcguggccggggcccucaacaaggcgaccaacaacgccaugcaggucgagagcgacgacuacaucgccacgaacggcccccugaagguggucggguccugcgugcugagcggccacaaccucgccaagcacugccugcacguggucggccccaacgugaacaagggggaggacauccagcugcucaaguccgccuacgagaacuucaaccagcacgaggugcugcuggcgccgcuccugagcgccggcaucuucggggccgaccccauccacucccugcgggucugcguggacaccgugcgcaccaacgucuaccucgccguguucgacaagaaccuguacgacaagcuggugagcuccuuccucgagaugaagagcgagaagcaggucgagcagaagaucgccgagauccccaaggaggaggugaagcccuucaucaccgagagcaagccguccguggagcagcggaagcaggacgacaagaagaucaaggcgugcgucgaggaggugacgaccacccuggaggagaccaaguuccugacggagaaccuccugcuguacaucgacaucaacggcaaccuccaccccgacagcgccacccugguguccgacaucgacaucaccuuccugaagaaggacgcccccuacaucgucggggacguggugcaggagggcguccucaccgccguggugauccccacgaagaaggccggcgggaccaccgagaugcuggcgaaggcccugcgcaaggucccgaccgacaacuacaucacgaccuaccccggccaggggcucaacggcuacaccguggaggaggccaagaccgugcugaagaagugcaagagcgccuucuacauccugcccuccaucaucagcaacgagaagcaggagauccucgggaccgucuccuggaaccugcgggagaugcuggcgcacgccgaggagacgcgcaagcugaugcccgugugcguggagaccaaggccaucgucagcaccauccagcggaaguacaagggcaucaagauccaggagggcgugguggacuacggggcccgcuucuacuucuacaccuccaagacgaccgucgccagccucaucaacacccugaacgaccugaacgagacccucgugacgaugccgcugggcuacgugacccacgggcugaaccucgaggaggcggcccgguacaugcgcucccugaagguccccgccaccgugagcguguccagccccgacgccgucaccgccuacaacggcuaccugacguccagcuccaagacccccgaggagcacuucaucgagaccaucagccucgcgggguccuacaaggacuggagcuacagcggccaguccacccagcugggcaucgaguuccugaagcggggggacaagagcguguacuacacguccaacccgaccaccuuccaccucgacggcgaggugaucaccuucgacaaccugaagacgcugcucagccugcgcgagguccggaccaucaagguguucaccaccguggacaacaucaaccugcacacgcaggucguggacauguccaugaccuacgggcagcaguucggccccaccuaccucgacggcgccgacgugaccaagaucaagccccacaacagccacgaggggaagacguucuacguccugccgaacgacgacacccugcgcguggaggccuucgaguacuaccacaccaccgaccccuccuuccucggccgguacaugagcgcccugaaccacacgaagaaguggaaguacccccaggugaacgggcugaccuccaucaagugggccgacaacaacugcuaccucgcgaccgcccugcugacccuccagcagaucgagcugaaguucaaccccccggcccugcaggacgccuacuaccgcgcgcgggccggcgaggccgccaacuucugcgcccucauccuggcguacugcaacaagacggucggggagcugggcgacgugcgcgagaccaugagcuaccucuuccagcacgccaaccuggacuccugcaagcggguccugaacguggugugcaagaccugcggccagcagcagaccacccucaagggggucgaggccgugauguacaugggcacgcugagcuacgagcaguucaagaagggggugcagauccccugcaccugcggcaagcaggccaccaaguaccugguccagcaggagucccccuucgugaugaugagcgcccccccggcgcaguacgagcucaagcacgggaccuucacgugcgccuccgaguacaccggcaacuaccagugcggccacuacaagcacaucaccagcaaggagacccuguacugcaucgacggggcccugcucacgaaguccagcgaguacaagggccccaucaccgacguguucuacaaggagaacagcuacaccaccacgaucaagcccgucaccuacaagcuggacgggguggugugcaccgagaucgaccccaagcuggacaacuacuacaagaaggacaacuccuacuucaccgagcagccgaucgaccucguccccaaccagcccuaccccaacgccagcuucgacaacuucaaguucgugugcgacaacaucaaguucgccgacgaccugaaccagcugacgggcuacaagaagccggcgucccgcgagcucaaggugaccuucuuccccgaccugaacggggacgucguggccaucgacuacaagcacuacacccccagcuucaagaagggcgccaagcugcuccacaagcccaucguguggcacgucaacaacgccaccaacaaggcgacguacaagccgaacaccuggugcauccggugccugugguccaccaagcccguggagaccagcaacuccuucgacgugcugaagagcgaggacgcccagggcauggacaaccucgccugcgaggaccugaagcccgucuccgaggaggugguggagaaccccacgauccagaaggacguccuggagugcaacgugaagaccaccgagguggucggggacaucauccucaagccggccaacaacagccugaagaucaccgaggaggugggccacacggaccugauggccgcguacguggacaacuccagccucaccaucaagaagcccaacgagcugucccgcguccuggggcucaagacccuggccacccacggccuggccgccgugaacagcgugcccugggacacgaucgccaacuacgcgaagccguuccucaacaaggucguguccaccaccaccaacaucgugacgcgcugccugaaccgggucugcaccaacuacaugcccuacuucuucacccugcuccugcagcugugcaccuucacccgcagcacgaacucccggaucaaggccagcaugcccaccaccaucgccaagaacaccgugaaguccguggggaaguucugccucgaggccagcuucaacuaccugaagagccccaacuucuccaagcugaucaacaucaucaucugguuccuccugcugagcgucugccucggcucccugaucuacagcacggccgcgcugggcgugcucauguccaaccuggggaugccgagcuacugcaccggcuaccgcgagggguaccugaacuccaccaacgugaccaucgccacguacugcaccggcagcauccccugcuccgucugccucagcggccuggacucccuggacaccuaccccagccucgagaccauccagaucacgaucuccagcuucaagugggaccugaccgccuucgggcugguggccgagugguuccucgccuacauccuguucacccgguucuucuacgugcugggccucgcggccaucaugcagcuguucuucuccuacuucgccguccacuucaucagcaacuccuggcugauguggcugaucaucaaccucgugcagauggcccccaucagcgcgauggugcgcauguacaucuucuucgccuccuucuacuacgucuggaagagcuacgugcacguggucgacgggugcaacagcuccaccugcaugaugugcuacaagcggaaccgcgccacgcggguggagugcaccaccaucgucaacggcgugcgccggagcuucuacguguacgccaacgggggcaagggcuucugcaagcugcacaacuggaacugcgucaacugcgacaccuucugcgccggguccacguucaucagcgacgagguggcgcgcgaccugucccuccaguucaagcggccgaucaaccccaccgaccagagcuccuacaucguggacagcgucaccgugaagaacggcuccauccaccuguacuucgacaaggccgggcagaagaccuacgagcgccacagccugucccacuucgugaaccucgacaaccugcgggccaacaacacgaagggcagccugcccaucaacgucaucguguucgacgggaaguccaagugcgaggagagcuccgccaagagcgccuccguguacuacagccagcucaugugccagcccauccugcugcucgaccaggcgcuggucuccgacgugggcgacagcgccgagguggccgucaagauguucgacgccuacgugaacaccuucagcuccaccuucaacgugccgauggagaagcugaagacccucgucgccacggcggaggccgagcuggccaagaacgugagccuggacaacgugcucuccaccuucaucagcgccgcgcgccagggcuucgucgacuccgacguggagaccaaggacguggucgagugccugaagcugagccaccaguccgacaucgaggugaccggggacagcugcaacaacuacaugcucacguacaacaagguggagaacaugaccccccgggaccugggcgccugcaucgacugcuccgcccgccacaucaacgcccaggucgccaagagccacaacaucgcgcugaucuggaacgugaaggacuucaugucccucagcgagcagcugcggaagcagauccgcuccgccgccaagaagaacaaccugcccuucaagcucaccugcgccaccacgcgccagguggucaacguggugaccaccaagaucgcccugaaggggggcuga

SEQ ID NO: 18052 - RNA, 5841 nt, Artificial Sequence
  SARS-CoV-2__MT641667.1__non-structural protein 3 (NSP3) CDS gc
auggcccccaccaaggugaccuucggcgacgacacggucaucgaggugcagggguacaagagcgugaacaucaccuucgagcuggacgagcgcaucgacaagguccucaacgagaagugcuccgccuacaccguggagcugggcaccgaggugaacgaguucgcgugcgucguggccgacgccgugaucaagacgcugcagccggucagcgagcuccugaccccccuggggaucgaccucgacgagugguccauggccaccuacuaccuguucgacgagagcggcgaguucaagcuggccucccacauguacugcagcuucuacccccccgacgaggacgaggaggagggggacugcgaggaggaggaguucgagccguccacccaguacgaguacggcacggaggacgacuaccagggcaagccccucgaguucggggcgaccagcgccgcccugcagcccgaggaggagcaggaggaggacuggcuggacgacgacucccagcagaccgugggccagcaggacgggagcgaggacaaccagaccacgaccauccagaccaucguggagguccagccccagcucgagauggagcugaccccgguggugcagacgaucgaggucaacuccuucagcggcuaccugaagcucaccgacaacguguacaucaagaacgccgacaucguggaggaggcgaagaaggucaagcccaccgugguggucaacgccgccaacguguaccugaagcacgggggcggcguggccggggcccugaacaaggcgaccaacaacgccaugcaggucgaguccgacgacuacaucgccacgaacggcccccucaagguggucgggagcugcgugcuguccggccacaaccuggccaagcacugccuccacguggucggccccaacgugaacaagggggaggacauccagcugcugaagagcgccuacgagaacuucaaccagcacgaggugcuccuggcgccgcugcucuccgccggcaucuucggggccgaccccauccacagccugcgggucugcguggacaccgugcgcaccaacgucuaccuggccguguucgacaagaaccucuacgacaagcugguguccagcuuccuggagaugaagagcgagaagcaggucgagcagaagaucgccgagauccccaaggaggaggugaagcccuucaucaccgaguccaagccgagcguggagcagcggaagcaggacgacaagaagaucaaggcgugcgucgaggaggugacgaccacccucgaggagaccaaguuccugacggagaaccugcuccuguacaucgacaucaacggcaaccugcaccccgacuccgccacccucgugagcgacaucgacaucaccuuccugaagaaggacgcccccuacaucgucggggacguggugcaggagggcguccugaccgccguggugauccccacgaagaaggccggcgggaccaccgagaugcucgcgaaggcccugcgcaaggucccgaccgacaacuacaucacgaccuaccccggccaggggcugaacggcuacaccguggaggaggccaagaccgugcucaagaagugcaaguccgccuucuacauccugcccagcaucaucuccaacgagaagcaggagauccuggggaccgucagcuggaaccuccgggagaugcuggcgcacgccgaggagacgcgcaagcugaugcccgugugcguggagaccaaggccaucgucuccaccauccagcggaaguacaagggcaucaagauccaggagggcgugguggacuacggggcccgcuucuacuucuacaccagcaagacgaccgucgccucccugaucaacacccucaacgaccugaacgagacccuggugacgaugccgcucggcuacgugacccacgggcugaaccuggaggaggcggcccgguacaugcgcagccucaagguccccgccaccguguccgugagcucccccgacgccgucaccgccuacaacggcuaccugacgagcuccagcaagacccccgaggagcacuucaucgagaccaucucccuggcggggagcuacaaggacuggagcuacuccggccagagcacccagcucggcaucgaguuccugaagcggggggacaaguccguguacuacacgagcaacccgaccaccuuccaccuggacggcgaggugaucaccuucgacaaccucaagacgcugcugucccuccgcgagguccggaccaucaagguguucaccaccguggacaacaucaaccugcacacgcaggucguggacaugagcaugaccuacgggcagcaguucggccccaccuaccuggacggcgccgacgugaccaagaucaagccccacaacucccacgaggggaagacguucuacguccucccgaacgacgacacccugcgcguggaggccuucgaguacuaccacaccaccgaccccagcuuccugggccgguacauguccgcccucaaccacacgaagaaguggaaguacccccaggugaacgggcugaccagcaucaagugggccgacaacaacugcuaccuggcgaccgcccuccugacccugcagcagaucgagcucaaguucaaccccccggcccugcaggacgccuacuaccgcgcgcgggccggcgaggccgccaacuucugcgcccugauccucgcguacugcaacaagacggucggggagcugggcgacgugcgcgagaccauguccuaccuguuccagcacgccaaccucgacagcugcaagcggguccugaacguggugugcaagaccugcggccagcagcagaccacccugaagggggucgaggccgugauguacaugggcacgcucuccuacgagcaguucaagaagggggugcagauccccugcaccugcggcaagcaggccaccaaguaccugguccagcaggagagccccuucgugaugauguccgcccccccggcgcaguacgagcugaagcacgggaccuucacgugcgccagcgaguacaccggcaacuaccagugcggccacuacaagcacaucaccuccaaggagacccucuacugcaucgacggggcccugcugacgaagagcagcgaguacaagggccccaucaccgacguguucuacaaggagaacuccuacaccaccacgaucaagcccgucaccuacaagcucgacgggguggugugcaccgagaucgaccccaagcuggacaacuacuacaagaaggacaacagcuacuucaccgagcagccgaucgaccugguccccaaccagcccuaccccaacgccuccuucgacaacuucaaguucgugugcgacaacaucaaguucgccgacgaccucaaccagcugacgggcuacaagaagccggcgagccgcgagcugaaggugaccuucuuccccgaccucaacggggacgucguggccaucgacuacaagcacuacacccccuccuucaagaagggcgccaagcugcugcacaagcccaucguguggcacgucaacaacgccaccaacaaggcgacguacaagccgaacaccuggugcauccggugccucuggagcaccaagcccguggagaccuccaacagcuucgacgugcugaaguccgaggacgcccagggcauggacaaccuggccugcgaggaccucaagcccgucagcgaggaggugguggagaaccccacgauccagaaggacguccuggagugcaacgugaagaccaccgagguggucggggacaucauccugaagccggccaacaacucccucaagaucaccgaggaggugggccacacggaccugauggccgcguacguggacaacagcucccugaccaucaagaagcccaacgagcucagccgcguccuggggcugaagacccucgccacccacggccuggccgccgugaacuccgugcccugggacacgaucgccaacuacgcgaagccguuccugaacaaggucgugagcaccaccaccaacaucgugacgcgcugccucaaccgggucugcaccaacuacaugcccuacuucuucacccugcugcuccagcugugcaccuucacccgcuccacgaacagccggaucaaggccuccaugcccaccaccaucgccaagaacaccgugaagagcguggggaaguucugccuggaggccagcuucaacuaccucaagucccccaacuucagcaagcugaucaacaucaucaucugguuccugcuccuguccgucugccugggcagccucaucuacuccacggccgcgcugggcgugcugaugagcaaccucgggaugccguccuacugcaccggcuaccgcgagggguaccugaacagcaccaacgugaccaucgccacguacugcaccggcuccauccccugcagcgucugccuguccggccucgacagccuggacaccuaccccucccuggagaccauccagaucacgaucagcuccuucaagugggaccucaccgccuucgggcugguggccgagugguuccuggccuacauccucuucacccgguucuucuacgugcugggccuggcggccaucaugcagcucuucuucagcuacuucgccguccacuucaucuccaacagcuggcugauguggcugaucaucaaccuggugcagauggcccccaucuccgcgauggugcgcauguacaucuucuucgccagcuucuacuacgucuggaagagcuacgugcacguggucgacgggugcaacuccagcaccugcaugaugugcuacaagcggaaccgcgccacgcggguggagugcaccaccaucgucaacggcgugcgccgguccuucuacguguacgccaacgggggcaagggcuucugcaagcuccacaacuggaacugcgucaacugcgacaccuucugcgccgggagcacguucaucuccgacgagguggcgcgcgaccugagccugcaguucaagcggccgaucaaccccaccgaccaguccagcuacaucguggacuccgucaccgugaagaacggcagcauccaccucuacuucgacaaggccgggcagaagaccuacgagcgccacucccugagccacuucgugaaccuggacaaccuccgggccaacaacacgaagggcucccugcccaucaacgucaucguguucgacgggaagagcaagugcgaggaguccagcgccaaguccgccagcguguacuacucccagcugaugugccagcccauccuccugcuggaccaggcgcucgucagcgacgugggcgacagcgccgagguggccgucaagauguucgacgccuacgugaacaccuucuccagcaccuucaacgugccgauggagaagcugaagacccuggucgccacggcggaggccgagcucgccaagaacgugucccuggacaacgugcugagcaccuucaucuccgccgcgcgccagggcuucgucgacagcgacguggagaccaaggacguggucgagugccucaagcugucccaccagagcgacaucgaggugaccggggacuccugcaacaacuacaugcugacguacaacaagguggagaacaugaccccccgggaccucggcgccugcaucgacugcagcgcccgccacaucaacgcccaggucgccaagucccacaacaucgcgcugaucuggaacgugaaggacuucaugagccuguccgagcagcuccggaagcagauccgcagcgccgccaagaagaacaaccugcccuucaagcugaccugcgccaccacgcgccagguggucaacguggugaccaccaagaucgcccucaaggggggcuga

SEQ ID NO: 18053 - RNA, 5841 nt, Artificial Sequence
  SARS-CoV-2__MT641676.1__non-structural protein 3 (NSP3) CDS gc
auggcccccaccaaggugaccuucggcgacgacacggucaucgaggugcagggguacaagagcgugaacaucaccuucgagcuggacgagcgcaucgacaagguccucaacgagaagugcuccgccuacaccguggagcugggcaccgaggugaacgaguucgcgugcgucguggccgacgccgugaucaagacgcugcagccggucagcgagcuccugaccccccuggggaucgaccucgacgagugguccauggccaccuacuaccuguucgacgagagcggcgaguucaagcuggccucccacauguacugcagcuucuacccccccgacgaggacgaggaggagggggacugcgaggaggaggaguucgagccguccacccaguacgaguacggcacggaggacgacuaccagggcaagccccucgaguucggggcgaccagcgccgcccugcagcccgaggaggagcaggaggaggacuggcuggacgacgacucccagcagaccgugggccagcaggacgggagcgaggacaaccagaccacgaccauccagaccaucguggagguccagccccagcucgagauggagcugaccccgguggugcagacgaucgaggucaacuccuucagcggcuaccugaagcucaccgacaacguguacaucaagaacgccgacaucguggaggaggcgaagaaggucaagcccaccgugguggucaacgccgccaacguguaccugaagcacgggggcggcguggccggggcccugaacaaggcgaccaacaacgccaugcaggucgaguccgacgacuacaucgccacgaacggcccccucaagguggucgggagcugcgugcuguccggccacaaccuggccaagcacugccuccacguggucggccccaacgugaacaagggggaggacauccagcugcugaagagcgccuacgagaacuucaaccagcacgaggugcuccuggcgccgcugcucuccgccggcaucuucggggccgaccccauccacagccugcgggucugcguggacaccgugcgcaccaacgucuaccuggccguguucgacaagaaccucuacgacaagcugguguccagcuuccuggagaugaagagcgagaagcaggucgagcagaagaucgccgagauccccaaggaggaggugaagcccuucaucaccgaguccaagccgagcguggagcagcggaagcaggacgacaagaagaucaaggcgugcgucgaggaggugacgaccacccucgaggagaccaaguuccugacggagaaccugcuccuguacaucgacaucaacggcaaccugcaccccgacuccgccacccucgugagcgacaucgacaucaccuuccugaagaaggacgcccccuacaucgucggggacguggugcaggagggcguccugaccgccguggugauccccacgaagaaggccggcgggaccaccgagaugcucgcgaaggcccugcgcaaggucccgaccgacaacuacaucacgaccuaccccggccaggggcugaacggcuacaccguggaggaggccaagaccgugcucaagaagugcaaguccgccuucuacauccugcccagcaucaucuccaacgagaagcaggagauccuggggaccgucagcuggaaccuccgggagaugcuggcgcacgccgaggagacgcgcaagcugaugcccgugugcguggagaccaaggccaucgucuccaccauccagcggaaguacaagggcaucaagauccaggagggcgugguggacuacggggcccgcuucuacuucuacaccagcaagacgaccgucgccucccugaucaacacccucaacgaccugaacgagacccuggugacgaugccgcucggcuacgugacccacgggcugaaccuggaggaggcggcccgguacaugcgcagccucaagguccccgccaccguguccgugagcucccccgacgccgucaccgccuacaacggcuaccugacgagcuccagcaagacccccgaggagcacuucaucgagaccaucucccuggcggggagcuacaaggacuggagcuacuccggccagagcacccagcucggcaucgaguuccugaagcggggggacaaguccguguacuacacgagcaacccgaccaccuuccaccuggacggcgaggugaucaccuucgacaaccucaagacgcugcugucccuccgcgagguccggaccaucaagguguucaccaccguggacaacaucaaccugcacacgcaggucguggacaugagcaugaccuacgggcagcaguucggccccaccuaccuggacggcgccgacgugaccaagaucaagccccacaacucccacgaggggaagacguucuacguccucccgaacgacgacacccugcgcguggaggccuucgaguacuaccacaccaccgaccccagcuuccugggccgguacauguccgcccucaaccacacgaagaaguggaaguacccccaggugaacgggcugaccagcaucaagugggccgacaacaacugcuaccuggcgaccgcccuccugacccugcagcagaucgagcucaaguucaaccccccggcccugcaggacgccuacuaccgcgcgcgggccggcgaggccgccaacuucugcgcccugauccucgcguacugcaacaagacggucggggagcugggcgacgugcgcgagaccauguccuaccuguuccagcacgccaaccucgacagcugcaagcggguccugaacguggugugcaagaccugcggccagcagcagaccacccugaagggggucgaggccgugauguacaugggcacgcucuccuacgagcaguucaagaagggggugcagauccccugcaccugcggcaagcaggccaccaaguaccugguccagcaggagagccccuucgugaugauguccgcccccccggcgcaguacgagcugaagcacgggaccuucacgugcgccagcgaguacaccggcaacuaccagugcggccacuacaagcacaucaccuccaaggagacccucuacugcaucgacggggcccugcugacgaagagcagcgaguacaagggccccaucaccgacguguucuacaaggagaacuccuacaccaccacgaucaagcccgucaccuacaagcucgacgggguggugugcaccgagaucgaccccaagcuggacaacuacuacaagaaggacaacagcuacuucaccgagcagccgaucgaccugguccccaaccagcccuaccccaacgccuccuucgacaacuucaaguucgugugcgacaacaucaaguucgccgacgaccucaaccagcugacgggcuacaagaagccggcgagccgcgagcugaaggugaccuucuuccccgaccucaacggggacgucguggccaucgacuacaagcacuacacccccuccuucaagaagggcgccaagcugcugcacaagcccaucguguggcacgucaacaacgccaccaacaaggcgacguacaagccgaacaccuggugcauccggugccucuggagcaagaagcccguggagaccuccaacagcuucgacgugcugaaguccgaggacgcccagggcauggacaaccuggccugcgaggaccucaagcccgucagcgaggaggugguggagaaccccaccauccagaaggacguccuggagugcaacgugaagacgaccgagguggucggggacaucauccugaagccggccaacaacucccucaagaucaccgaggaggugggccacaccgaccugauggccgcguacguggacaacagcucccugacgaucaagaagcccaacgagcucagccgcguccuggggcugaagacccucgccacccacggccuggccgccgugaacuccgugcccugggacaccaucgccaacuacgcgaagccguuccugaacaaggucgugagcacgaccaccaacaucgugacccgcugccucaaccgggucugcacgaacuacaugcccuacuucuucacccugcugcuccagcugugcaccuucacccgcuccaccaacagccggaucaaggccuccaugcccacgaccaucgccaagaacaccgugaagagcguggggaaguucugccuggaggccagcuucaacuaccucaagucccccaacuucagcaagcugaucaacaucaucaucugguuccugcuccuguccgucugccugggcagccucaucuacuccaccgccgcgcugggcgugcugaugagcaaccucgggaugccguccuacugcacgggcuaccgcgagggguaccugaacagcaccaacgugaccaucgccaccuacugcacgggcuccauccccugcagcgucugccuguccggccucgacagccuggacaccuaccccucccuggagaccauccagaucaccaucagcuccuucaagugggaccucacggccuucgggcugguggccgagugguuccuggccuacauccucuucacccgguucuucuacgugcugggccuggcggccaucaugcagcucuucuucagcuacuucgccguccacuucaucuccaacagcuggcugauguggcugaucaucaaccuggugcagauggcccccaucuccgcgauggugcgcauguacaucuucuucgccagcuucuacuacgucuggaagagcuacgugcacguggucgacgggugcaacuccagcaccugcaugaugugcuacaagcggaaccgcgccacccggguggagugcacgaccaucgucaacggcgugcgccgguccuucuacguguacgccaacgggggcaagggcuucugcaagcuccacaacuggaacugcgucaacugcgacaccuucugcgccgggagcaccuucaucuccgacgagguggcgcgcgaccugagccugcaguucaagcggccgaucaaccccacggaccaguccagcuacaucguggacuccgucaccgugaagaacggcagcauccaccucuacuucgacaaggccgggcagaagaccuacgagcgccacucccugagccacuucgugaaccuggacaaccuccgggccaacaacaccaagggcucccugcccaucaacgucaucguguucgacgggaagagcaagugcgaggaguccagcgccaaguccgccagcguguacuacucccagcugaugugccagcccauccuccugcuggaccaggcgcucgucagcgacgugggcgacagcgccgagguggccgucaagauguucgacgccuacgugaacacguucuccagcaccuucaacgugccgauggagaagcugaagacccuggucgccaccgcggaggccgagcucgccaagaacgugucccuggacaacgugcugagcacguucaucuccgccgcgcgccagggcuucgucgacagcgacguggagaccaaggacguggucgagugccucaagcugucccaccagagcgacaucgaggugaccggggacuccugcaacaacuacaugcugaccuacaacaagguggagaacaugacgccccgggaccucggcgccugcaucgacugcagcgcccgccacaucaacgcccaggucgccaagucccacaacaucgcgcugaucuggaacgugaaggacuucaugagccuguccgagcagcuccggaagcagauccgcagcgccgccaagaagaacaaccugcccuucaagcugaccugcgccaccacccgccagguggucaacguggugacgaccaagaucgcccucaaggggggcuga

SEQ ID NO: 18054 - RNA, 5841 nt, Artificial Sequence
  SARS-CoV-2__MT641692.1__non-structural protein 3 (NSP3) CDS gc
auggcccccaccaaggugaccuucggcgacgacacggucaucgaggugcagggguacaagagcgugaacaucaccuucgagcuggacgagcgcaucgacaagguccucaacgagaagugcuccgccuacaccguggagcugggcaccgaggugaacgaguucgcgugcgucguggccgacgccgugaucaagacgcugcagccggucagcgagcuccugaccccccuggggaucgaccucgacgagugguccauggccaccuacuaccuguucgacgagagcggcgacuucaagcuggccucccacauguacugcagcuucuacccccccgacgaggacgaggaggagggggacugcgaggaggaggaguucgagccguccacccaguacgaguacggcacggaggacgacuaccagggcaagccccucgaguucggggcgaccagcgccgcccugcagcccgaggaggagcaggaggaggacuggcuggacgacgacucccagcagaccgugggccagcaggacgggagcgaggacaaccagaccacgaccauccagaccaucguggagguccagccccagcucgagauggagcugaccccgguggugcagacgaucgaggucaacuccuucagcggcuaccugaagcucaccgacaacguguacaucaagaacgccgacaucguggaggaggcgaagaaggucaagcccaccgugguggucaacgccgccaacguguaccugaagcacgggggcggcguggccggggcccugaacaaggcgaccaacaacgccaugcaggucgaguccgacgacuacaucgccacgaacggcccccucaagguggucgggagcugcgugcuguccggccacaaccuggccaagcacugccuccacguggucggccccaacgugaacaagggggaggacauccagcugcugaagagcgccuacgagaacuucaaccagcacgaggugcuccuggcgccgcugcucuccgccggcaucuucggggccgaccccauccacagccugcgggucugcguggacaccgugcgcaccaacgucuaccuggccguguucgacaagaaccucuacgacaagcugguguccagcuuccuggagaugaagagcgagaagcaggucgagcagaagaucgccgagauccccaaggaggaggugaagcccuucaucaccgaguccaagccgagcguggagcagcggaagcaggacgacaagaagaucaaggcgugcgucgaggaggugacgaccacccucgaggagaccaaguuccugacggagaaccugcuccuguacaucgacaucaacggcaaccugcaccccgacuccgccacccucgugagcgacaucgacaucaccuuccugaagaaggacgcccccuacaucgucggggacguggugcaggagggcguccugaccgccguggugauccccacgaagaaggccggcgggaccaccgagaugcucgcgaaggcccugcgcaaggucccgaccgacaacuacaucacgaccuaccccggccaggggcugaacggcuacaccguggaggaggccaagaccgugcucaagaagugcaaguccgccuucuacauccugcccagcaucaucuccaacgagaagcaggagauccuggggaccgucagcuggaaccuccgggagaugcuggcgcacgccgaggagacgcgcaagcugaugcccgugugcguggagaccaaggccaucgucuccaccauccagcggaaguacaagggcaucaagauccaggagggcgugguggacuacggggcccgcuucuacuucuacaccagcaagacgaccgucgccucccugaucaacacccucaacgaccugaacgagacccuggugacgaugccgcucggcuacgugacccacgggcugaaccuggaggaggcggcccgguacaugcgcagccucaagguccccgccaccguguccgugagcucccccgacgccgucaccgccuacaacggcuaccugacgagcuccagcaagacccccgaggagcacuucaucgagaccaucucccuggcggggagcuacaaggacuggagcuacuccggccagagcacccagcucggcaucgaguuccugaagcggggggacaaguccguguacuacacgagcaacccgaccaccuuccaccuggacggcgaggugaucaccuucgacaaccucaagacgcugcugucccuccgcgagguccggaccaucaagguguucaccaccguggacaacaucaaccugcacacgcaggucguggacaugagcaugaccuacgggcagcaguucggccccaccuaccuggacggcgccgacgugaccaagaucaagccccacaacucccacgaggggaagacguucuacguccucccgaacgacgacacccugcgcguggaggccuucgaguacuaccacaccaccgaccccagcuuccugggccgguacauguccgcccucaaccacacgaagaaguggaaguacccccaggugaacgggcugaccagcaucaagugggccgacaacaacugcuaccuggcgaccgcccuccugacccugcagcagaucgagcucaaguucaaccccccggcccugcaggacgccuacuaccgcgcgcgggccggcgaggccgccaacuucugcgcccugauccucgcguacugcaacaagacggucggggagcugggcgacgugcgcgagaccauguccuaccuguuccagcacgccaaccucgacagcugcaagcggguccugaacguggugugcaagaccugcggccagcagcagaccacccugaagggggucgaggccgugauguacaugggcacgcucuccuacgagcaguucaagaagggggugcagauccccugcaccugcggcaagcaggccaccaaguaccugguccagcaggagagccccuucgugaugauguccgcccccccggcgcaguacgagcugaagcacgggaccuucacgugcgccagcgaguacaccggcaacuaccagugcggccacuacaagcacaucaccuccaaggagacccucuacugcaucgacggggcccugcugacgaagagcagcgaguacaagggccccaucaccgacguguucuacaaggagaacuccuacaccaccacgaucaagcccgucaccuacaagcucgacgggguggugugcaccgagaucgaccccaagcuggacaacuacuacaagaaggacaacagcuacuucaccgagcagccgaucgaccugguccccaaccagcccuaccccaacgccuccuucgacaacuucaaguucgugugcgacaacaucaaguucgccgacgaccucaaccagcugacgggcuacaagaagccggcgagccgcgagcugaaggugaccuucuuccccgaccucaacggggacgucguggccaucgacuacaagcacuacacccccuccuucaagaagggcgccaagcugcugcacaagcccaucguguggcacgucaacaacgccaccaacaaggcgacguacaagccgaacaccuggugcauccggugccucuggagcaccaagcccguggagaccuccaacagcuucgacgugcugaaguccgaggacgcccagggcauggacaaccuggccugcgaggaccucaagcccgucagcgaggaggugguggagaaccccacgauccagaaggacguccuggagugcaacgugaagaccaccgagguggucggggacaucauccugaagccggccaacaacucccucaagaucaccgaggaggugggccacacggaccugauggccgcguacguggacaacagcucccugaccaucaagaagcccaacgagcucagccgcguccuggggcugaagacccucgccacccacggccuggccgccgugaacuccgugcccugggacacgaucgccaacuacgcgaagccguuccugaacaaggucgugagcaccaccaccaacaucgugacgcgcugccucaaccgggucugcaccaacuacaugcccuacuucuucacccugcugcuccagcugugcaccuucacccgcuccacgaacagccggaucaaggccuccaugcccaccaccaucgccaagaacaccgugaagagcguggggaaguucugccuggaggccagcuucaacuaccucaagucccccaacuucagcaagcugaucaacaucaucaucugguuccugcuccuguccgucugccugggcagccucaucuacuccacggccgcgcugggcgugcugaugagcaaccucgggaugccguccuacugcaccggcuaccgcgagggguaccugaacagcaccaacgugaccaucgccacguacugcaccggcuccauccccugcagcgucugccuguccggccucgacagccuggacaccuaccccucccuggagaccauccagaucacgaucagcuccuucaagugggaccucaccgccuucgggcugguggccgagugguuccuggccuacauccucuucacccgguucuucuacgugcugggccuggcggccaucaugcagcucuucuucagcuacuucgccguccacuucaucuccaacagcuggcugauguggcugaucaucaaccuggugcagauggcccccaucuccgcgauggugcgcauguacaucuucuucgccagcuucuacuacgucuggaagagcuacgugcacguggucgacgggugcaacuccagcaccugcaugaugugcuacaagcggaaccgcgccacgcggguggagugcaccaccaucgucaacggcgugcgccgguccuucuacguguacgccaacgggggcaagggcuucugcaagcuccacaacuggaacugcgucaacugcgacaccuucugcgccgggagcacguucaucuccgacgagguggcgcgcgaccugagccugcaguucaagcggccgaucaaccccaccgaccaguccagcuacaucguggacuccgucaccgugaagaacggcagcauccaccucuacuucgacaaggccgggcagaagaccuacgagcgccacucccugagccacuucgugaaccuggacaaccuccgggccaacaacacgaagggcucccugcccaucaacgucaucguguucgacgggaagagcaagugcgaggaguccagcgccaaguccgccagcguguacuacucccagcugaugugccagcccauccuccugcuggaccaggcgcucgucagcgacgugggcgacagcgccgagguggccgucaagauguucgacgccuacgugaacaccuucuccagcaccuucaacgugccgauggagaagcugaagacccuguucgccacggcggaggccgagcucgccaagaacgucucccuggacaacgugcugagcaccuucaucuccgccgcgcgccagggcuucguggacagcgacgucgagaccaaggacgugguggagugccucaagcugucccaccagagcgacaucgaggucaccggggacuccugcaacaacuacaugcugacguacaacaagguggagaacaugaccccccgggaccucggcgccugcaucgacugcagcgcccgccacaucaacgcccagguggccaagucccacaacaucgcgcugaucuggaacgucaaggacuucaugagccuguccgagcagcuccggaagcagauccgcagcgccgccaagaagaacaaccugcccuucaagcugaccugcgccaccacgcgccagguggugaacgucgugaccaccaagaucgcccucaaggggggcuga

SEQ ID NO: 18055 - RNA, 5841 nt, Artificial Sequence
  SARS-CoV-2__MT641693.1__non-structural protein 3 (NSP3) CDS gc
auggcccccaccaaggugaccuucggcgacgacacggucaucgaggugcagggguacaagagcgugaacaucaccuucgagcuggacgagcgcaucgacaagguccucaacgagaagugcuccgccuacaccguggagcugggcaccgaggugaacgaguucgcgugcgucguggccgacgccgugaucaagacgcugcagccggucagcgagcuccugaccccccuggggaucgaccucgacgagugguccauggccaccuacuaccuguucgacgagagcggcgaguucaagcuggccucccacauguacugcagcuucuacccccccgacgaggacgaggaggagggggacugcgaggaggaggaguucgagccguccacccaguacgaguacggcacggaggacgacuaccagggcaagccccucgaguucggggcgaccagcgccgcccugcagcccgaggaggagcaggaggaggacuggcuggacgacgacucccagcagaccgugggccagcaggacgggagcgaggacaaccagaccacgaccauccagaccaucguggagguccagccccagcucgagauggagcugaccccgguggugcagacgaucgaggucaacuccuucagcggcuaccugaagcucaccgacaacguguacaucaagaacgccgacaucguggaggaggcgaagaaggucaagcccaccgugguggucaacgccgccaacguguaccugaagcacgggggcggcguggccggggcccugaacaaggcgaccaacaacgccaugcaggucgaguccgacgacuacaucgccacgaacggcccccucaagguggucgggagcugcgugcuguccggccacaaccuggccaagcacugccuccacguggucggccccaacgugaacaagggggaggacauccagcugcugaagagcgccuacgagaacuucaaccagcacgaggugcuccuggcgccgcugcucuccgccggcaucuucggggccgaccccauccacagccugcgggucugcguggacaccgugcgcaccaacgucuaccuggccguguucgacaagaaccucuacgacaagcugguguccagcuuccuggagaugaagagcgagaagcaggucgagcagaagaucgccgagauccccaaggaggaggugaagcccuucaucaccgaguccaagccgagcguggagcagcggaagcaggacgacaagaagaucaaggcgugcgucgaggaggugacgaccacccucgaggagaccaaguuccugacggagaaccugcuccuguacaucgacaucaacggcaaccugcaccccgacuccgccacccucgugagcgacaucgacaucaccuuccugaagaaggacgcccccuacaucgucggggacguggugcaggagggcguccugaccgccguggugauccccacgaagaaggccggcgggaccaccgagaugcucgcgaaggcccugcgcaaggucccgaccgacaacuacaucacgaccuaccccggccaggggcugaacggcuacaccguggaggaggccaagaccgugcucaagaagugcaaguccgccuucuacauccugcccagcaucaucuccaacgagaagcaggagauccuggggaccgucagcuggaaccuccgggagaugcuggcgcacgccgaggagacgcgcaagcugaugcccgugugcguggagaccaaggccaucgucuccaccauccagcggaaguacaagggcaucaagauccaggagggcgugguggacuacggggcccgcuucuacuucuacaccagcaagacgaccgucgccucccugaucaacacccucaacgaccugaacgagacccuggugacgaugccgcucggcuacgugacccacgggcugaaccuggaggaggcggcccgguacaugcgcagccucaagguccccgccaccguguccgugagcucccccgacgccgucaccgccuacaacggcuaccugacgagcuccagcaagacccccgaggagcacuucaucgagaccaucucccuggcggggagcuacaaggacuggagcuacuccggccagagcacccagcucggcaucgaguuccugaagcggggggacaaguccguguacuacacgagcaacccgaccaccuuccaccuggacggcgaggugaucaccuucgacaaccucaagacgcugcugucccuccgcgagguccggaccaucaagguguucaccaccguggacaacaucaaccugcacacgcaggucguggacaugagcaugaccuacgggcagcaguucggccccaccuaccuggacggcgccgacgugaccaagaucaagccccacaacucccacgaggggaagacguucuacguccucccgaacgacgacacccugcgcguggaggccuucgaguacuaccacaccaccgaccccagcuuccugggccgguacauguccgcccucaaccacacgaagaaguggaaguacccccaggugaacgggcugaccagcaucaagugggccgacaacaacugcuaccuggcgaccgcccuccugacccugcagcagaucgagcucaaguucaaccccccggcccugcaggacgccuacuaccgcgcgcgggccggcgaggccgccaacuucugcgcccugauccucgcguacugcaacaagacggucggggagcugggcgacgugcgcgagaccauguccuaccuguuccagcacgccaaccucgacagcugcaagcggguccugaacguggugugcaagaccugcggccagcagcagaccacccugaagggggucgaggccgugauguacaugggcacgcucuccuacgagcaguucaagaagggggugcagauccccugcaccugcggcaagcaggccaccaaguaccugguccagcaggagagccccuucgugaugauguccgcccccccggcgcaguacgagcugaagcacgggaccuucacgugcgccagcgaguacaccggcaacuaccagugcggccacuacaagcacaucaccuccaaggagacccucuacugcaucgacggggcccugcugacgaagagcagcgaguacaagggccccaucaccgacguguucuacaaggagaacuccuacaccaccacgaucaagcccgucaccuacaagcucgacgggguggugugcaccgagaucgaccccaagcuggacaacuacuacaagaaggacaacagcuacuucaccgagcagccgaucgaccugguccccaaccagcccuaccccaacgccuccuucgacaacuucaaguucgugugcgacaacaucaaguucgccgacgaccucaaccagcugacgggcuacaagaagccggcgagccgcgagcugaaggugaccuucuuccccgaccucaacggggacgucguggccaucgacuacaagcacuacacccccuccuucaagaagggcgccaagcugcugcacaagcccaucguguggcacgucaacaacgccaccaacaaggcgacguacaagccgaacaccuggugcauccggugccucuggagcaccaagcccguggagaccuccaacagcuucgacgugcugaaguccgaggacgcccagggcauggacaaccuggccugcgaggaccucaagcccgucagcgaggaggugguggagaaccccacgauccagaaggacguccuggagugcaacgugaagaccaccgagguggucggggacaucauccugaagccggccaacaacucccucaagaucaccgaggaggugggccacacggaccugauggccgcguacguggacaacagcucccugaccaucaagaagcccaacgagcucagccgcguccuggggcugaagacccucgccacccacggccuggccgccgugaacuccgugcccugggacacgaucgccaacuacgcgaagccguuccugaacaaggucgugagcaccaccaccaacaucgugacgcgcugccucaaccgggucugcaccaacuacaugcccuacuucuucacccugcugcuccagcugugcaccuucacccgcuccacgaacagccggaucaaggccuccaugcccaccaccaucgccaagaacaccgugaagagcguggggaaguucugccuggaggccagcuucaacuaccucaagucccccaacuucuucaagcugaucaacaucaucaucugguuccugcuccugagcgucugccugggcucccucaucuacagcacggccgcgcugggcgugcugauguccaaccucgggaugccgagcuacugcaccggcuaccgcgagggguaccugaacuccaccaacgugaccaucgccacguacugcaccggcagcauccccugcuccgucugccugagcggccucgacucccuggacaccuaccccagccuggagaccauccagaucacgaucuccagcuucaagugggaccucaccgccuucgggcugguggccgagugguuccuggccuacauccucuucacccgguucuucuacgugcugggccuggcggccaucaugcagcucuucuucuccuacuucgccguccacuucaucagcaacuccuggcugauguggcugaucaucaaccuggugcagauggcccccaucagcgcgauggugcgcauguacaucuucuucgccuccuucuacuacgucuggaagagcuacgugcacguggucgacgggugcaacagcuccaccugcaugaugugcuacaagcggaaccgcgccacgcggguggagugcaccaccaucgucaacggcgugcgccggagcuucuacguguacgccaacgggggcaagggcuucugcaagcuccacaacuggaacugcgucaacugcgacaccuucugcgccggguccacguucaucagcgacgagguggcgcgcgaccugucccugcaguucaagcggccgaucaaccccaccgaccagagcuccuacaucguggacagcgucaccgugaagaacggcuccauccaccucuacuucgacaaggccgggcagaagaccuacgagcgccacagccugucccacuucgugaaccuggacaaccuccgggccaacaacacgaagggcagccugcccaucaacgucaucguguucgacgggaaguccaagugcgaggagagcuccgccaagagcgccuccguguacuacagccagcugaugugccagcccauccuccugcuggaccaggcgcucgucuccgacgugggcgacagcgccgagguggccgucaagauguucgacgccuacgugaacaccuucagcuccaccuucaacgugccgauggagaagcugaagacccuggucgccacggcggaggccgagcucgccaagaacgugagccuggacaacgugcuguccaccuucaucagcgccgcgcgccagggcuucgucgacuccgacguggagaccaaggacguggucgagugccucaagcugagccaccaguccgacaucgaggugaccggggacagcugcaacaacuacaugcugacguacaacaagguggagaacaugaccccccgggaccucggcgccugcaucgacugcuccgcccgccacaucaacgcccaggucgccaagagccacaacaucgcgcugaucuggaacgugaaggacuucaugucccugagcgagcagcuccggaagcagauccgcuccgccgccaagaagaacaaccugcccuucaagcugaccugcgccaccacgcgccagguggucaacguggugaccaccaagaucgcccucaaggggggcuga

SEQ ID NO: 18056 - RNA, 5841 nt, Artificial Sequence
  SARS-CoV-2__MT641740.1__non-structural protein 3 (NSP3) CDS gc
auggcccccaccaaggugaccuucggcgacgacacggucaucgaggugcagggguacaagagcgugaacaucaccuucgagcuggacgagcgcaucgacaagguccucaacgagaagugcuccgccuacaccguggagcugggcaccgaggugaacgaguucgcgugcgucguggccgacgccgugaucaagacgcugcagccggucagcgagcuccugaccccccuggggaucgaccucgacgagugguccauggccaccuacuaccuguucgacgagagcggcgaguucaagcuggccucccacauguacugcagcuucuacccccccgacgaggacgaggaggagggggacugcgaggaggaggaguucgagccguccacccaguacgaguacggcacggaggacgacuaccagggcaagccccucgaguucggggcgaccagcgccgcccugcagcuggaggaggagcaggaggaggacuggcucgacgacgacucccagcagaccgugggccagcaggacgggagcgaggacaaccagaccacgaccauccagaccaucguggagguccagccccagcuggagauggagcugacccccguggugcagacgaucgaggucaacuccuucagcggcuaccucaagcugaccgacaacguguacaucaagaacgccgacaucguggaggaggcgaagaaggucaagccgaccgugguggucaacgccgccaacguguaccugaagcacgggggcggcguggccggggcccucaacaaggcgaccaacaacgccaugcaggucgaguccgacgacuacaucgccacgaacggcccccugaagguggggggcagcugcguccuguccggccacaaccucgccaagcacugccugcacgugguggggcccaacgucaacaagggcgaggacauccagcugcucaagagcgccuacgagaacuucaaccagcacgaggugcugcuggcgccccuccuguccgccgggaucuucggcgccgacccgauccacagccugcgggugugcgucgacaccgugcgcaccaacguguaccucgccgucuucgacaagaaccuguacgacaagcugguguccagcuuccucgagaugaagagcgagaagcagguggagcagaagaucgccgagauccccaaggaggaggucaagcccuucaucaccgaguccaagcccagcguggagcagcggaagcaggacgacaagaagaucaaggcgugcguggaggaggucacgaccacccuggaggagaccaaguuccugacggagaaccuccugcuguacaucgacaucaacgggaaccuccacccggacuccgccacccuggugagcgacaucgacaucaccuuccugaagaaggacgcccccuacaucgugggcgacgucgugcaggagggcgugcucaccgccgucgugauccccacgaagaaggccgggggcaccaccgagaugcuggcgaaggcccugcgcaaggugcccaccgacaacuacaucacgaccuacccggggcagggccucaacggguacaccgucgaggaggccaagaccgugcugaagaagugcaaguccgccuucuacauccugcccagcaucaucuccaacgagaagcaggagauccucggcaccgugagcuggaaccugcgggagaugcuggcgcacgccgaggagacgcgcaagcugaugcccgucugcguggagaccaaggccaucguguccaccauccagcggaaguacaagggcaucaagauccaggagggggucguggacuacggcgcccgcuucuacuucuacaccagcaagacgaccguggccucccucaucaacacccugaacgaccugaacgagacccucgucacgaugccccugggguacgugacccacggccugaaccucgaggaggcggcccgguacaugcgcagccugaaggugccggccaccgucuccgugagcucccccgacgccgugaccgccuacaacggguaccugacgagcuccagcaagacccccgaggagcacuucaucgagaccaucucccucgcgggcagcuacaaggacuggagcuacuccggccagagcacccagcuggggaucgaguuccugaagcggggcgacaaguccgucuacuacacgagcaaccccaccaccuuccaccucgacggggaggugaucaccuucgacaaccugaagacgcugcucucccugcgcgaggugcggaccaucaaggucuucaccaccguggacaacaucaaccugcacacgcagguggucgacaugagcaugaccuacggccagcaguucggcccgaccuaccucgacggggccgacgugaccaagaucaagccccacaacucccacgagggcaagacguucuacgugcugcccaacgacgacacccugcgcgucgaggccuucgaguacuaccacaccaccgacccgagcuuccucgggcgguacauguccgcccugaaccacacgaagaaguggaaguacccccaggugaacggccugaccagcaucaagugggccgacaacaacugcuaccucgcgaccgcccugcugacccuccagcagaucgagcugaaguucaacccccccgcccugcaggacgccuacuaccgcgcgcgggccggggaggccgccaacuucugcgcccucauccuggcguacugcaacaagacggugggcgagcugggcgacguccgcgagaccauguccuaccucuuccagcacgccaaccuggacagcugcaagcgggugcugaacgucgugugcaagaccugcgggcagcagcagaccacccucaagggcguggaggccgucauguacauggggacgcuguccuacgagcaguucaagaagggcgugcagaucccgugcaccugcgggaagcaggccaccaaguaccuggugcagcaggagagccccuucgucaugauguccgccccccccgcgcaguacgagcucaagcacggcaccuucacgugcgccagcgaguacaccggcaacuaccagugcgggcacuacaagcacaucaccuccaaggagacccuguacugcaucgacggcgcccugcucacgaagagcagcgaguacaaggggccgaucaccgacguguucuacaaggagaacuccuacaccaccacgaucaagcccgugaccuacaagcuggacggcgucgugugcaccgagaucgaccccaagcuggacaacuacuacaagaaggacaacagcuacuucaccgagcagcccaucgaccucgugccgaaccagcccuaccccaacgccuccuucgacaacuucaaguucgucugcgacaacaucaaguucgccgacgaccugaaccagcugacgggguacaagaagcccgcgagccgcgagcucaaggugaccuucuucccggaccugaacggcgacguggucgccaucgacuacaagcacuacacccccuccuucaagaagggcgccaagcugcuccacaagcccaucguguggcacgugaacaacgccaccaacaaggcgacguacaagcccaacaucuggugcauccggugccuguggagcaccaagccggucgagaccuccaacagcuucgacgugcugaaguccgaggacgcccaggggauggacaaccucgccugcgaggaccugaagcccgugagcgaggaggucguggagaaccccaccauccagaaggacgugcuggagugcaacgucaagacgaccgagguggugggcgacaucauccucaagcccgccaacaacucccugaagaucaccgaggaggucgggcacaccgaccugauggccgcguacguggacaacagcucccucacgaucaagaagccgaacgagcugagccgcgugcugggccucaagacccuggccacccacgggcuggccgccgucaacuccgugcccugggacaccaucgccaacuacgcgaagcccuuccucaacaagguggucagcacgaccaccaacaucgugacccgcugccugaaccgggugugcacgaacuacaugccguacuucuucacccugcuccugcagcugugcaccuucacccgcuccaccaacagccggaucaaggccuccaugcccacgaccaucgccaagaacaccgucaagagcgugggcaaguucugccucgaggccagcuucaacuaccugaagucccccaacuucagcaagcugaucaacaucaucaucugguuccuccugcuguccgugugccucggcagccugaucuacuccaccgccgcgcuggggguccucaugagcaaccugggcaugcccuccuacugcacgggguaccgcgagggcuaccugaacagcaccaacgugaccaucgccaccuacugcacgggcuccaucccgugcagcgugugccucuccgggcuggacagccuggacaccuaccccucccucgagaccauccagaucaccaucagcuccuucaagugggaccugacggccuucggccuggucgccgagugguuccucgccuacauccuguucacccgguucuucuacgugcuggggcucgcggccaucaugcagcuguucuucagcuacuucgccgugcacuucaucuccaacagcuggcugauguggcugaucaucaaccucguccagauggcccccaucuccgcgauggugcgcauguacaucuucuucgccagcuucuacuacguguggaagagcuacguccacgugguggacggcugcaacuccagcaccugcaugaugugcuacaagcggaaccgcgccacccgggucgagugcacgaccaucgugaacgggguccgccgguccuucuacguguacgccaacggcggcaagggguucugcaagcugcacaacuggaacugcgugaacugcgacaccuucugcgccggcagcaccuucaucuccgacgaggucgcgcgcgaccugagccuccaguucaagcggcccaucaacccgacggaccaguccagcuacaucguggacuccgugaccgucaagaacgggagcauccaccuguacuucgacaaggccggccagaagaccuacgagcgccacucccugagccacuucgugaaccucgacaaccugcgggccaacaacaccaaggggucccugcccaucaacgugaucgucuucgacggcaagagcaagugcgaggaguccagcgccaaguccgccagcguguacuacucccagcucaugugccagcccauccugcugcucgaccaggcgcuggugagcgacgucggcgacagcgccgagguggccgugaagauguucgacgccuacgucaacacguucuccagcaccuucaacgugcccauggagaagcugaagacccucguggccaccgcggaggccgagcuggccaagaacgucucccuggacaacgugcucagcacguucaucuccgccgcgcgccagggguucguggacagcgacgucgagaccaaggacgugguggagugccugaagcugucccaccagagcgacaucgaggucaccggcgacuccugcaacaacuacaugcucaccuacaacaagguggagaacaugacgccgcgggaccugggggccugcaucgacugcagcgcccgccacaucaacgcccagguggccaagucccacaacaucgcgcugaucuggaacgucaaggacuucaugagccucuccgagcagcugcggaagcagauccgcagcgccgccaagaagaacaaccugcccuucaagcucaccugcgccaccacccgccagguggugaacgucgugacgaccaagaucgcccugaagggcggguga

SEQ ID NO: 18057 - RNA, 5841 nt, Artificial Sequence
  SARS-CoV-2__MT641767.1__non-structural protein 3 (NSP3) CDS gc
auggcccccaccaaggugaccuucggcgacgacacggucaucgaggugcagggguacaagagcgugaacaucaccuucgagcuggacgagcgcaucgacaagguccucaacgagaagugcuccgccuacaccguggagcugggcaccgaggugaacgaguucgcgugcgucguggccgacgccgugaucaagacgcugcagccggucagcgagcuccugaccccccuggggaucgaccucgacgagugguccauggccaccuacuaccuguucgacgagagcggcgaguucaagcuggccucccacauguacugcagcuucuacccccccgacgaggacgaggaggagggggacugcgaggaggaggaguucgagccguccacccaguacgaguacggcacggaggacgacuaccagggcaagccccucgaguucggggcgaccagcgccgcccugcagcccgaggaggagcaggaggaggacuggcuggacgacgacucccagcagaccgugggccagcaggacgggagcgaggacaaccagaccacgaccauccagaccaucguggagguccagccccagcucgagauggagcugaccccgguggugcagacgaucgaggucaacuccuucagcggcuaccugaagcucaccgacaacguguacaucaagaacgccgacaucguggaggaggcgaagaaggucaagcccaccgugguggucaacgccgccaacguguaccugaagcacgggggcggcguggccggggcccugaacaaggcgaccaacaacgccaugcaggucgaguccgacgacuacaucgccacgaacggcccccucaagguggggggcagcugcguccuguccggccacaaccuggccaagcacugccuccacgugguggggcccaacgucaacaagggcgaggacauccagcugcugaagagcgccuacgagaacuucaaccagcacgaggugcuccuggcgccgcugcucuccgccgggaucuucggcgccgaccccauccacagccugcgggugugcgucgacaccgugcgcaccaacguguaccuggccgucuucgacaagaaccucuacgacaagcugguguccagcuuccuggagaugaagagcgagaagcagguggagcagaagaucgccgagauccccaaggaggaggucaagcccuucaucaccgaguccaagccgagcguggagcagcggaagcaggacgacaagaagaucaaggcgugcguggaggaggucacgaccacccucgaggagaccaaguuccugacggagaaccugcuccuguacaucgacaucaacgggaaccugcaccccgacuccgccacccucgugagcgacaucgacaucaccuuccugaagaaggacgcccccuacaucgugggcgacgucgugcaggagggcgugcugaccgccgucgugauccccacgaagaaggccgggggcaccaccgagaugcucgcgaaggcccugcgcaaggugccgaccgacaacuacaucacgaccuaccccgggcagggccugaacggguacaccgucgaggaggccaagaccgugcucaagaagugcaaguccgccuucuacauccugcccagcaucaucuccaacgagaagcaggagauccugggcaccgugagcuggaaccuccgggagaugcuggcgcacgccgaggagacgcgcaagcugaugcccgucugcguggagaccaaggccaucguguccaccauccagcggaaguacaagggcaucaagauccaggagggggucguggacuacggcgcccgcuucuacuucuacaccagcaagacgaccguggccucccugaucaacacccucaacgaccugaacgagacccuggucacgaugccgcucggguacgugacccacggccugaaccuggaggaggcggcccgguacaugcgcagccucaaggugcccgccaccgucuccgugagcucccccgacgccgugaccgccuacaacggguaccugacgagcuccagcaagacccccgaggagcacuucaucgagaccaucucccuggcgggcagcuacaaggacuggagcuacuccggccagagcacccagcucgggaucgaguuccugaagcggggcgacaaguccgucuacuacacgagcaacccgaccaccuuccaccuggacggggaggugaucaccuucgacaaccucaagacgcugcugucccuccgcgaggugcggaccaucaaggucuucaccaccguggacaacaucaaccugcacacgcagguggucgacaugagcaugaccuacggccagcaguucggccccaccuaccuggacggggccgacgugaccaagaucaagccccacaacucccacgagggcaagacguucuacgugcucccgaacgacgacacccugcgcgucgaggccuucgaguacuaccacaccaccgaccccagcuuccuggggcgguacauguccgcccucaaccacacgaagaaguggaaguacccccaggugaacggccugaccagcaucaagugggccgacaacaacugcuaccuggcgaccgcccuccugacccugcagcagaucgagcucaaguucaaccccccggcccugcaggacgccuacuaccgcgcgcgggccggggaggccgccaacuucugcgcccugauccucgcguacugcaacaagacggugggcgagcugggcgacguccgcgagaccauguccuaccuguuccagcacgccaaccucgacagcugcaagcgggugcugaacgucgugugcaagaccugcgggcagcagcagaucacccugaagggcguggaggccgucauguacauggggacccucuccuacgagcaguucaagaagggcgugcagauccccugcacgugcgggaagcaggccaccaaguaccuggugcagcaggagagccccuucgucaugauguccgcccccccggcgcaguacgagcugaagcacggcaccuucaccugcgccagcgaguacacgggcaacuaccagugcgggcacuacaagcacaucaccuccaaggagacccucuacugcaucgacggcgcccugcugaccaagagcagcgaguacaaggggcccaucacggacguguucuacaaggagaacuccuacaccaccaccaucaagcccgugacguacaagcucgacggcgucgugugcaccgagaucgaccccaagcuggacaacuacuacaagaaggacaacagcuacuucaccgagcagccgaucgaccuggugcccaaccagcccuaccccaacgccuccuucgacaacuucaaguucgucugcgacaacaucaaguucgccgacgaccucaaccagcugaccggguacaagaagccggcgagccgcgagcugaaggugacguucuuccccgaccucaacggcgacguggucgccaucgacuacaagcacuacacccccuccuucaagaagggcgccaagcugcugcacaagcccaucguguggcacgugaacaacgccaccaacaaggcgaccuacaagccgaacacguggugcauccggugccucuggagcaagaagcccgucgagaccuccaacagcuucgacgugcugaaguccgaggacgcccaggggauggacaaccuggccugcgaggaccucaagcccgugagcgaggaggucguggagaaccccaccauccagaaggacgugcuggagugcaacgucaagaccacggagguggugggcgacaucauccugaagccggccaacaacucccucaagaucaccgaggaggucgggcacaccgaccugauggccgcguacguggacaacagcucccugaccaucaagaagcccaacgagcucagccgcgugcugggccugaagacgcucgccacccacgggcuggccgccgucaacuccgugcccugggacaccaucgccaacuacgcgaagccguuccugaacaagguggucagcaccacgaccaacaucgugacccgcugccucaaccgggugugcaccaacuacaugcccuacuucuucacgcugcugcuccagcugugcaccuucacccgcuccaccaacagccggaucaaggccuccaugcccaccacgaucgccaagaacaccgucaagagcgugggcaaguucugccuggaggccagcuucaacuaccucaagucccccaacuucagcaagcugaucaacaucaucaucugguuccugcuccuguccgugugccugggcagccucaucuacuccaccgccgcgcuggggguccugaugagcaaccucggcaugccguccuacugcaccggguaccgcgagggcuaccugaacagcacgaacgugaccaucgccaccuacugcaccggcuccauccccugcagcgugugccuguccgggcucgacagccuggacacguaccccucccuggagaccauccagaucaccaucagcuccuucaagugggaccucaccgccuucggccuggucgccgagugguuccuggccuacauccucuucacgcgguucuucuacgugcuggggcuggcggccaucaugcagcucuucuucagcuacuucgccgugcacuucaucuccaacagcuggcugauguggcugaucaucaaccugguccagauggcccccaucuccgcgauggugcgcauguacaucuucuucgccagcuucuacuacguguggaagagcuacguccacgugguggacggcugcaacuccagcaccugcaugaugugcuacaagcggaaccgcgccacccgggucgagugcaccacgaucgugaacgggguccgccgguccuucuacguguacgccaacggcggcaagggguucugcaagcuccacaacuggaacugcgugaacugcgacaccuucugcgccggcagcaccuucaucuccgacgaggucgcgcgcgaccugagccugcaguucaagcggccgaucaaccccaccgaccaguccagcuacaucguggacuccgugacggucaagaacgggagcauccaccucuacuucgacaaggccggccagaagaccuacgagcgccacucccugagccacuucgugaaccuggacaaccuccgggccaacaacaccaaggggucccugcccaucaacgugaucgucuucgacggcaagagcaagugcgaggaguccagcgccaaguccgccagcguguacuacucccagcugaugugccagcccauccuccugcuggaccaggcgcucgugagcgacgucggcgacagcgccgagguggccgugaagauguucgacgccuacgucaacaccuucuccagcacguucaacgugccgauggagaagcugaagacccugguggccaccgcggaggccgagcucgccaagaacgucucccuggacaacgugcugagcaccuucaucuccgccgcgcgccagggguucguggacagcgacgucgagacgaaggacgugguggagugccucaagcugucccaccagagcgacaucgaggucaccggcgacuccugcaacaacuacaugcugaccuacaacaagguggagaacaugaccccccgggaccucggggccugcaucgacugcagcgcccgccacaucaacgcccagguggccaagucccacaacaucgcgcugaucuggaacgucaaggacuucaugagccuguccgagcagcuccggaagcagauccgcagcgccgccaagaagaacaaccugcccuucaagcugacgugcgccaccacccgccagguggugaacgucgugaccacgaagaucgcccucaagggcggguga

SEQ ID NO: 18058 - RNA, 5841 nt, Artificial Sequence
  SARS-CoV-2__MT642085.1__non-structural protein 3 (NSP3) CDS gc
auggcccccaccaaggugaccuucggcgacgacacggucaucgaggugcagggguacaagagcgugaacaucaccuucgagcuggacgagcgcaucgacaagguccucaacgagaagugcuccgccuacaccguggagcugggcaccgaggugaacgaguucgcgugcgucguggccgacgccgugaucaagacgcugcagccggucagcgagcuccugaccccccuggggaucgaccucgacgagugguccauggccaccuacuaccuguucgacgagagcggcgaguucaagcuggccucccacauguacugcagcuucuacccccccgacgaggacgaggaggagggggacugcgaggaggaggaguucgagccguccacccaguacgaguacggcacggaggacgacuaccagggcaagccccucgaguucggggcgaccagcgccgcccugcagcccgaggaggagcaggaggaggacuggcuggacgacgacucccagcagaccgugggccagcaggacgggagcgaggacaaccagaccacgaccauccagaccaucguggagguccagccccagcucgagauggagcugaccccgguggugcagacgaucgaggucaacuccuucagcggcuaccugaagcucaccgacaacguguacaucaagaacgccgacaucguggaggaggcgaagaaggucaagcccaccgugguggucaacgccgccaacguguaccugaagcacgggggcggcguggccggggcccugaacaaggcgaccaacaacgccaugcaggucgaguccgacgacuacaucgccacgaacggcccccucaagguggggggcagcugcguccuguccggccacaaccuggccaagcacugccuccacgugguggggcccaacgucaacaagggcgaggacauccagcugcugaagagcgccuacgagaacuucaaccagcacgaggugcuccuggcgccgcugcucuccgccgggaucuucggcgccgaccccauccacagccugcgggugugcgucgacaccgugcgcaccaacguguaccuggccgucuucgacaagaaccucuacgacaagcugguguccagcuuccuggagaugaagagcgagaagcagguggagcagaagaucgccgagauccccaaggaggaggucaagcccuucaucaccgaguccaagccgagcguggagcagcggaagcaggacgacaagaagaucaaggcgugcguggaggaggucacgaccacccucgaggagaccaaguuccugacggagaaccugcuccuguacaucgacaucaacgggaaccugcaccccgacuccgccacccucgugagcgacaucgacaucaccuuccugaagaaggacgcccccuacaucgugggcgacgucgugcaggagggcgugcugaccgccgucgugauccccacgaagaaggccgggggcaccaccgagaugcucgcgaaggcccugcgcaaggugccgaccgacaacuacaucacgaccuaccccgggcagggccugaacggguacaccgucgaggaggccaagaccgugcucaagaagugcaaguccgccuucuacauccugcccagcaucaucuccaacgagaagcaggagauccugggcaccgugagcuggaaccuccgggagaugcuggcgcacgccgaggagacgcgcaagcugaugcccgucugcguggagaccaaggccaucguguccaccauccagcggaaguacaagggcaucaagauccaggagggggucguggacuacggcgcccgcuucuacuucuacaccagcaagacgaccguggccucccugaucaacacccucaacgaccugaacgagacccuggucacgaugccgcucggguacgugacccacggccugaaccuggaggaggcggcccgguacaugcgcagccucaaggugcccgccaccgucuccgugagcucccccgacgccgugaccgccuacaacggguaccugacgagcuccagcaagacccccgaggagcacuucaucgagaccaucucccuggcgggcagcuacaaggacuggagcuacuccggccagagcacccagcucgggaucgaguuccugaagcggggcgacaaguccgucuacuacacgagcaacccgaccaccuuccaccuggacggggaggugaucaccuucgacaaccucaagacgcugcugucccuccgcgaggugcggaccaucaaggucuucaccaccguggacaacaucaaccugcacacgcagguggucgacaugagcaugaccuacggccagcaguucggccccaccuaccuggacggggccgacgugaccaagaucaagccccacaacucccacgagggcaagacguucuacgugcucccgaacgacgacacccugcgcgucgaggccuucgaguacuaccacaccaccgaccccagcuuccuggggcgguacauguccgcccucaaccacacgaagaaguggaaguacccccaggugaacggccugaccagcaucaagugggccgacaacaacugcuaccuggcgaccgcccuccugacccugcagcagaucgagcucaaguucaaccccccggcccugcaggacgccuacuaccgcgcgcgggccggggaggccgccaacuucugcgcccugauccucgcguacugcaacaagacggugggcgagcugggcgacguccgcgagaccauguccuaccuguuccagcacgccaaccucgacagcugcaagcgggugcugaacgucgugugcaagaccugcgggcagcagcagaccacccugaagggcguggaggccgucauguacauggggacgcucuccuacgagcaguucaagaagggcgugcagauccccugcaccugcgggaagcaggccaccaaguaccuggugcagcaggagagccccuucgucaugauguccgcccccccggcgcaguacgagcugaagcacggcaccuucacgugcgccagcgaguacaccggcaacuaccagugcgggcacuacaagcacaucaccuccaaggagacccucuacugcaucgacggcgcccugcugacgaagagcagcgaguacaaggggcccaucaccgacguguucuacaaggagaacuccuacaccaccacgaucaagcccgugaccuacaagcucgacggcgucgugugcaccgagaucgaccccaagcuggacaacuacuacaagaaggacaacagcuacuucaccgagcagccgaucgaccuggugcccaaccagcccuaccccaacgccuccuucgacaacuucaaguucgucugcgacaacaucaaguucgccgacgaccucaaccagcugacgggguacaagaagccggcgagccgcgagcugaaggugaccuucuuccccgaccucaacggcgacguggucgccaucgacuacaagcacuacacccccuccuucaagaagggcgccaagcugcugcacaagcccaucguguggcacgugaacaacgccaccaacaaggcgacguacaagccgaacaccuggugcauccggugccucuggagcaccaagcccgucgagaccuccaacagcuucgacgugcugaaguccgaggacgcccaggggauggacaaccuggccugcgaggaccucaagcccgugagcgaggaggucguggagaaccccacgauccagaaggacgugcuggagugcaacgucaagaccaccgagguggugggcgacaucauccugaagccggccaacaacucccucaagaucaccgaggaggucgggcacacggaccugauggccgcguacguggacaacagcucccugaccaucaagaagcccaacgagcucagccgcgugcugggccugaagacccucgccacccacgggcuggccgccgucaacuccgugcccugggacacgaucgccaacuacgcgaagccguuccugaaccgcguggucagcaccaccaccaacaucgugacgcggugccucaaccgcgugugcaccaacuacaugcccuacuucuucacccugcugcuccagcugugcaccuucacccgguccacgaacagccgcaucaaggccuccaugcccaccaccaucgccaagaacaccgucaagagcgugggcaaguucugccuggaggccagcuucaacuaccucaagucccccaacuucagcaagcugaucaacaucaucaucugguuccugcuccuguccgugugccugggcagccucaucuacuccacggccgcgcuggggguccugaugagcaaccucggcaugccguccuacugcaccggguaccgggagggcuaccugaacagcaccaacgugaccaucgccacguacugcaccggcuccauccccugcagcgugugccuguccgggcucgacagccuggacaccuaccccucccuggagaccauccagaucacgaucagcuccuucaagugggaccucaccgccuucggccuggucgccgagugguuccuggccuacauccucuucacccgcuucuucuacgugcuggggcuggcggccaucaugcagcucuucuucagcuacuucgccgugcacuucaucuccaacagcuggcugauguggcugaucaucaaccugguccagauggcccccaucuccgcgauggugcggauguacaucuucuucgccagcuucuacuacguguggaagagcuacguccacgugguggacggcugcaacuccagcaccugcaugaugugcuacaagcgcaaccgggccacgcgcgucgagugcaccaccaucgugaacgggguccggcgcuccuucuacguguacgccaacggcggcaagggguucugcaagcuccacaacuggaacugcgugaacugcgacaccuucugcgccggcagcacguucaucuccgacgaggucgcgcgggaccugagccugcaguucaagcgcccgaucaaccccaccgaccaguccagcuacaucguggacuccgugaccgucaagaacgggagcauccaccucuacuucgacaaggccggccagaagaccuacgagcggcacucccugagccacuucgugaaccuggacaaccuccgcgccaacaacacgaaggggucccugcccaucaacgugaucgucuucgacggcaagagcaagugcgaggaguccagcgccaaguccgccagcguguacuacucccagcugaugugccagcccauccuccugcuggaccaggcgcucgugagcgacgucggcgacagcgccgagguggccgugaagauguucgacgccuacgucaacaccuucuccagcaccuucaacgugccgauggagaagcugaagacccugguggccacggcggaggccgagcucgccaagaacgucucccuggacaacgugcugagcaccuucaucuccgccgcgcggcagggguucguggacagcgacgucgagaccaaggacgugguggagugccucaagcugucccaccagagcgacaucgaggucaccggcgacuccugcaacaacuacaugcugacguacaacaagguggagaacaugaccccccgcgaccucggggccugcaucgacugcagcgcccggcacaucaacgcccagguggccaagucccacaacaucgcgcugaucuggaacgucaaggacuucaugagccuguccgagcagcuccgcaagcagauccgcagcgccgccaagaagaacaaccugcccuucaagcugaccugcgccaccacgcggcagguggugaacgucgugaccaccaagaucgcccucaagggcggguga

SEQ ID NO: 18059 - RNA, 5841 nt, Artificial Sequence
  SARS-CoV-2__MT642087.1__non-structural protein 3 (NSP3) CDS gc
auggcccccaccaaggugaccuucggcgacgacacggucaucgaggugcagggguacaagagcgugaacaucaccuucgagcuggacgagcgcaucgacaagguccucaacgagaagugcuccgccuacaccguggagcugggcaccgaggugaacgaguucgcgugcgucguggccgacgccgugaucaagacgcugcagccggucagcgagcuccugaccccccuggggaucgaccucgacgagugguccauggccaccuacuaccuguucgacgagagcggcgaguucaagcuggccucccacauguacugcagcuucuacccccccgacgaggacgaggaggagggggacugcgaggaggaggaguucgagccgcucacccaguacgaguacggcacggaggacgacuaccagggcaagccccuggaguucggggcgaccuccgccgcccugcagcccgaggaggagcaggaggaggacuggcucgacgacgacagccagcagaccgugggccagcaggacggguccgaggacaaccagaccacgaccauccagaccaucguggagguccagccccagcuggagauggagcugaccccgguggugcagacgaucgaggucaacagcuucuccggcuaccucaagcugaccgacaacguguacaucaagaacgccgacaucguggaggaggcgaagaaggucaagcccaccgugguggucaacgccgccaacguguaccugaagcacgggggcggcguggccggggcccucaacaaggcgaccaacaacgccaugcaggucgagagcgacgacuacaucgccacgaacggcccccugaagguggggggcuccugcguccugagcggccacaaccucgccaagcacugccugcacgugguggggcccaacgucaacaagggcgaggacauccagcugcucaaguccgccuacgagaacuucaaccagcacgaggugcugcuggcgccgcuccugagcgccgggaucuucggcgccgaccccauccacucccugcgggugugcgucgacaccgugcgcaccaacguguaccucgccgucuucgacaagaaccuguacgacaagcuggugagcuccuuccucgagaugaagagcgagaagcagguggagcagaagaucgccgagauccccaaggaggaggucaagcccuucaucaccgagagcaagccguccguggagcagcggaagcaggacgacaagaagaucaaggcgugcguggaggaggucacgaccacccuggaggagaccaaguuccugacggagaaccuccugcuguacaucgacaucaacgggaaccuccaccccgacagcgccacccugguguccgacaucgacaucaccuuccugaagaaggacgcccccuacaucgugggcgacgucgugcaggagggcgugcucaccgccgucgugauccccacgaagaaggccgggggcaccaccgagaugcuggcgaaggcccugcgcaaggugccgaccgacaacuacaucacgaccuaccccgggcagggccucaacggguacaccgucgaggaggccaagaccgugcugaagaagugcaagagcgccuucuacauccugcccuccaucaucagcaacgagaagcaggagauccucggcaccguguccuggaaccugcgggagaugcuggcgcacgccgaggagacgcgcaagcugaugcccgucugcguggagaccaaggccaucgugagcaccauccagcggaaguacaagggcaucaagauccaggagggggucguggacuacggcgcccgcuucuacuucuacaccuccaagacgaccguggccagccucaucaacacccugaacgaccugaacgagacccucgucacgaugccgcugggguacgugacccacggccugaaccucgaggaggcggcccgguacaugcgcucccugaaggugcccgccaccgucagcguguccagccccgacgccgugaccgccuacaacggguaccugacguccagcuccaagacccccgaggagcacuucaucgagaccaucagccucgcgggcuccuacaaggacuggagcuacagcggccaguccacccagcuggggaucgaguuccugaagcggggcgacaagagcgucuacuacacguccaacccgaccaccuuccaccucgacggggaggugaucaccuucgacaaccugaagacgcugcucagccugcgcgaggugcggaccaucaaggucuucaccaccguggacaacaucaaccugcacacgcagguggucgacauguccaugaucuacggccagcaguucggccccaccuaccucgacggggccgacgugaccaagaucaagccccacaacagccacgagggcaagaccuucuacgugcugccgaacgacgacacgcugcgcgucgaggccuucgaguacuaccacaccaccgaccccuccuuccucgggcgguacaugagcgcccugaaccacaccaagaaguggaaguacccccaggugaacggccugacguccaucaagugggccgacaacaacugcuaccucgcgaccgcccugcugacccuccagcagaucgagcugaaguucaaccccccggcccugcaggacgccuacuaccgcgcgcgggccggggaggccgccaacuucugcgcccucauccuggcguacugcaacaagaccgugggcgagcugggcgacguccgcgagacgaugagcuaccucuuccagcacgccaaccuggacuccugcaagcgggugcugaacgucgugugcaagaccugcgggcagcagcagaccacccucaagggcguggaggccgucauguacauggggacccugagcuacgagcaguucaagaagggcgugcagauccccugcacgugcgggaagcaggccaccaaguaccuggugcagcaggagucccccuucgucaugaugagcgcccccccggcgcaguacgagcucaagcacggcaccuucaccugcgccuccgaguacacgggcaacuaccagugcgggcacuacaagcacaucaccagcaaggagacccuguacugcaucgacggcgcccugcucaccaaguccagcgaguacaaggggcccaucacggacguguucuacaaggagaacagcuacaccaccaccaucaagcccgugacguacaagcuggacggcgucgugugcaccgagaucgaccccaagcuggacaacuacuacaagaaggacaacuccuacuucaccgagcagccgaucgaccucgugcccaaccagcccuaccccaacgccagcuucgacaacuucaaguucgucugcgacaacaucaaguucgccgacgaccugaaccagcugaccggguacaagaagccggcgucccgcgagcucaaggugacguucuuccccgaccugaacggcgacguggucgccaucgacuacaagcacuacacccccagcuucaagaagggcgccaagcugcuccacaagcccaucguguggcacgugaacaacgccaccaacaaggcgaccuacaagccgaacacguggugcauccggugccugugguccaccaagcccgucgagaccagcaacuccuucgacgugcugaagagcgaggacgcccaggggauggacaaccucgccugcgaggaccugaagcccguguccgaggaggucguggagaaccccaccauccagaaggacgugcuggagugcaacgucaagacgaccgagguggugggcgacaucauccucaagccggccaacaacagccugaagaucaccgaggaggucgggcacaccgaccugauggccgcguacguggacaacuccagccucacgaucaagaagcccaacgagcugucccgcgugcugggccucaagacccuggccacccacgggcuggccgccgucaacagcgugcccugggacaccaucgccaacuacgcgaagccguuccucaacaagguggucuccacgaccaccaacaucgugacccgcugccugaaccgggugugcacgaacuacaugcccuacuucuucacccugcuccugcagcugugcaccuucacccgcagcaccaacucccggaucaaggccagcaugcccacgaccaucgccaagaacaccgucaaguccgugggcaaguucugccucgaggccagcuucaacuaccugaagagccccaacuucuccaagcugaucaacaucaucaucugguuccuccugcugagcgugugccucggcucccugaucuacagcaccgccgcgcuggggguccucauguccaaccugggcaugccgagcuacugcacgggguaccgcgagggcuaccugaacuccaccaacgugaccaucgccaccuacugcacgggcagcauccccugcuccgugugccucagcgggcuggacucccuggacaccuaccccagccucgagaccauccagaucaccaucuccagcuucaagugggaccugacggccuucggccuggucgccgagugguuccucgccuacauccuguucacccgguucuucuacgugcuggggcucgcggccaucaugcagcuguucuucuccuacuucgccgugcacuucaucagcaacuccuggcugauguggcugaucaucaaccucguccagauggcccccaucagcgcgauggugcgcauguacaucuucuucgccuccuucuacuacguguggaagagcuacguccacgugguggacggcugcaacagcuccaccugcaugaugugcuacaagcggaaccgcgccacccgggucgagugcacgaccaucgugaacgggguccgccggagcuucuacguguacgccaacggcggcaagggguucugcaagcugcacaacuggaacugcgugaacugcgacaccuucugcgccggcuccaccuucaucagcgacgaggucgcgcgcgaccugucccuccaguucaagcggccgaucaaccccacggaccagagcuccuacaucguggacagcgugaccgucaagaacggguccauccaccuguacuucgacaaggccggccagaagaccuacgagcgccacagccugucccacuucgugaaccucgacaaccugcgggccaacaacaccaaggggagccugcccaucaacgugaucgucuucgacggcaaguccaagugcgaggagagcuccgccaagagcgccuccguguacuacagccagcucaugugccagcccauccugcugcucgaccaggcgcugguguccgacgucggcgacagcgccgagguggccgugaagauguucgacgccuacgucaacacguucagcuccaccuucaacgugccgauggagaagcugaagacccucguggccaccgcggaggccgagcuggccaagaacgucagccuggacaacgugcucuccacguucaucagcgccgcgcgccagggguucguggacuccgacgucgagaccaaggacgugguggagugccugaagcugagccaccaguccgacaucgaggucaccggcgacagcugcaacaacuacaugcucaccuacaacaagguggagaacaugacgccccgggaccugggggccugcaucgacugcuccgcccgccacaucaacgcccagguggccaagagccacaacaucgcgcugaucuggaacgucaaggacuucaugucccucagcgagcagcugcggaagcagauccgcuccgccgccaagaagaacaaccugcccuucaagcucaccugcgccaccacccgccagguggugaacgucgugacgaccaagaucgcccugaagggcggguga

SEQ ID NO: 18060 - RNA, 5841 nt, Artificial Sequence
  SARS-CoV-2__MT642093.1__non-structural protein 3 (NSP3) CDS gc
auggcccccaccaaggugaccuucggcgacgacacggucaucgaggugcagggguacaagagcgugaacaucaccuucgagcuggacgagcgcaucgacaagguccucaacgagaagugcuccgccuacaccguggagcugggcaccgaggugaacgaguucgcgugcgucguggccgacgccgugaucaagacgcugcagccggucagcgagcuccugaccccccuggggaucgaccucgacgagugguccauggccaccuacuaccuguucgacgagagcggcgaguucaagcuggccucccacauguacugcagcuucuacccccccgacgaggacgaggaggagggggacugcgaggaggaggaguucgagccguccacccaguacgaguacggcacggaggacgacuaccagggcaagccccucgaguucggggcgaccagcgccgcccugcagcccgaggaggagcaggaggaggacuggcuggacgacgacucccagcagaccgugggccagcaggacgggagcgaggacaaccagaccacgaccauccagaccaucguggagguccagccccagcucgagauggagcugaccccgguggugcagacgaucgaggucaacuccuucagcggcuaccugaagcucaccgacaacguguacaucaagaacgccgacaucguggaggaggcgaagaaggucaagcccaccgugguggucaacgccgccaacguguaccugaagcacgggggcggcguggccggggcccugaacaaggcgaccaacaacgccaugcaggucgaguccgacgacuacaucgccacgaacggcccccucaagguggggggcagcugcguccuguccggccacaaccuggccaagcacugccuccacgugguggggcccaacgucaacaagggcgaggacauccagcugcugaagagcgccuacgagaacuucaaccagcacgaggugcuccuggcgccgcugcucuccgccgggaucuucggcgccgaccccauccacagccugcgggugugcgucgacaccgugcgcaccaacguguaccuggccgucuucgacaagaaccucuacgacaagcugguguccagcuuccuggagaugaagagcgagaagcagguggagcagaagaucgccgagauccccaaggaggaggucaagcccuucaucaccgaguccaagccgagcguggagcagcggaagcaggacgacaagaagaucaaggcgugcguggaggaggucacgaccacccucgaggagaccaaguuccugacggagaaccugcuccuguacaucgacaucaacgggaaccugcaccccgacuccgccacccucgugagcgacaucgacaucaccuuccugaagaaggacgcccccuacaucgugggcgacgucgugcaggagggcgugcugaccgccgucgugauccccacgaagaaggccgggggcaccaccgagaugcucgcgaaggcccugcgcaaggugccgaccgacaacuacaucacgaccuaccccgggcagggccugaacggguacaccgucgaggaggccaagaccgugcucaagaagugcaaguccgccuucuacauccugcccagcaucaucuccaacgagaagcaggagauccugggcaccgugagcuggaaccuccgggagaugcuggcgcacgccgaggagacgcgcaagcugaugcccgucugcguggagaccaaggccaucguguccaccauccagcggaaguacaagggcaucaagauccaggagggggucguggacuacggcgcccgcuucuacuucuacaccagcaagacgaccguggccucccugaucaacacccucaacgaccugaacgagacccuggucacgaugccgcucggguacgugacccacggccugaaccuggaggaggcggcccgguacaugcgcagccucaaggugcccgccaccgucuccgugagcucccccgacgccgugaccgccuacaacggguaccugacgagcuccagcaagacccccgaggagcacuucaucgagaccaucucccuggcgggcagcuacaaggacugguucuacagcggccaguccacccagcucgggaucgaguuccugaagcggggcgacaagagcgucuacuacacguccaacccgaccaccuuccaccuggacggggaggugaucaccuucgacaaccucaagacgcugcugagccuccgcgaggugcggaccaucaaggucuucaccaccguggacaacaucaaccugcacacgcagguggucgacauguccaugaccuacggccagcaguucggccccaccuaccuggacggggccgacgugaccaagaucaagccccacaacagccacgagggcaagacguucuacgugcucccgaacgacgacacccugcgcgucgaggccuucgaguacuaccacaccaccgaccccuccuuccuggggcgguacaugagcgcccucaaccacacgaagaaguggaaguacccccaggugaacggccugaccuccaucaagugggccgacaacaacugcuaccuggcgaccgcccuccugacccugcagcagaucgagcucaaguucaaccccccggcccugcaggacgccuacuaccgcgcgcgggccggggaggccgccaacuucugcgcccugauccucgcguacugcaacaagacggugggcgagcugggcgacguccgcgagaccaugagcuaccuguuccagcacgccaaccucgacuccugcaagcgggugcugaacgucgugugcaagaccugcgggcagcagcagaccacccugaagggcguggaggccgucauguacauggggacgcucagcuacgagcaguucaagaagggcgugcagauccccugcaccugcgggaagcaggccaccaaguaccuggugcagcaggagucccccuucgucaugaugagcgcccccccggcgcaguacgagcugaagcacggcaccuucacgugcgccuccgaguacaccggcaacuaccagugcgggcacuacaagcacaucaccagcaaggagacccucuacugcaucgacggcgcccugcugacgaaguccagcgaguacaaggggcccaucaccgacguguucuacaaggagaacagcuacaccaccacgaucaagcccgugaccuacaagcucgacggcgucgugugcaccgagaucgaccccaagcuggacaacuacuacaagaaggacaacuccuacuucaccgagcagccgaucgaccuggugcccaaccagcccuaccccaacgccagcuucgacaacuucaaguucgucugcgacaacaucaaguucgccgacgaccucaaccagcugacgggguacaagaagccggcgucccgcgagcugaaggugaccuucuuccccgaccucaacggcgacguggucgccaucgacuacaagcacuacacccccagcuucaagaagggcgccaagcugcugcacaagcccaucguguggcacgugaacaacgccaccaacaaggcgacguacaagccgaacaccuggugcauccggugccucugguccaccaagcccgucgagaccagcaacuccuucgacgugcugaagagcgaggacgcccaggggauggacaaccuggccugcgaggaccucaagcccguguccgaggaggucguggagaaccccacgauccagaaggacgugcuggagugcaacgucaagaccaccgagguggugggcgacaucauccugaagccggccaacaacagccucaagaucaccgaggaggucgggcacacggaccugauggccgcguacguggacaacuccagccugaccaucaagaagcccaacgagcucucccgcgugcugggccugaagacccucgccacccacgggcuggccgccgucaacagcgugcccugggacacgaucgccaacuacgcgaagccguuccugaacaagguggucuccaccaccaccaacaucgugacgcgcugccucaaccgggugugcaccaacuacaugcccuacuucuucacccugcugcuccagcugugcaccuucacccgcagcacgaacucccggaucaaggccagcaugcccaccaccaucgccaagaacaccgucaaguccgugggcaaguucugccuggaggccagcuucaacuaccucaagagccccaacuucuccaagcugaucaacaucaucaucugguuccugcuccugagcgugugccugggcucccucaucuacagcacggccgcgcuggggguccugauguccaaccucggcaugccgagcuacugcaccggguaccgcgagggcuaccugaacuccaccaacgugaccaucgccacguacugcaccggcagcauccccugcuccgugugccugagcgggcucgacucccuggacaccuaccccagccuggagaccauccagaucacgaucuccagcuucaagugggaccucaccgccuucggccuggucgccgagugguuccuggccuacauccucuucacccgguucuucuacgugcuggggcuggcggccaucaugcagcucuucuucuccuacuucgccgugcacuucaucagcaacuccuggcugauguggcugaucaucaaccugguccagauggcccccaucagcgcgauggugcgcauguacaucuucuucgccuccuucuacuacguguggaagagcuacguccacgugguggacggcugcaacagcuccaccugcaugaugugcuacaagcggaaccgcgccacgcgggucgagugcaccaccaucgugaacgggguccgccggagcuucuacguguacgccaacggcggcaagggguucugcaagcuccacaacuggaacugcgugaacugcgacaccuucugcgccggcuccacguucaucagcgacgaggucgcgcgcgaccugucccugcaguucaagcggccgaucaaccccaccgaccagagcuccuacaucguggacagcgugaccgucaagaacggguccauccaccucuacuucgacaaggccggccagaagaccuacgagcgccacagccugucccacuucgugaaccuggacaaccuccgggccaacaacacgaaggggagccugcccaucaacgugaucgucuucgacggcaaguccaagugcgaggagagcuccgccaagagcgccuccguguacuacagccagcugaugugccagcccauccuccugcuggaccaggcgcucguguccgacgucggcgacagcgccgagguggccgugaagauguucgacgccuacgucaacaccuucagcuccaccuucaacgugccgauggagaagcugaagacccugguggccacggcggaggccgagcucgccaagaacgucagccuggacaacgugcuguccaccuucaucagcgccgcgcgccagggguucguggacuccgacgucgagaccaaggacgugguggagugccucaagcugagccaccaguccgacaucgaggucaccggcgacagcugcaacaacuacaugcugacguacaacaagguggagaacaugaccccccgggaccucggggccugcaucgacugcuccgcccgccacaucaacgcccagguggccaagagccacaacaucgcgcugaucuggaacgucaaggacuucaugucccugagcgagcagcuccggaagcagauccgcuccgccgccaagaagaacaaccugcccuucaagcugaccugcgccaccacgcgccagguggugaacgucgugaccaccaagaucgcccucaagggcggguga

SEQ ID NO: 18061 - RNA, 5841 nt, Artificial Sequence
  SARS-CoV-2__MT642111.1__non-structural protein 3 (NSP3) CDS gc
auggcccccaccaaggugaccuucggcgacgacacggucaucgaggugcagggguacaagagcgugaacaucaccuucgagcuggacgagcgcaucgacaagguccucaacgagaagugcuccgccuacaccguggagcugggcaccgaggugaacgaguucgcgugcgucguggccgacgccgugaucaagacgcugcagccggucagcgagcuccugaccccccuggggaucgaccucgacgagugguccauggccaccuacuaccuguucgacgagagcggcgaguucaagcuggccucccacauguacugcagcuucuacccccccgacgaggacgaggaggagggggacugcgaggaggaggaguucgagccguccacccaguacgaguacggcacggaggacgacuaccagggcaagccccucgaguucggggcgaccagcgccgcccugcagcccgaggaggagcaggaggaggacuggcuggacgacgacucccagcagaccgugggccagcaggacgggagcgaggacaaccagaccacgaccauccagaccaucguggagguccagccccagcucgagauggagcugaccccgguggugcagacgaucgaggucaacuccuucagcggcuaccugaagcucaccgacaacguguacaucaagaacgccgacaucguggaggaggcgaagaaggucaagcccaccgugguggucaacgccgccaacguguaccugaagcacgggggcggcguggccggggcccugaacaaggcgaccaacaacgccaugcaggucgaguccgacgacuacaucgccacgaacggcccccucaagguggggggcagcugcguccuguccggccacaaccuggccaagcacugccuccacgugguggggcccaacgucaacaagggcgaggacauccagcugcugaagagcgccuacgagaacuucaaccagcacgaggugcuccuggcgccgcugcucuccgccgggaucuucggcgccgaccccauccacagccugcgggugugcgucgacaccgugcgcaccaacguguaccuggccgucuucgacaagaaccucuacgacaagcugguguccagcuuccuggagaugaagagcgagaagcagguggagcagaagaucgccgagauccccaaggaggaggucaagcccuucaucaccgaguccaagccgagcguggagcagcggaagcaggacgacaagaagaucaaggcgugcguggaggaggucacgaccacccucgaggagaccaaguuccugacggagaaccugcuccuguacaucgacaucaacgggaaccugcaccccgacuccgccacccucgugagcgacaucgacaucaccuuccugaagaaggacgcccccuacaucgugggcgacgucgugcaggagggcgugcugaccgccgucgugauccccacgaagaaggccgggggcaccaccgagaugcucgcgaaggcccugcgcaaggugccgaccgacaacuacaucacgaccuaccccgggcagggccugaacggguacaccgucgaggaggccaagaccgugcucaagaagugcaaguccgccuucuacauccugcccagcaucaucuccaacgagaagcaggagauccugggcaccgugagcuggaaccuccgggagaugcuggcgcacgccgaggagacgcgcaagcugaugcccgucugcguggagaccaaggccaucguguccaccauccagcggaaguacaagggcaucaagauccaggagggggucguggacuacggcgcccgcuucuacuucuacaccagcaagacgaccguggccucccugaucaacacccucaacgaccugaacgagacccuggucacgaugccgcucggguacgugacccacggccugaaccuggaggaggcggcccgguacaugcgcagccucaaggugcccgccaccgucuccgugagcucccccgacgccgugaccgccuacaacggguaccugacgagcuccagcaagacccccgaggagcacuucaucgagaccaucucccuggcgggcagcuacaaggacuggagcuacuccggccagagcacccagcucgggaucgaguuccugaagcggggcgacaaguccgucuacuacacgagcaacuccaccaccuuccaccuggacggggaggugaucaccuucgacaaccucaagacgcugcugagccuccgcgaggugcggaccaucaaggucuucaccaccguggacaacaucaaccugcacacgcagguggucgacauguccaugaccuacggccagcaguucggcccgaccuaccuggacggggccgacgugaccaagaucaagccccacaacagccacgagggcaagacguucuacgugcuccccaacgacgacacccugcgcgucgaggccuucgaguacuaccacaccaccgacccguccuuccuggggcgguacaugagcgcccucaaccacacgaagaaguggaaguacccccaggugaacggccugaccuccaucaagugggccgacaacaacugcuaccuggcgaccgcccuccugacccugcagcagaucgagcucaaguucaacccccccgcccugcaggacgccuacuaccgcgcgcgggccggggaggccgccaacuucugcgcccugauccucgcguacugcaacaagacggugggcgagcugggcgacguccgcgagaccaugagcuaccuguuccagcacgccaaccucgacuccugcaagcgggugcugaacgucgugugcaagaccugcgggcagcagcagaccacccugaagggcguggaggccgucauguacauggggacgcucagcuacgagcaguucaagaagggcgugcagaucccgugcaccugcgggaagcaggccaccaaguaccuggugcagcaggagucccccuucgucaugaugagcgccccccccgcgcaguacgagcugaagcacggcaccuucacgugcgccuccgaguacaccggcaacuaccagugcgggcacuacaagcacaucaccagcaaggagacccucuacugcaucgacggcgcccugcugacgaagagcuccgaguacaaggggccgaucaccgacguguucuacaaggagaacagcuacaccaccacgaucaagcccgugaccuacaagcucgacggcgucgugugcaccgagaucgaccccaagcuggacaacuacuacaagaaggacaacuccuacuucaccgagcagcccaucgaccuggugccgaaccagcccuaccccaacgccagcuucgacaacuucaaguucgucugcgacaacaucaaguucgccgacgaccucaaccagcugacgggguacaagaagcccgcgucccgcgagcugaaggugaccuucuucccggaccucaacggcgacguggucgccaucgacuacaagcacuacacccccagcuucaagaagggcgccaagcugcugcacaagcccaucguguggcacgugaacaacgccaccaacaaggcgacguacaagcccaacaccuggugcauccggugccucugguccaccaagccggucgagaccagcaacuccuucgacgugcugaagagcgaggacgcccaggggauggacaaccuggccugcgaggaccucaagcccguguccgaggaggucguggagaaccccacgauccagaaggacgugcuggagugcaacgucaagaccaccgagguggugggcgacaucauccugaagcccgccaacaacagccucaagaucaccgaggaggucgggcacacggaccugauggccgcguacguggacaacuccagccugaccaucaagaagccgaacgagcucucccgcgugcugggccugaagacccucgccacccacgggcuggccgccgucaacagcgugcccugggacacgaucgccaacuacgcgaagcccuuccugaacaagguggucuccaccaccaccaacaucgugacgcgcugccucaaccgggugugcaccaacuacaugccguacuucuucacccugcugcuccagcugugcaccuucacccgcagcacgaacucccggaucaaggccagcaugcccaccaccaucgccaagaacaccgucaagagcgugggcaaguucugccuggaggccuccuucaacuaccucaagagccccaacuucuccaagcugaucaacaucaucaucugguuccugcuccugagcgugugccugggcucccucaucuacagcacggccgcgcuggggguccugauguccaaccucggcaugcccagcuacugcaccggguaccgcgagggcuaccugaacuccaccaacgugaccaucgccacguacugcaccggcagcaucccgugcuccgugugccugagcgggcucgacucccuggacaccuaccccagccuggagaccauccagaucacgaucuccagcuucaagugggaccucaccgccuucggccuggucgccgagugguuccuggccuacauccucuucacccgguucuucuacgugcuggggcuggcggccaucaugcagcucuucuucuccuacuucgccgugcacuucaucagcaacuccuggcugauguggcugaucaucaaccugguccagauggcccccaucagcgcgauggugcgcauguacaucuucuucgccagcuucuacuacguguggaaguccuacguccacgugguggacggcugcaacagcuccaccugcaugaugugcuacaagcggaaccgcgccacgcgggucgagugcaccaccaucgugaacgggguccgccggagcuucuacguguacgccaacggcggcaagggguucugcaagcuccacaacuggaacugcgugaacugcgacaccuucugcgccggcuccacguucaucagcgacgaggucgcgcgcgaccugucccugcaguucaagcggcccaucaacccgaccgaccagagcuccuacaucguggacagcgugaccgucaagaacggguccauccaccucuacuucgacaaggccggccagaagaccuacgagcgccacagccugucccacuucgugaaccuggacaaccuccgggccaacaacacgaaggggagccugcccaucaacgugaucgucuucgacggcaaguccaagugcgaggagagcuccgccaagagcgccuccguguacuacagccagcugaugugccagcccauccuccugcuggaccaggcgcucgugagcgacgucggcgacuccgccgagguggccgugaagauguucgacgccuacgucaacaccuucagcuccaccuucaacgugcccauggagaagcugaagacccugguggccacggcggaggccgagcucgccaagaacgucagccuggacaacgugcuguccaccuucaucagcgccgcgcgccagggguucguggacuccgacgucgagaccaaggacgugguggagugccucaagcugagccaccaguccgacaucgaggucaccggcgacagcugcaacaacuacaugcugacguacaacaagguggagaacaugaccccgcgggaccucggggccugcaucgacugcuccgcccgccacaucaacgcccagguggccaagagccacaacaucgcgcugaucuggaacgucaaggacuucaugucccugagcgagcagcuccggaagcagauccgcuccgccgccaagaagaacaaccugcccuucaagcugaccugcgccaccacgcgccagguggugaacgucgugaccaccaagaucgcccucaagggcggguga

SEQ ID NO: 18062 - RNA, 5841 nt, Artificial Sequence
  SARS-CoV-2__MT642138.1__non-structural protein 3 (NSP3) CDS gc
auggcccccaccaaggugaccuucggcgacgacacggucaucgaggugcagggguacaagagcgugaacaucaccuucgagcuggacgagcgcaucgacaagguccucaacgagaagugcuccgccuacaccguggagcugggcaccgaggugaacgaguucgcgugcgucguggccgacgccgugaucaagacgcugcagccggucagcgagcuccugaccccccuggggaucgaccucgacgagugguccauggccaccuacuaccuguucgacgagagcggcgaguucaagcuggccucccacauguacugcagcuucuacccccccgacgaggacgaggaggagggggacugcgaggaggaggaguucgagccguccacccaguacgaguacggcacggaggacgacuaccagggcaagccccucgaguucggggcgaccagcgccgcccugcagcccgaggaggagcaggaggaggacuggcuggacgacgacucccagcagaccgugggccagcaggacgggagcgaggacaaccagaccacgaccauccagaccaucguggagguccagccccagcucgagauggagcugaccccgguggugcagacgaucgaggucaacuccuucagcggcuaccugaagcucaccgacaacguguacaucaagaacgccgacaucguggaggaggcgaagaaggucaagcccaccgugguggucaacgccgccaacguguaccugaagcacgggggcggcguggccggggcccugaacaaggcgaccaacaacgccaugcaggucgaguccgacgacuacaucgccacgaacggcccccucaagguggggggcagcugcguccuguccggccacaaccuggccaagcacugccuccacgugguggggcccaacgucaacaagggcgaggacauccagcugcugaagagcgccuacgagaacuucaaccagcacgaggugcuccuggcgccgcugcucuccgccgggaucuucggcgccgaccccauccacagccugcgggugugcgucgacaccgugcgcaccaacguguaccuggccgucuucgacaagaaccucuacgacaagcugguguccagcuuccuggagaugaagagcgagaagcagguggagcagaagaucgccgagauccccaaggaggaggucaagcccuucaucaccgaguccaagccgagcguggagcagcggaagcaggacgacaagaagaucaaggcgugcguggaggaggucacgaccacccucgaggagaccaaguuccugacggagaaccugcuccuguacaucgacaucaacgggaaccugcaccccgacuccgccacccucgugagcgacaucgacaucaccuuccugaagaaggacgcccccuacaucgugggcgacgucgugcaggagggcgugcugaccgccgucgugauccccacgaagaaggccgggggcaccaccgagaugcucgcgaaggcccugcgcaaggugccgaccgacaacuacaucacgaccuaccccgggcagggccugaacggguacaccgucgaggaggccaagaccgugcucaagaagugcaaguccgccuucuacauccugcccagcaucaucuccaacgagaagcaggagauccugggcaccgugagcuggaaccuccgggagaugcuggcgcacgccgaggagacgcgcaagcugaugcccgucugcguggagaccaaggccaucguguccaccauccagcggaaguacaagggcaucaagauccaggagggggucguggacuacggcgcccgcuucuacuucuacaccagcaagacgaccguggccucccugaucaacacccucaacgaccugaacgagacccuggucacgaugccgcucggguacgugacccacggccugaaccuggaggaggcggcccgguacaugcgcagccucaaggugcccgccaccgucuccgugagcucccccgacgccgugaccgccuacaacggguaccugacgagcuccagcaagacccccgaggagcgguucaucgagaccaucucccuggcgggcagcuacaaggacuggagcuacuccggccagagcacccagcucgggaucgaguuccugaagcgcggcgacaaguccgucuacuacacgagcaacccgaccaccuuccaccuggacggggaggugaucaccuucgacaaccucaagacgcugcugucccuccgggaggugcgcaccaucaaggucuucaccaccguggacaacaucaaccugcacacgcagguggucgacaugagcaugaccuacggccagcaguucggccccaccuaccuggacggggccgacgugaccaagaucaagccccacaacucccacgagggcaagacguucuacgugcucccgaacgacgacacccugcgggucgaggccuucgaguacuaccacaccaccgaccccagcuuccuggggcgcuacauguccgcccucaaccacacgaagaaguggaaguacccccaggugaacggccugaccagcaucaagugggccgacaacaacugcuaccuggcgaccgcccuccugacccugcagcagaucgagcucaaguucaaccccccggcccugcaggacgccuacuaccgggcgcgcgccggggaggccgccaacuucugcgcccugauccucgcguacugcaacaagacggugggcgagcugggcgacguccgggagaccauguccuaccuguuccagcacgccaaccucgacagcugcaagcgcgugcugaacgucgugugcaagaccugcgggcagcagcagaccacccugaagggcguggaggccgucauguacauggggacgcucuccuacgagcaguucaagaagggcgugcagauccccugcaccugcgggaagcaggccaccaaguaccuggugcagcaggagagccccuucgucaugauguccgcccccccggcgcaguacgagcugaagcacggcaccuucacgugcgccagcgaguacaccggcaacuaccagugcgggcacuacaagcacaucaccuccaaggagacccucuacugcaucgacggcgcccugcugacgaagagcagcgaguacaaggggcccaucaccgacguguucuacaaggagaacuccuacaccaccacgaucaagcccgugaccuacaagcucgacggcgucgugugcaccgagaucgaccccaagcuggacaacuacuacaagaaggacaacagcuacuucaccgagcagccgaucgaccuggugcccaaccagcccuaccccaacgccuccuucgacaacuucaaguucgucugcgacaacaucaaguucgccgacgaccucaaccagcugacgggguacaagaagccggcgagccgggagcugaaggugaccuucuuccccgaccucaacggcgacguggucgccaucgacuacaagcacuacacccccuccuucaagaagggcgccaagcugcugcacaagcccaucguguggcacgugaacaacgccaccaacaaggcgacguacaagccgaacaccuggugcauccgcugccucuggagcaccaagcccgucgagaccuccaacagcuucgacgugcugaaguccgaggacgcccaggggauggacaaccuggccugcgaggaccucaagcccgugagcgaggaggucguggagaaccccacgauccagaaggacgugcuggagugcaacgucaagaccaccgagguggugggcgacaucauccugaagccggccaacaacucccucaagaucaccgaggaggucgggcacacggaccugauggccgcguacguggacaacagcucccugaccaucaagaagcccaacgagcucagccgcgugcugggccugaagacccucgccacccacgggcuggccgccgucaacuccgugcccugggacacgaucgccaacuacgcgaagccguuccugaacaagguggucagcaccaccaccaacaucgugacgcggugccucaaccgcgugugcaccaacuacaugcccuacuucuucacccugcugcuccagcugugcaccuucacccgguccacgaacagccgcaucaaggccuccaugcccaccaccaucgccaagaacaccgucaagagcgugggcaaguucugccuggaggccagcuucaacuaccucaagucccccaacuucagcaagcugaucaacaucaucaucugguuccugcuccuguccgugugccugggcagccucaucuacuccacggccgcgcuggggguccugaugagcaaccucggcaugccguccuacugcaccggguaccgggagggcuaccugaacagcaccaacgugaccaucgccacguacugcaccggcuccauccccugcagcgugugccuguccgggcucgacagccuggacaccuaccccucccuggagaccauccagaucacgaucagcuccuucaagugggaccucaccgccuucggccuggucgccgagugguuccuggccuacauccucuucacccgcuucuucuacgugcuggggcuggcggccaucaugcagcucuucuucagcuacuucgccgugcacuucaucuccaacagcuggcugauguggcugaucaucaaccugguccagauggcccccaucuccgcgauggugcggauguacaucuucuucgccagcuucuacuacguguggaagagcuacguccacgugguggacggcugcaacuccagcaccugcaugaugugcuacaagcgcaaccgggccacgcgcgucgagugcaccaccaucgugaacgggguccggcgcuccuucuacguguacgccaacggcggcaagggguucugcaagcuccacaacuggaacugcgugaacugcgacaccuucugcgccggcagcacguucaucuccgacgaggucgcgcgggaccugagccugcaguucaagcgcccgaucaaccccaccgaccaguccagcuacaucguggacuccgugaccgucaagaacgggagcauccaccucuacuucgacaaggccggccagaagaccuacgagcggcacucccugagccacuucgugaaccuggacaaccuccgcgccaacaacacgaaggggucccugcccaucaacgugaucgucuucgacggcaagagcaagugcgaggaguccagcgccaaguccgccagcguguacuacucccagcugaugugccagcccauccuccugcuggaccaggcgcucgugagcgacgucggcgacagcgccgagguggccgugaagauguucgacgccuacgucaacaccuucuccagcaccuucaacgugccgauggagaagcugaagacccugguggccacggcggaggccgagcucgccaagaacgucucccuggacaacgugcugagcaccuucaucuccgccgcgcggcagggguucguggacagcgacgucgagaccaaggacgugguggagugccucaagcugucccaccagagcgacaucgaggucaccggcgacuccugcaacaacuacaugcugacguacaacaagguggagaacaugaccccccgcgaccucggggccugcaucgacugcagcgcccggcacaucaacgcccagguggccaagucccacaacaucgcgcugaucuggaacgucaaggacuucaugagccuguccgagcagcuccgcaagcagauccgcagcgccgccaagaagaacaaccugcccuucaagcugaccugcgccaccacgcggcagguggugaacgucgugaccaccaagaucgcccucaagggcggguga

SEQ ID NO: 18063 - RNA, 5841 nt, Artificial Sequence
  SARS-CoV-2__MT642144.1__non-structural protein 3 (NSP3) CDS gc
auggcccccaccaaggugaccuucggcgacgacacggucaucgaggugcagggguacaagagcgugaacaucaccuucgagcuggacgagcgcaucgacaagguccucaacgagaagugcuccgccuacaccguggagcugggcaccgaggugaacgaguucgcgugcgucguggccgacgccgugaucaagacgcugcagccggucagcgagcuccugaccccccuggggaucgaccucgacgagugguccauggccaccuacuaccuguucgacgagagcggcgaguucaagcuggccucccacauguacugcagcuucuacccccccgacgaggacgaggaggagggggacugcgaggaggaggaguucgagccguccacccaguacgaguacggcacggaggacgacuaccagggcaagccccucgaguucggggcgaccagcgccgcccugcagcccgaggaggagcaggaggaggacuggcuggacgacgacucccagcagaccgugggccagcaggacgggagcgaggacaaccagaccacgaccauccagaccaucguggagguccagccccagcucgagaccgagcugacgccgguggugcagaccaucgaggucaacuccuucagcggcuaccugaagcucaccgacaacguguacaucaagaacgccgacaucguggaggaggcgaagaaggucaagcccaccgugguggucaacgccgccaacguguaccugaagcacgggggcggcguggccggggcccugaacaaggcgacgaacaacgccaugcaggucgaguccgacgacuacaucgccaccaacggcccccucaagguggggggcagcugcguccuguccggccacaaccuggccaagcacugccuccacgugguggggcccaacgucaacaagggcgaggacauccagcugcugaagagcgccuacgagaacuucaaccagcacgaggugcuccuggcgccgcugcucuccgccgggaucuucggcgccgaccccauccacagccugcgggugugcgucgacaccgugcgcaccaacguguaccuggccgucuucgacaagaaccucuacgacaagcugguguccagcuuccuggagaugaagagcgagaagcagguggagcagaagaucgccgagauccccaaggaggaggucaagcccuucaucacggaguccaagccgagcguggagcagcggaagcaggacgacaagaagaucaaggcgugcguggaggaggucaccaccacccucgaggagacgaaguuccugaccgagaaccugcuccuguacaucgacaucaacgggaaccugcaccccgacuccgccacccucgugagcgacaucgacaucaccuuccugaagaaggacgcccccuacaucgugggcgacgucgugcaggagggcgugcugacggccgucgugauccccaccaagaaggccgggggcaccaccgagaugcucgcgaaggcccugcgcaaggugccgacggacaacuacaucaccaccuaccccgggcagggccugaacggguacaccgucgaggaggccaagaccgugcucaagaagugcaaguccgccuucuacauccugcccagcaucaucuccaacgagaagcaggagauccugggcacggugagcuggaaccuccgggagaugcuggcgcacgccgaggagacccgcaagcugaugcccgucugcguggagaccaaggccaucguguccaccauccagcggaaguacaagggcaucaagauccaggagggggucguggacuacggcgcccgcuucuacuucuacacgagcaagaccaccguggccucccugaucaacacccucaacgaccugaacgagacgcuggucaccaugccgcucggguacgugacccacggccugaaccuggaggaggcggcccgguacaugcgcagccucaaggugcccgccaccgucuccgugagcucccccgacgccgugacggccuacaacggguaccugaccagcuccagcaagacccccgaggagcgguucaucgagaccaucucccuggcgggcagcuacaaggacuggagcuacuccggccagagcacgcagcucgggaucgaguuccugaagcgcggcgacaaguccgucuacuacaccagcaacccgaccaccuuccaccuggacggggaggugaucacguucgacaaccucaagacccugcugucccuccgggaggugcgcaccaucaaggucuucaccacgguggacaacaucaaccugcacacccagguggucgacaugagcaugaccuacggccagcaguucggccccaccuaccuggacggggccgacgugacgaagaucaagccccacaacucccacgagggcaagaccuucuacgugcucccgaacgacgacacccugcgggucgaggccuucgaguacuaccacaccacggaccccagcuuccuggggcgcuacauguccgcccucaaccacaccaagaaguggaaguacccccaggugaacggccugaccagcaucaagugggccgacaacaacugcuaccuggcgaccgcccuccugacgcugcagcagaucgagcucaaguucaaccccccggcccugcaggacgccuacuaccgggcgcgcgccggggaggccgccaacuucugcgcccugauccucgcguacugcaacaagaccgugggcgagcugggcgacguccgggagaccauguccuaccuguuccagcacgccaaccucgacagcugcaagcgcgugcugaacgucgugugcaagaccugcgggcagcagcagaccacgcugaagggcguggaggccgucauguacauggggacccucuccuacgagcaguucaagaagggcgugcagauccccugcaccugcgggaagcaggccaccaaguaccuggugcagcaggagagccccuucgucaugauguccgcccccccggcgcaguacgagcugaagcacggcacguucaccugcgccagcgaguacaccggcaacuaccagugcgggcacuacaagcacaucaccuccaaggagacgcucuacugcaucgacggcgcccugcugaccaagagcagcgaguacaaggggcccaucaccgacguguucuacaaggagaacuccuacaccacgaccaucaagcccgugaccuacaagcucgacggcgucgugugcaccgagaucgaccccaagcuggacaacuacuacaagaaggacaacagcuacuucacggagcagccgaucgaccuggugcccaaccagcccuaccccaacgccuccuucgacaacuucaaguucgucugcgacaacaucaaguucgccgacgaccucaaccagcugaccggguacaagaagccggcgagccgggagcugaaggugaccuucuuccccgaccucaacggcgacguggucgccaucgacuacaagcacuacacccccuccuucaagaagggcgccaagcugcugcacaagcccaucguguggcacgugaacaacgccacgaacaaggcgaccuacaagccgaacaccuggugcauccgcugccucuggagcaccaagcccgucgagacguccaacagcuucgacgugcugaaguccgaggacgcccaggggauggacaaccuggccugcgaggaccucaagcccgugagcgaggaggucguggagaaccccaccauccagaaggacgugcuggagugcaacgucaagaccaccgagguggugggcgacaucauccugaagccggccaacaacucccucaagaucacggaggaggucgggcacaccgaccugauggccgcguacguggacaacagcucccugaccaucaagaagcccaacgagcucagccgcgugcugggccugaagacccucgccacgcacgggcuggccgccgucaacuccgugcccugggacaccaucgccaacuacgcgaagccguuccugaacaagguggucagcaccaccacgaacaucgugacccggugccucaaccgcgugugcaccaacuacaugcccuacuucuucacccugcugcuccagcugugcaccuucacgcgguccaccaacagccgcaucaaggccuccaugcccaccaccaucgccaagaacacggucaagagcgugggcaaguucugccuggaggccagcuucaacuaccucaagucccccaacuucagcaagcugaucaacaucaucaucugguuccugcuccuguccgugugccugggcagccucaucuacuccaccgccgcgcuggggguccugaugagcaaccucggcaugccguccuacugcaccggguaccgggagggcuaccugaacagcaccaacgugacgaucgccaccuacugcaccggcuccauccccugcagcgugugccuguccgggcucgacagccuggacaccuaccccucccuggagacgauccagaucaccaucagcuccuucaagugggaccucaccgccuucggccuggucgccgagugguuccuggccuacauccucuucacccgcuucuucuacgugcuggggcuggcggccaucaugcagcucuucuucagcuacuucgccgugcacuucaucuccaacagcuggcugauguggcugaucaucaaccugguccagauggcccccaucuccgcgauggugcggauguacaucuucuucgccagcuucuacuacguguggaagagcuacguccacgugguggacggcugcaacuccagcacgugcaugaugugcuacaagcgcaaccgggccacccgcgucgagugcaccaccaucgugaacgggguccggcgcuccuucuacguguacgccaacggcggcaagggguucugcaagcuccacaacuggaacugcgugaacugcgacacguucugcgccggcagcaccuucaucuccgacgaggucgcgcgggaccugagccugcaguucaagcgcccgaucaaccccaccgaccaguccagcuacaucguggacuccgugaccgucaagaacgggagcauccaccucuacuucgacaaggccggccagaagacguacgagcggcacucccugagccacuucgugaaccuggacaaccuccgcgccaacaacaccaaggggucccugcccaucaacgugaucgucuucgacggcaagagcaagugcgaggaguccagcgccaaguccgccagcguguacuacucccagcugaugugccagcccauccuccugcuggaccaggcgcucgugagcgacgucggcgacagcgccgagguggccgugaagauguucgacgccuacgucaacaccuucuccagcaccuucaacgugccgauggagaagcugaagacgcugguggccaccgcggaggccgagcucgccaagaacgucucccuggacaacgugcugagcaccuucaucuccgccgcgcggcagggguucguggacagcgacgucgagaccaaggacgugguggagugccucaagcugucccaccagagcgacaucgaggucacgggcgacuccugcaacaacuacaugcugaccuacaacaagguggagaacaugaccccccgcgaccucggggccugcaucgacugcagcgcccggcacaucaacgcccagguggccaagucccacaacaucgcgcugaucuggaacgucaaggacuucaugagccuguccgagcagcuccgcaagcagauccgcagcgccgccaagaagaacaaccugcccuucaagcugaccugcgccacgacccggcagguggugaacgucgugaccaccaagaucgcccucaagggcggguga

SEQ ID NO: 18064 - RNA, 5841 nt, Artificial Sequence
  SARS-CoV-2__MT642158.1__non-structural protein 3 (NSP3) CDS gc
auggcccccaccaaggugaccuucggcgacgacacggucaucgaggugcagggguacaagagcgugaacaucaccuucgagcuggacgagcgcaucgacaagguccucaacgagaagugcuccgccuacaccguggagcugggcaccgaggugaacgaguucgcgugcgucguggccgacgccgugaucaagacgcugcagccggucagcgagcuccugaccccccuggggaucgaccucgacgagugguccauggccaccuacuaccuguucgacgagagcggcgaguucaagcuggccucccacauguacugcagcuucuacccccccgacgaggacgaggaggagggggacugcgaggaggaggaguucgagccguccacccaguacgaguacggcacggaggacgacuaccagggcaagccccucgaguucggggcgaccagcgccgcccugcagcccgaggaggagcaggaggaggacuggcuggacgacgacucccagcagaccgugggccagcaggacgggagcgaggacaaccagaccacgaccauccagaccaucguggagguccagccccagcucgagauggagcugaccccgguggugcagacgaucgaggucaacuccuucagcggcuaccugaagcucaccgacaacguguacaucaagaacgccgacaucguggaggaggcgaagaaggucaagcccaccgugguggucaacgccgccaacguguaccugaagcacgggggcggcguggccggggcccugaacaaggcgaccaacaacgccaugcaggucgaguccgacgacuacaucgccacgaacggcccccucaagguggggggcagcugcguccuguccggccacaaccuggccaagcacugccuccacgugguggggcccaacgucaacaagggcgaggacauccagcugcugaagagcgccuacgagaacuucaaccagcacgaggugcuccuggcgccgcugcucuccgccgggaucuucggcgccgaccccauccacagccugcgggugugcgucgacaccgugcgcaccaacguguaccuggccgucuucgacaagaaccucuacgacaagcugguguccagcuuccuggagaugaagagcgagaagcagguggagcagaagaucgccgagauccccaaggaggaggucaagcccuucaucaccgaguccaagccgagcguggagcagcggaagcaggacgacaagaagaucaaggcgugcguggaggaggucacgaccacccucgaggagaccaaguuccugacggagaaccugcuccuguacaucgacaucaacgggaaccugcaccccgacuccgccacccucgugagcgacaucgacaucaccuuccugaagaaggacgcccccuacaucgugggcgacgucgugcaggagggcgugcugaccgccgucgugauccccacgaagaaggccgggggcaccaccgagaugcucgcgaaggcccugcgcaaggugccgaccgacaacuacaucacgaccuaccccgggcagggccugaacggguacaccgucgaggaggccaagaccgugcucaagaagugcaaguccgccuucuacauccugcccagcaucaucuccaacgagaagcaggagauccugggcaccgugagcuggaaccuccgggagaugcuggcgcacgccgaggagacgcgcaagcugaugcccgucugcguggagaccaaggccaucguguccaccauccagcggaaguacaagggcaucaagauccaggagggggucguggacuacggcgcccgcuucuacuucuacaccagcaagacgaccguggccucccugaucaacacccucaacgaccugaacgagacccuggucacgaugccgcucggguacgugacccacggccugaaccuggaggaggcggcccgguacaugcgcagccucaaggugcccgccaccgucuccgugagcucccccgacgccgugaccgccuacaacggguaccugacgagcuccagcaagacccccgaggagcacuucaucgagaccaucucccuggcgggcagcuacaaggacuggagcuacuccggccagagcacccagcucgggaucgaguuccugaagcggggcgacaaguccgucuacuacacgagcaacccgaccaccuuccaccuggacggggaggugaucaccuucgacaaccucaagacgcugcugucccuccgcgaggugcggaccaucaaggucuucaccaccguggacaacaucaaccugcacacgcagguggucgacaugagcaugaccuacggccagcaguucggccccaccuaccuggacggggccgacgugaccaagaucaagccccacaacucccacgagggcaagacguucuacgugcucccgaacgacgacacccugcgcgucgaggccuucgaguacuaccacaccaccgaccccagcuuccuggggcgguacauguccgcccucaaccacacgaagaaguggaaguacccccaggugaacggccugaccagcaucaagugggccgacaacaacugcuaccuggcgaccgcccuccugacccugcagcagaucgagcucaaguucaaccccccggcccugcaggacgccuacuaccgcgcgcgggccggggaggccgccaacuucugcgcccugauccucgcguacugcaacaagacggugggcgagcugggcgacguccgcgagaccauguccuaccuguuccagcacgccaaccucgacagcugcaagcgggugcugaacgucgugugcaagaccugcgggcagcagcagaccacccugaagggcguggaggccgucauguacauggggacgcucuccuacgagcaguucaagaagggcgugcagauccccugcaccugcgggaagcaggccaccaaguaccuggugcagcaggagagccccuucgucaugauguccgcccccccggcgcaguacgagcugaagcacggcaccuucacgugcgccagcgaguacaccggcaacuaccagugcgggcacuacaagcacaucaccuccaaggagacccucuacugcaucgacggcgcccugcugacgaagagcagcgaguacaaggggcccaucaccgacguguucuacaaggagaacuccuacaccaccacgaucaagcccgugaccuacaagcucgacggcgucgugugcaccgagaucgaccccaagcuggacaacuacuacaagaaggacaacagcuacuucaccgagcagccgaucgaccuggugcccaaccagcccuaccccaacgccuccuucgacaacuucaaguucgucugcgacaacaucaaguucgccgacgaccucaaccagcugacgggguacaagaagccggcgagccgcgagcugaaggugaccuucuuccccgaccucaacggcgacguggucgccaucgacuacaagcacuacacccccuccuucaagaagggcgccaagcugcugcacaagcccaucguguggcacgugaacaacgccaccaacaaggcgacguacaagccgaacaccuggugcauccggugccucuggagcaccaagcccgucgagaccuccaacagcuucgacgugcugaaguccgaggacgcccaggggauggacaaccuggccugcgaggaccucaagcccgugagcgaggaggucguggagaaccccacgauccagaaggacgugcuggagugcaacgucaagaccaccgagguggugggcgacaucauccugaagccggccaacaacucccucaagaucaccgaggaggucgggcacacggaccugauggccgcguacguggacaacagcucccugaccaucaagaagcccaacgagcucagccgcgugcugggccugaagacccucgccacccacgggcuggccgccgucaacuccgugcccugggacacgaucgccaacuacgcgaagccguuccugaacaagguggucagcaccaccaccaacaucgugacgcgcugccucaaccgggugugcaccaacuacaugcccuacuucuucacccugcugcuccagcugugcaccuucacccgcuccacgaacagccggaucaaggccuccaugcccaccaccaucgccaagaacaccgucaagagcgugggcaaguucugccuggaggccagcuucaacuaccucaagucccccaacuucagcaagcugaucaacaucaucaucugguuccugcuccuguccgugugccugggcagccucaucuacuccacggccgcgcuggggguccugaugagcaaccucggcaugccguccagcugcaccggguaccgcgagggcuaccugaacuccaccaacgugaccaucgccacguacugcaccggcagcauccccugcuccgugugccugagcgggcucgacucccuggacaccuaccccagccuggagaccauccagaucacgaucuccagcuucaagugggaccucaccgccuucggccuggucgccgagugguuccuggccuacauccucuucacccgguucuucuacgugcuggggcuggcggccaucaugcagcucuucuucuccuacuucgccgugcacuucaucagcaacuccuggcugauguggcugaucaucaaccugguccagauggcccccaucagcgcgauggugcgcauguacaucuucuucgccagcuucuacuacguguggaaguccuacguccacgugguggacggcugcaacagcuccaccugcaugaugugcuacaagcggaaccgcgccacgcgggucgagugcaccaccaucgugaacgggguccgccggagcuucuacguguacgccaacggcggcaagggguucugcaagcuccacaacuggaacugcgugaacugcgacaccuucugcgccggcuccacguucaucagcgacgaggucgcgcgcgaccugucccugcaguucaagcggccgaucaaccccaccgaccagagcuccuacaucguggacagcgugaccgucaagaacggguccauccaccucuacuucgacaaggccggccagaagaccuacgagcgccacagccugucccacuucgugaaccuggacaaccuccgggccaacaacacgaaggggagccugcccaucaacgugaucgucuucgacggcaaguccaagugcgaggagagcuccgccaagagcgccuccguguacuacagccagcugaugugccagcccauccuccugcuggaccaggcgcucgugagcgacgucggcgacuccgccgagguggccgugaagauguucgacgccuacgucaacaccuucagcuccaccuucaacgugccgauggagaagcugaagacccugguggccacggcggaggccgagcucgccaagaacgucagccuggacaacgugcuguccaccuucaucagcgccgcgcgccagggguucguggacuccgacgucgagaccaaggacgugguggagugccucaagcugagccaccaguccgacaucgaggucaccggcgacagcugcaacaacuacaugcugacguacaacaagguggagaacaugaccccccgggaccucggggccugcaucgacugcuccgcccgccacaucaacgcccagguggccaagagccacaacaucgcgcugaucuggaacgucaaggacuucaugucccugagcgagcagcuccggaagcagauccgcuccgccgccaagaagaacaaccugcccuucaagcugaccugcgccaccacgcgccagguggugaacgucgugaccaccaagaucgcccucaagggcggguga

SEQ ID NO: 18065 - RNA, 5841 nt, Artificial Sequence
  SARS-CoV-2__MT642161.1__non-structural protein 3 (NSP3) CDS gc
auggcccccaccaaggugaccuucggcgacgacacggucaucgaggugcagggguacaagagcgugaacaucaccuucgagcuggacgagcgcaucgacaagguccucaacgagaagugcuccgccuacaccguggagcugggcaccgaggugaacgaguucgcgugcgucguggccgacgccgugaucaagacgcugcagccggucagcgagcuccugaccccccuggggaucgaccucgacgagugguccauggccaccuacuaccuguucgacgagagcggcgaguucaagcuggccucccacauguacugcagcuucuacccccccgacgaggacgaggaggagggggacugcgaggaggaggaguucgagccguccacccaguacgaguacggcacggaggacgacuaccagggcaagccccucgaguucggggcgaccagcgccgcccugcagcccgaggaggagcaggaggaggacuggcuggacgacgacucccagcagaccgugggccagcaggacgggagcgaggacaaccagaccacgaccauccagaccaucguggagguccagccccagcucgagauggagcugaccccgguggugcagacgaucgaggucaacuccuucagcggcuaccugaagcucaccgacaacguguacaucaagaacgccgacaucguggaggaggcgaagaaggucaagcccaccgugguggucaacgccgccaacguguaccugaagcacgggggcggcguggccggggcccugaacaaggcgaccaacaacgccaugcaggucgaguccgacgacuacaucgccacgaacggcccccucaagguggggggcagcugcguccuguccggccacaaccuggccaagcacugccuccacgugguggggcccaacgucaacaagggcgaggacauccagcugcugaagagcgccuacgagaacuucaaccagcacgaggugcuccuggcgccgcugcucuccgccgggaucuucggcgccgaccccauccacagccugcgggugugcgucgacaccgugcgcaccaacguguaccuggccgucuucgacaagaaccucuacgacaagcugguguccagcuuccuggagaugaagagcgagaagcagguggagcagaagaucgccgagauccccaaggaggaggucaagcccuucaucaccgaguccaagccgagcguggagcagcggaagcaggacgacaagaagaucaaggcgugcguggaggaggucacgaccacccucgaggagaccaaguuccugacggagaaccugcuccuguacaucgacaucaacgggaaccugcaccccgacuccgccacccucgugagcgacaucgacaucaccuuccugaagaaggacgcccccuacaucgugggcgacgucgugcaggagggcgugcugaccgccgucgugauccccacgaagaaggccgggggcaccaccgagaugcucgcgaaggcccugcgcaaggugccgaccgacaacuacaucacgaccuaccccgggcagggccugaacggguacaccgucgaggaggccaagaccgugcucaagaagugcaaguccgccuucuacauccugcccagcaucaucuccaacgagaagcaggagauccugggcaccgugagcuggaaccuccgggagaugcuggcgcacgccgaggagacgcgcaagcugaugcccgucugcguggagaccaaggccaucguguccaccauccagcggaaguacaagggcaucaagauccaggagggggucguggacuacggcgcccgcuucuacuucuacaccagcaagacgaccguggccucccugaucaacacccucaacgaccugaacgagacccuggucacgaugccgcucggguacgugacccacggccugaaccuggaggaggcggcccgguacaugcgcagccucaaggugcccgccaccgucuccgugagcucccccgacgccgugaccgccuacaacggguaccugacgagcuccagcaagacccccgaggagcacuucaucgagaccaucucccuggcgggcagcuacaaggacuggagcuacuccggccagagcacccagcucgggaucgaguuccugaagcggggcgacaaguccgucuacuacacgagcaacccgaccaccuuccaccuggacggggaggugaucaccuucgacaaccucaagacgcugcugucccuccgcgaggugcggaccaucaaggucuucaccaccguggacaacaucaaccugcacacgcagguggucgacaugagcaugaccuacggccagcaguucggccccaccuaccuggacggggccgacgugaccaagaucaagccccacaacucccacgagggcaagacguucuacgugcucccgaacgacgacacccugcgcgucgaggccuucgaguacuaccacaccaccgaccccagcuuccuggggcgguacauguccgcccucaaccacacgaagaaguggaaguacccccaggugaacggccugaccagcaucaagugggccgacaacaacugcuaccuggcgaccgcccuccugacccugcagcagaucgagcucaaguucaaccccccggcccugcaggacgccuacuaccgcgcgcgggccggggaggccgccaacuucugcgcccugauccucgcguacugcaacaagacggugggcgagcugggcgacguccgcgagaccauguccuaccuguuccagcacgccaaccucgacagcugcaagcgggugcugaacgucgugugcaagaccugcgggcagcagcagaccacccugaagggcguggaggccgucauguacauggggacgcucuccuacgagcaguucaagaagggcgugcagauccccugcaccugcgggaagcaggccaccaaguaccuggugcagcaggagagccccuucgucaugauguccgcccccccggcgcaguacgagcugaagcacggcaccuucacgugcgccagcgaguacaccggcaacuaccagugcgggcacuacaagcacaucaccuccaaggagacccucuacugcaucgacggcgcccugcugacgaagagcagcgaguacaaggggcccaucaccgacguguucuacaaggagaacuccuacaccaccacgaucaagcccgugaccuacaagcucgacggcgucgugugcaccgagaucgaccccaagcuggacaacuacuacaagaaggacaacagcuacuucaccgagcagccgaucgaccuggugcccaaccagcccuaccccaacgccuccuucgacaacuucaaguucgucugcgacaacaucaaguucgccgacgaccucaaccagcugacgggguacaagaagccggcgagccgcgagcugaaggugaccuucuuccccgaccucaacggcgacguggucgccaucgacuacaagcacuacacccccuccuucaagaagggcgccaagcugcugcacaagcccaucguguggcacgugaacaacgccaccaacaaggcgacguacaagccgaacaccuggugcauccggugccucuggagcaccaagcccgucgagaccuccaacagcuucgacgugcugaaguccgaggacgcccaggggauggacaaccuggccugcgaggaccucaagcccgugagcgaggaggucguggagaaccccacgauccagaaggacgugcuggagugcaacgucaagaccaccgagguggugggcgacaucauccugaagccggccaacaacucccucaagaucaccgaggaggucgggcacacggaccugauggccgcguacguggacaacagcucccugaccaucaagaagcccaacgagcucagccgcgugcugggccugaagacccucgccacccacgggcuggccgccgucaacuccgugcccugggacacgaucgccaacuacgcgaagccguuccugaacaagguggucagcaccaccaccaacaucgugacgcgcugccucaaccgggugugcaccaacuacaugcccuacuucuucacccugcugcuccagcugugcaccuucacccgcuccacgaacagccggaucaaggccuccaugcccaccaccaucgccaagaacaccgucaagagcgugggcaaguucugccuggaggccagcuucaacuaccucaagucccccaacuucagcaagcugaucaacaucaucaucugguuccugcuccuguccgugugccugggcagccucaucuacuccacggccgcgcuggggguccugaugagcaaccucggcaugccguccuacugcaccggguaccgcgagggcuaccugaacagcaccaacgugaccaucgccacguacugcaccggcuccauccccugcagcgugugccuguccgggcucgacagccuggacaccuaccccucccuggagaccauccagaucacgaucagcuccuucaagugggaccucaccgccuucggccuggucgccgagugguuccuggccuacauccucuucacccgguucuucuacgugcuggggcuggcggccaucaugcagcucuucuucagcuacuucgccgugcacuucaucuccaacagcuggcugauguggcugaucaucaaccugguccagauggcccccaucuccgcgauggugcgcauguacaucuucuucgccagcuucuacuacguguggaagagcuacguccacgugguggacggcugcaacuccagcaccugcaugaugugcuacaagcggaaccgcgccacgcgggucgagugcaccaccaucgugaacgggguccgccgguccuucuacguguacgccaacggcggcaagggguucugcaagcuccacaacuggaacugcgugaacugcgacaccuucugcgccggcagcacguucaucuccgacgaggucgcgcgcgaccugagccugcaguucaagcggccgaucaaccccaccgaccaguccagcuacaucguggacuccgugaccgucaagaacgggagcauccaccucuacuucgacaaggccggccagaagaccuacgagcgccacucccugagccacuucgugaaccuguacaaccuccgggccaacaacacgaaggggucccugcccaucaacgugaucgucuucgacggcaagagcaagugcgaggaguccagcgccaaguccgccagcguguacuacucccagcugaugugccagcccauccuccugcuggaccaggcgcucgugagcgacgucggcgacagcgccgagguggccgugaagauguucgacgccuacgucaacaccuucuccagcaccuucaacgugccgauggagaagcugaagacccugguggccacggcggaggccgagcucgccaagaacgucucccuggacaacgugcugagcaccuucaucuccgccgcgcgccagggguucguggacagcgacgucgagaccaaggacgugguggagugccucaagcugucccaccagagcgacaucgaggucaccggcgacuccugcaacaacuacaugcugacguacaacaagguggagaacaugaccccccgggaccucggggccugcaucgacugcagcgcccgccacaucaacgcccagguggccaagucccacaacaucgcgcugaucuggaacgucaaggacuucaugagccuguccgagcagcuccggaagcagauccgcagcgccgccaagaagaacaaccugcccuucaagcugaccugcgccaccacgcgccagguggugaacgucgugaccaccaagaucgcccucaagggcggguga

SEQ ID NO: 18066 - RNA, 5841 nt, Artificial Sequence
  SARS-CoV-2__MT642173.1__non-structural protein 3 (NSP3) CDS gc
auggcccccaccaaggugaccuucggcgacgacacggucaucgaggugcagggguacaagagcgugaacaucaccuucgagcuggacgagcgcaucgacaagguccucaacgagaagugcuccgccuacaccguggagcugggcaccgaggugaacgaguucgcgugcgucguggccgacgccgugaucaagacgcugcagccggucagcgagcuccugaccccccuggggaucgaccucgacgagugguccauggccaccuacuaccuguucgacgagagcggcgaguucaagcuggccucccacauguacugcagcuucuacccccccgacgaggacgaggaggagggggacugcgaggaggaggaguucgagccguccacccaguacgaguacggcacggaggacgacuaccagggcaagccccucgaguucggggcgaccagcgccgcccugcagcccgaggaggagcaggaggaggacuggcuggacgacgacucccagcagaccgugggccagcaggacgggagcgaggacaaccagaccacgaccauccagaccaucguggagguccagccccagcucgagauggagcugaccccgguggugcagacgaucgaggucaacuccuucagcggcuaccugaagcucaccgacaacguguacaucaagaacgccgacaucguggaggaggcgaagaaggucaagcccaccgugguggucaacgccgccaacguguaccugaagcacgggggcggcguggccggggcccugaacaaggcgaccaacaacgccaugcaggucgaguccgacgacuacaucgccacgaacggcccccucaagguggggggcagcugcguccuguccggccacaaccuggccaagcacugccuccacgugguggggcccaacgucaacaagggcgaggacauccagcugcugaagagcgccuacgagaacuucaaccagcacgaggugcuccuggcgccgcugcucuccgccgggaucuucggcgccgaccccauccacagccugcgggugugcgucgacaccgugcgcaccaacguguaccuggccgucuucgacaagaaccucuacgacaagcugguguccagcuuccuggagaugaagagcgagaagcagguggagcagaagaucgccgagauccccaaggaggaggucaagcccuucaucaccgaguccaagccgagcguggagcagcggaagcaggacgacaagaagaucaaggcgugcguggaggaggucacgaccacccucgaggagaccaaguuccugacggagaaccugcuccuguacaucgacaucaacgggaaccugcaccccgacuccgccacccucgugagcgacaucgacaucaccuuccugaagaaggacgcccccuacaucgugggcgacgucgugcaggagggcgugcugaccgccgucgugauccccacgaagaaggccgggggcaccaccgagaugcucgcgaaggcccugcgcaaggugccgaccgacaacuacaucacgaccuaccccgggcagggccugaacggguacaccgucgaggaggccaagaccgugcucaagaagugcaaguccgccuucuacauccugcccagcaucaucuccaacgagaagcaggagauccugggcaccgugagcuggaaccuccgggagaugcuggcgcacgccgaggagacgcgcaagcugaugcccgucugcguggagaccaaggccaucguguccaccauccagcggaaguacaagggcaucaagauccaggagggggucguggacuacggcgcccgcuucuacuucuacaccagcaagacgaccguggccucccugaucaacacccucaacgaccugaacgagacccuggucacgaugccgcucggguacgugacccacggccugaaccuggaggaggcggcccgguacaugcgcagccucaaggugcccgccaccgucuccgugagcucccccgacgccgugaccgccuacaacggguaccugacgagcuccagcaagacccccgaggagcacuucaucgagaccaucucccuggcgggcagcuacaaggacuggagcuacuccggccagagcacccagcucgggaucgaguuccugaagcggggcgacaaguccgucuacuacacgagcaacccgaccaccuuccaccuggacggggaggugaucaccuucgacaaccucaagacgcugcugucccuccgcgaggugcggaccaucaaggucuucaccaccguggacaacaucaaccugcacacgcagguggucgacaugagcaugaccuacggccagcaguucggccccaccuaccuggacggggccgacgugaccaagaucaagccccacaacucccacgagggcaagacguucuacgugcucccgaacgacgacacccugcgcgucgaggccuucgaguacuaccacaccaccgaccccagcuuccuggggcgguacauguccgcccucaaccacacgaagaaguggaaguacccccaggugaacggccugaccagcaucaagugggccgacaacaacugcuaccuggcgaccgcccuccugacccugcagcagaucgagcucaaguucaaccccccggcccugcaggacgccuacuaccgcgcgcgggccggggaggccgccaacuucugcgcccugauccucgcguacugcaacaagacggugggcgagcugggcgacguccgcgagaccauguccuaccuguuccagcacgccaaccucgacagcugcaagcgggugcugaacgucgugugcaagaccugcgggcagcagcagaccacccugaagggcguggaggccgucauguacauggggacgcucuccuacgagcaguucaagaagggcgugcagauccccugcaccugcgggaagcaggccaccaaguaccuggugcagcaggagagccccuucgucaugauguccgcccccccggcgcaguacgagcugaagcacggcaccuucacgugcgccagcgaguacaccggcaacuaccagugcgggcacuacaagcacaucaccuccaaggagacccucuacugcaucgacggcgcccugcugacgaagagcagcgaguacaaggggcccaucaccgacguguucuacaaggagaacuccuacaccaccacgaucaagcccgugaccuacaagcucgacggcgucgugugcaccgagaucgaccccaagcuggacaacuacuacaagaaggacaacagcuacuucaccgagcagccgaucgaccuggugcccaaccagcccuaccccaacgccuccuucgacaacuucaaguucgucugcgacaacaucaaguucgccgacgaccucaaccagcugacgggguacaagaagccggcgagccgcgagcugaaggugaccuucuuccccgaccucaacggcgacguggucgccaucgacuacaagcacuacacccccuccuucaagaagggcgccaagcugcugcacaagcccaucguguggcacgugaacaacgccaccaacaaggcgacguacaagccgaacaccuggugcauccggugccucuggagcaccaagcccgucgagaccuccaacagcuucgacgugcugaaguccgaggacgcccaggggauggacaaccuggccugcgaggaccucaagcccgugagcgaggaggucguggagaaccccacgauccagaaggacgugcuggagugcaacgucaagaccaccgagguggugggcgacaucauccugaagccggccaacaacucccucaagaucaccgaggaggucgggcacacggaccugauggccgcguacguggacaacagcucccugaccauccgcaagcccaacgagcucagccgcgugcugggccugaagacccucgccacccacgggcuggccgccgucaacuccgugcccugggacacgaucgccaacuacgcgaagccguuccugaacaagguggucagcaccaccaccaacaucgugacgcggugccucaaccgcgugugcaccaacuacaugcccuacuucuucacccugcugcuccagcugugcaccuucacccgguccacgaacagccgcaucaaggccuccaugcccaccaccaucgccaagaacaccgucaagagcgugggcaaguucugccuggaggccagcuucaacuaccucaagucccccaacuucagcaagcugaucaacaucaucaucugguuccugcuccuguccgugugccugggcagccucaucuacuccacggccgcgcuggggguccugaugagcaaccucggcaugccguccuacugcaccggguaccgggagggcuaccugaacagcaccaacgugaccaucgccacguacugcaccggcuccauccccugcagcgugugccuguccgggcucgacagccuggacaccuaccccucccuggagaccauccagaucacgaucagcuccuucaagugggaccucaccgccuucggccuggucgccgagugguuccuggccuacauccucuucacccgcuucuucuacgugcuggggcuggcggccaucaugcagcucuucuucagcuacuucgccgugcacuucaucuccaacagcuggcugauguggcugaucaucaaccugguccagauggcccccaucuccgcgauggugcggauguacaucuucuucgccagcuucuacuacguguggaagagcuacguccacgugguggacggcugcaacuccagcaccugcaugaugugcuacaagcgcaaccgggccacgcgcgucgagugcaccaccaucgugaacgggguccggcgcuccuucuacguguacgccaacggcggcaagggguucugcaagcuccacaacuggaacugcgugaacugcgacaccuucugcgccggcagcacguucaucuccgacgaggucgcgcgggaccugagccugcaguucaagcgcccgaucaaccccaccgaccaguccagcuacaucguggacuccgugaccgucaagaacgggagcauccaccucuacuucgacaaggccggccagaagaccuacgagcggcacucccugagccacuucgugaaccuggacaaccuccgcgccaacaacacgaaggggucccugcccaucaacgugaucgucuucgacggcaagagcaagugcgaggaguccagcgccaaguccgccagcguguacuacucccagcugaugugccagcccauccuccugcuggaccaggcgcucgugagcgacgucggcgacagcgccgagguggccgugaagauguucgacgccuacgucaacaccuucuccagcaccuucaacgugccgauggagaagcugaagacccugguggccacggcggaggccgagcucgccaagaacgucucccuggacaacgugcugagcaccuucaucuccgccgcgcggcagggguucguggacagcgacgucgagaccaaggacgugguggagugccucaagcugucccaccagagcgacaucgaggucaccggcgacuccugcaacaacuacaugcugacguacaacaagguggagaacaugaccccccgcgaccucggggccugcaucgacugcagcgcccggcacaucaacgcccagguggccaagucccacaacaucgcgcugaucuggaacgucaaggacuucaugagccuguccgagcagcuccgcaagcagauccgcagcgccgccaagaagaacaaccugcccuucaagcugaccugcgccaccacgcggcagguggugaacgucgugaccaccaagaucgcccucaagggcggguga

SEQ ID NO: 18067 - RNA, 5841 nt, Artificial Sequence
  SARS-CoV-2__MT642178.1__non-structural protein 3 (NSP3) CDS gc
auggcccccaccaaggugaccuucggcgacgacacggucaucgaggugcagggguacaagagcgugaacaucaccuucgagcuggacgagcgcaucgacaagguccucaacgagaagugcuccgccuacaccguggagcugggcaccgaggugaacgaguucgcgugcgucguggccgacgccgugaucaagacgcugcagccggucagcgagcuccugaccccccuggggaucgaccucgacgagugguccauggccaccuacuaccuguucgacgagagcggcgaguucaagcuggccucccacauguacugcagcuucuacccccccgacgaggacgaggaggagggggacugcgaggaggaggaguucgagccguccacccaguacgaguacggcacggaggacgacuaccagggcaagccccucgaguucggggcgaccagcgccgcccugcagcccgaggaggagcaggaggaggacuggcuggacgacgacucccagcagaccgugggccagcaggacgggagcgaggacaaccagaccacgaccauccagaccaucguggagguccagccccagcucgagauggagcugaccccgguggugcagacgaucgaggucaacuccuucagcggcuaccugaagcucaccgacaacguguacaucaagaacgccgacaucguggaggaggcgaagaaggucaagcccaccgugguggucaacgccgccaacguguaccugaagcacgggggcggcguggccggggcccugaacaaggcgaccaacaacgccaugcaggucgaguccgacgacuacaucgccacgaacggcccccucaagguggggggcagcugcguccuguccggccacaaccuggccaagcacugccuccacgugguggggcccaacgucaacaagggcgaggacauccagcugcugaagagcgccuacgagaacuucaaccagcacgaggugcuccuggcgccgcugcucuccgccgggaucuucggcgccgaccccauccacagccugcgggugugcgucgacaccgugcgcaccaacguguaccuggccgucuucgacaagaaccucuacgacaagcugguguccagcuuccuggagaugaagagcgagaagcagguggagcagaagaucgccgagauccccaaggaggaggucaagcccuucaucaccgaguccaagccgagcguggagcagcggaagcaggacgacaagaagaucaaggcgugcguggaggaggucacgaccauccucgaggagaccaaguuccugaccgagaaccugcuccuguacaucgacaucaacgggaaccugcaccccgacuccgccacgcucgugagcgacaucgacaucaccuuccugaagaaggacgcccccuacaucgugggcgacgucgugcaggagggcgugcugaccgccgucgugauccccaccaagaaggccgggggcacgaccgagaugcucgcgaaggcccugcgcaaggugccgaccgacaacuacaucaccacguaccccgggcagggccugaacggguacaccgucgaggaggccaagaccgugcucaagaagugcaaguccgccuucuacauccugcccagcaucaucuccaacgagaagcaggagauccugggcaccgugagcuggaaccuccgggagaugcuggcgcacgccgaggagacccgcaagcugaugcccgucugcguggagacgaaggccaucguguccaccauccagcggaaguacaagggcaucaagauccaggagggggucguggacuacggcgcccgcuucuacuucuacaccagcaagaccacgguggccucccugaucaacacccucaacgaccugaacgagacccuggucaccaugccgcucggguacgugacgcacggccugaaccuggaggaggcggcccgguacaugcgcagccucaaggugcccgccaccgucuccgugagcucccccgacgccgugaccgccuacaacggguaccugaccagcuccagcaagacgcccgaggagcacuucaucgagaccaucucccuggcgggcagcuacaaggacuggagcuacuccggccagagcacccagcucgggaucgaguuccugaagcggggcgacaaguccgucuacuacaccagcaacccgacgaccuuccaccuggacggggaggugaucaccuucgacaaccucaagacccugcugucccuccgcgaggugcggacgaucaaggucuucaccaccguggacaacaucaaccugcacacccagguggucgacaugagcaugacguacggccagcaguucggccccaccuaccuggacggggccgacgugaccaagaucaagccccacaacucccacgagggcaagaccuucuacgugcucccgaacgacgacacgcugcgcgucgaggccuucgaguacuaccacaccaccgaccccagcuuccuggggcgguacauguccgcccucaaccacaccaagaaguggaaguacccccaggugaacggccugacgagcaucaagugggccgacaacaacugcuaccuggcgaccgcccuccugacccugcagcagaucgagcucaaguucaaccccccggcccugcaggacgccuacuaccgcgcgcgggccggggaggccgccaacuucugcgcccugauccucgcguacugcaacaagaccgugggcgagcugggcgacguccgcgagacgauguccuaccuguuccagcacgccaaccucgacagcugcaagcgggugcugaacgucgugugcaagaccugcgggcagcugcagaccacccucaagggcguggaggccgucauguacauggggacccuguccuacgagcaguucaagaagggcgugcagauccccugcacgugcgggaagcaggccaccaaguaccuggugcagcaggagagccccuucgucaugauguccgcccccccggcgcaguacgagcucaagcacggcaccuucaccugcgccagcgaguacacgggcaacuaccagugcgggcacuacaagcacaucaccuccaaggagacccuguacugcaucgacggcgcccugcucaccaagagcagcgaguacaaggggcccaucacggacguguucuacaaggagaacuccuacaccaccaccaucaagcccgugacguacaagcuggacggcgucgugugcaccgagaucgaccccaagcuggacaacuacuacaagaaggacaacagcuacuucaccgagcagccgaucgaccucgugcccaaccagcccuaccccaacgccuccuucgacaacuucaaguucgucugcgacaacaucaaguucgccgacgaccugaaccagcugaccggguacaagaagccggcgagccgcgagcucaaggugacguucuuccccgaccugaacggcgacguggucgccaucgacuacaagcacuacacccccuccuucaagaagggcgccaagcugcuccacaagcccaucguguggcacgugaacaacgccaccaacaaggcgaccuacaagccgaacacguggugcauccggugccuguggagcaccaagcccgucgagaccuccaacagcuucgacgugcugaaguccgaggacgcccaggggauggacaaccucgccugcgaggaccugaagcccgugagcgaggaggucguggagaaccccaccauccagaaggacgugcuggagugcaacgucaagacgaccgagguggugggcgacaucauccucaagccggccaacaacucccugaagaucaccgaggaggucgggcacaccgaccugauggccgcguacguggacaacagcucccucacgaucaagaagcccaacgagcugagccgcgugcugggccucaagacccuggccacccacgggcuggccgccgucaacuccgugcccugggacaccaucgccaacuacgcgaagccguuccucaacaagguggucagcacgaccaccaacaucgugacccgcugccugaaccgggugugcacgaacuacaugcccuacuucuucacccugcuccugcagcugugcaccuucacccgcuccaccaacagccggaucaaggccuccaugcccacgaccaucgccaagaacaccgucaagagcgugggcaaguucugccucgaggccagcuucaacuaccugaagucccccaacuucagcaagcugaucaacaucaucaucugguuccuccugcuguccgugugccucggcagccugaucuacuccaccgccgcgcuggggguccucaugagcaaccugggcaugccguccuacugcacgggguaccgcgagggcuaccugaacagcaccaacgugaccaucgccaccuacugcacgggcuccauccccugcagcgugugccucuccgggcuggacagccuggacaccuaccccucccucgagaccauccagaucaccaucagcuccuucaagugggaccugacggccuucggccuggucgccgagugguuccucgccuacauccuguucacccgguucuucuacgugcuggggcucgcggccaucaugcagcuguucuucagcuacuucgccgugcacuucaucuccaacagcuggcugauguggcugaucaucaaccucguccagauggcccccaucuccgcgauggugcgcauguacaucuucuucgccagcuucuacuacguguggaagagcuacguccacgugguggacggcugcaacuccagcaccugcaugaugugcuacaagcggaaccgcgccacccgggucgagugcacgaccaucgugaacgggguccgccgguccuucuacguguacgccaacggcggcaagggguucugcaagcugcacaacuggaacugcgugaacugcgacaccuucugcgccggcagcaccuucaucuccgacgaggucgcgcgcgaccugagccuccaguucaagcggccgaucaaccccacggaccaguccagcuacaucguggacuccgugaccgucaagaacgggagcauccaccuguacuucgacaaggccggccagaagaccuacgagcgccacucccugagccacuucgugaaccucgacaaccugcgggccaacaacaccaaggggucccugcccaucaacgugaucgucuucgacggcaagagcaagugcgaggaguccagcgccaaguccgccagcguguacuacucccagcucaugugccagcccauccugcugcucgaccaggcgcuggugagcgacgucggcgacagcgccgagguggccgugaagauguucgacgccuacgucaacacguucuccagcaccuucaacgugccgauggagaagcugaagacccucguggccaccgcggaggccgagcuggccaagaacgucucccuggacaacgugcucagcacguucaucuccgccgcgcgccagggguucguggacagcgacgucgagaccaaggacgugguggagugccugaagcugucccaccagagcgacaucgaggucaccggcgacuccugcaacaacuacaugcucaccuacaacaagguggagaacaugacgccccgggaccugggggccugcaucgacugcagcgcccgccacaucaacgcccagguggccaagucccacaacaucgcgcugaucuggaacgucaaggacuucaugagccucuccgagcagcugcggaagcagauccgcagcgccgccaagaagaacaaccugcccuucaagcucaccugcgccaccacccgccagguggugaacgucgugacgaccaagaucgcccugaagggcggguga

SEQ ID NO: 18068 - RNA, 5841 nt, Artificial Sequence
  SARS-CoV-2__MT642270.1__non-structural protein 3 (NSP3) CDS gc
auggcccccaccaaggugaccuucggcgacgacacggucaucgaggugcagggguacaagagcgugaacaucaccuucgagcuggacgagcgcaucgacaagguccucaacgagaagugcuccgccuacaccguggagcugggcaccgaggugaacgaguucgcgugcgucguggccgacgccgugaucaagacgcugcagccggucagcgagcuccugaccccccuggggaucgaccucgacgagugguccauggccaccuacuaccuguucgacgagagcggcgaguucaagcuggccucccacauguacugcagcuucuacccccccgacgaggacgaggaggagggggacugcgaggaggaggaguucgagccguccacccaguacgaguacggcacggaggacgacuaccagggcaagccccucgaguucggggcgaccagcgccgcccugcagcccgaggaggagcaggaggaggacuggcuggacgacgacucccagcagaccgugggccagcaggacgggagcgaggacaaccagaccacgaccauccagaccaucguggagguccagccccagcucgagauggagcugaccccgguggugcagacgaucgaggucaacuccuucagcggcuaccugaagcucaccgacaacguguacaucaagaacgccgacaucguggaggaggcgaagaaggucaagcccaccgugguggucaacgccgccaacguguaccugaagcacgggggcggcguggccggggcccugaacaaggcgaccaacaacgccaugcaggucgaguccgacgacuacaucgccacgaacggcccccucaagguggggggcagcugcguccuguccggccacaaccuggccaagcacugccuccacgugguggggcccaacgucaacaagggcgaggacauccagcugcugaagagcgccuacgagaacuucaaccagcacgaggugcuccuggcgccgcugcucuccgccgggaucuucggcgccgaccccauccacagccugcgggugugcgucgacaccgugcgcaccaacguguaccuggccgucuucgacaagaaccucuacgacaagcugguguccagcuuccuggagaugaagagcgagaagcagguggagcagaagaucgccgagauccccaaggaggaggucaagcccuucaucaccgaguccaagccgagcguggagcagcggaagcaggacgacaagaagaucaaggcgugcguggaggaggucacgaccacccucgaggagaccaaguuccugacggagaaccugcuccuguacaucgacaucaacgggaaccugcaccccgacuccgccacccucgugagcgacaucgacaucaccuuccugaagaaggacgcccccuacaucgugggcgacgucgugcaggagggcgugcugaccgccgucgugauccccacgaagaaggccgggggcaccaccgagaugcucgcgaaggcccugcgcaaggugccgaccgacaacuacaucacgaccuaccccgggcagggccugaacggguacaccgucgaggaggccaagaccgugcucaagaagugcaaguccgccuucuacauccugcccagcaucaucuccaacgagaagcaggagauccugggcaccgugagcuggaaccuccgggagaugcuggcgcacgccgaggagacgcgcaagcugaugcccgucugcguggagaccaaggccaucguguccaccauccagcggaaguacaagggcaucaagauccaggagggggucguggacuacggcgcccgcuucuacuucuacaccagcaagacgaccguggccucccugaucaacacccucaacgaccugaacgagacccuggucacgaugccgcucggguacgugacccacggccugaaccuggaggaggcggcccgguacaugcgcagccucaaggugcccgccaccgucuccgugagcucccccgacgccgugaccgccuacaacggguaccugacgagcuccagcaagacccccgaggagcacuucaucgagaccaucucccuggcgggcagcuacaaggacuggagcuacuccggccagagcacccagcucgggaucgaguuccugaagcggggcgacaaguccgucuacuacacgagcaacccgaccaccuuccaccuggacggggaggugaucaccuucgacaaccucaagacgcugcugucccuccgcgaggugcggaccaucaaggucuucaccaccguggacaacaucaaccugcacacgcagguggucgacaugagcaugaccuacggccagcaguucggccccaccuaccuggacggggccgacgugaccaagaucaagccccacaacucccacgagggcaagacguucuacgugcucccgaacgacgacacccugcgcgucgaggccuucgaguacuaccacaccaccgaccccagcuuccuggggcgguacauguccgcccucaaccacacgaagaaguggaaguacccccaggugaacggccugaccagcaucaagugggccgacaacaacugcuaccuggcgaccgcccuccugacccugcagcagaucgagcucaaguucaaccccccggcccugcaggacgccuacuaccgcgcgcgggccggggaggccgccaacuucugcgcccugauccucgcguacugcaacaagacggugggcgagcugggcgacguccgcgagaccauguccuaccuguuccagcacgccaaccucgacagcugcaagcgggugcugaacgucgugugcaagaccugcgggcagcagcagaccacccugaagggcguggaggccgucauguacauggggacgcucuccuacgagcaguucaagaagggcgugcagauccccugcaccugcgggaagcaggccaccaaguaccuggugcagcaggagagccccuucgucaugauguccgcccccccggcgcaguacgagcugaagcacggcaccuucacgugcgccagcgaguacaccggcaacuaccagugcgggcacuacaagcacaucaccuccaaggagacccucuacugcaucgacggcgcccugcugacgaagagcagcgaguacaaggggcccaucaccgacguguucuacaaggagaacuccuacaccaccacgaucaagcccgugaccuacaagcucgacggcgucgugugcaccgagaucgaccccaagcuggacaacuacuacaagaaggacaacagcuacuucaccgagcagccgaucgaccuggugcccaaccagcccuaccccaacgccuccuucgacaacuucaaguucgucugcgacaacaucaaguucgccgacgaccucaaccagcugacgggguacaagaagccggcgagccgcgagcugaaggugaccuucuuccccgaccucaacggcgacguggucgccaucgacuacaagcacuacacccccuccuucaagaagggcgccaagcugcugcacaagcccaucguguggcacgugaacaacgccaccaacaaggcgacguacaagccgaacaccuggugcauccggugccucuggagcaccaagcccgucgagaccuccaacagcuucgacgugcugaaguccgaggacgcccaggggauggacaaccuggccugcgaggaccucaagcccgugagcgaggaggucguggagaaccccacgauccagaaggacgugcuggagugcaacgucaagaccaccgagguggugggcgacaucauccugaagccggccaacaacucccucaagaucaccgaggaggucgggcacacggaccugauggccgcguacguggacaacagcucccugaccaucaagaagcccaacgagcucagccgcgugcugggccugaagacccucgccacccacgggcuggccgccgucaacuccgugcccugggacacgaucgccaacuacgcgaagccguuccugaacaagguggucagcaccaccaccaacaucgugacgcgcugccucaaccgggugugcaccaacuacaugcccuacuucuucacccugcugcuccagcugugcaccuucacccgcuccacgaacagccggaucaaggccuccaugcccaccaccaucgccaagaacaccgucaagagcgugggcaaguucugccuggaggccagcuucaacuaccucaagucccccaacuucagcaagcugaucaacaucaucaucugguuccugcuccuguccgugugccugggcagccucaucuacuccacggccgcgcuggggguccugaugagcaaccucggcaugccguccuacugcaccggguaccgcgagggcuaccugaacagcaccaacgugaccaucgccacguacugcaccggcuccauccccugcagcgugugccuguccgggcucgacagccuggacaccuaccccucccuggagaccauccagaucacgaucagcuccuucaagugggaccucaccgccuucggccuggucgccgagugguuccuggccuacauccucuucacccgguucuucuacgugcuggggcuggcggccaucaugcagcucuucuucagcuacuucgccgugcacuucaucuccaacagcuggcugauguggcugaucaucaaccugguccagauggcccccaucuccgcgauggugcgcauguacaucuucuucgccagcuucuacuacguguggaagagcuacguccacgugguggacggcugcaacuccagcaccugcaugaugugcuacaagcggaaccgcgccacgcgggucgagugcaccaccaucgugaacgggguccgccgguccuucuacguguacgccaacggcggcaagggguucugcaagcuccacaacuggaacugcgugaacugcgacaccuucugcgccggcagcacguucaucuccgacgaggucgcgcgcgaccugagccugcaguucaagcggccgaucaaccccaccgaccaguccagcuacaucguggacuccgugaccgucaagaacgggagcauccaccucuacuucgacaaggccggccagaagaccuacgagcgccacucccugagccacuucgugaaccuggacaaccuccgggccaacaacacgaaggggucccugcccaucaacgugaucgucuucgacggcaagagcaagugcgaggaguccagcgccaaguccgccagcguguacuacucccagcugaugugccagcccauccuccugcuggaccaggcgcucgugagcgacgucggcgacagcgccgagguggccgugaagauguucgacgccuacgucaacaccuucuccagcaccuucaacgugccgauggagaagcugaagacccugguggccacggcggaggccgagcucgccaagaacgucucccuggacaacgugcugagcaccuucaucuccgccgcgcgccagggguucguggacagcgacgucgagaccaaggacgugguggagugccucaagcugucccaccagagcgacaucgaggucaccggcgacuccugcaacaacuacaugcugacguacaacaagguggagaacaugaccccccgggaccucggggccugcaucgacugcagcgugcgccacaucaacgcccaggucgccaagucccacaacaucgcccugaucuggaacgugaaggacuucaugagccuguccgagcagcuccggaagcagauccgcagcgcggccaagaagaacaaccugcccuucaagcugaccugcgccaccacgcgccagguggucaacguggugaccaccaagaucgcccucaagggcggguga

SEQ ID NO: 18069 - RNA, 5841 nt, Artificial Sequence
  SARS-CoV-2__MT642356.1__non-structural protein 3 (NSP3) CDS gc
auggcccccaccaaggugaccuucggcgacgacacggucaucgaggugcagggguacaagagcgugaacaucaccuucgagcuggacgagcgcaucgacaagguccucaacgagaagugcuccaccuacaccguggagcugggcacggaggugaacgaguucgccugcgucguggcggacgccgugaucaagacccugcagccggucagcgagcuccugaccccccuggggaucgaccucgacgagugguccauggccaccuacuaccuguucgacgagagcggcgaguucaagcuggccucccacauguacugcagcuucuacccccccgacgaggacgaggaggagggggacugcgaggaggaggaguucgagccguccacgcaguacgaguacggcaccgaggacgacuaccagggcaagccccucgaguucggggccaccagcgcggcccugcagcccgaggaggagcaggaggaggacuggcuggacgacgacucccagcagaccgugggccagcaggacgggagcgaggacaaccagacgaccaccauccagaccaucguggagguccagccccagcucgagauggagcugacgccgguggugcagaccaucgaggucaacuccuucagcggcuaccugaagcucaccgacaacguguacaucaagaacgccgacaucguggaggaggccaagaaggucaagcccaccgugguggucaacgcggccaacguguaccugaagcacgggggcggcguggccggggcccugaacaaggccacgaacaacgcgaugcaggucgaguccgacgacuacaucgccaccaacggcccccucaagguggggggcagcugcguccuguccggccacaaccuggccaagcacugccuccacgugguggggcccaacgucaacaagggcgaggacauccagcugcugaagagcgccuacgagaacuucaaccagcacgaggugcuccuggccccgcugcucuccgcggggaucuucggcgccgaccccauccacagccugcgggugugcgucgacaccgugcgcaccaacguguaccuggccgucuucgacaagaaccucuacgacaagcugguguccagcuuccuggagaugaagagcgagaagcagguggagcagaagaucgccgagauccccaaggaggaggucaagcccuucaucacggaguccaagccgagcguggagcagcggaagcaggacgacaagaagaucaaggccugcguggaggaggucaccaccacccucgaggagacgaaguuccugaccgagaaccugcuccuguacaucgacaucaacgggaaccugcaccccgacuccgcgacccucgugagcgacaucgacaucaccuuccugaagaaggacgcccccuacaucgugggcgacgucgugcaggagggcgugcugacggccgucgugauccccaccaagaaggccgggggcaccaccgagaugcucgccaaggcgcugcgcaaggugccgacggacaacuacaucaccaccuaccccgggcagggccugaacggguacaccgucgaggaggccaagaccgugcucaagaagugcaaguccgccuucuacauccugcccagcaucaucuccaacgagaagcaggagauccugggcacggugagcuggaaccuccgggagaugcuggcccacgcggaggagacccgcaagcugaugcccgucugcguggagaccaaggccaucguguccaccauccagcggaaguacaagggcaucaagauccaggagggggucguggacuacggcgcccgcuucuacuucuacacgagcaagaccaccguggccucccugaucaacacccucaacgaccugaacgagacgcuggucaccaugccgcucggguacgugacccacggccugaaccuggaggaggccgcgcgguacaugcgcagccucaaggugcccgccaccgucuccgugagcucccccgacgccgugacggccuacaacggguaccugaccagcuccagcaagacccccgaggagcacuucaucgagaccaucucccuggccggcagcuacaaggacuggagcuacuccggccagagcacgcagcucgggaucgaguuccugaagcggggcgacaaguccgucuacuacaccagcaacccgaccaccuuccaccuggacggggaggugaucacguucgacaaccucaagacccugcugucccuccgcgaggugcggaccaucaaggucuucaccacgguggacaacaucaaccugcacacccagguggucgacaugagcaugaccuacggccagcaguucggccccaccuaccuggacggggcggacgugacgaagaucaagccccacaacucccacgagggcaagaccuucuacgugcucccgaacgacgacacccugcgcgucgaggccuucgaguacuaccacaccacggaccccagcuuccuggggcgguacauguccgcccucaaccacaccaagaaguggaaguacccccaggugaacggccugaccagcaucaagugggccgacaacaacugcuaccuggccaccgcgcuccugacgcugcagcagaucgagcucaaguucaaccccccggcccugcaggacgccuacuaccgcgcccgggcgggggaggccgccaacuucugcgcccugauccucgccuacugcaacaagaccgugggcgagcugggcgacguccgcgagaccauguccuaccuguuccagcacgcgaaccucgacagcugcaagcgggugcugaacgucgugugcaagaccugcgggcagcagcagaccacgcugaagggcguggaggccgucauguacauggggacccucuccuacgagcaguucaagaagggcgugcagauccccugcaccugcgggaagcaggccaccaaguaccuggugcagcaggagagccccuucgucaugauguccgcccccccggcccaguacgagcugaagcacggcacguucaccugcgcgagcgaguacaccggcaacuaccagugcgggcacuacaagcacaucaccuccaaggagacgcucuacugcaucgacggcgcccugcugaccaagagcagcgaguacaaggggcccaucaccgacguguucuacaaggagaacuccuacaccacgaccaucaagcccgugaccuacaagcucgacggcgucgugugcaccgagaucgaccccaagcuggacaacuacuacaagaaggacaacagcuacuucacggagcagccgaucgaccuggugcccaaccagcccuaccccaacgccuccuucgacaacuucaaguucgucugcgacaacaucaaguucgccgacgaccucaaccagcugaccggguacaagaagccggccagccgcgagcugaaggugaccuucuuccccgaccucaacggcgacguggucgcgaucgacuacaagcacuacacccccuccuucaagaagggcgccaagcugcugcacaagcccaucguguggcacgugaacaacgccacgaacaaggccaccuacaagccgaacaccuggugcauccggugccucuggagcaccaagcccgucgagacguccaacagcuucgacgugcugaaguccgaggacgcgcaggggauggacaaccuggccugcgaggaccucaagcccgugagcgaggaggucguggagaaccccaccauccagaaggacgugcuggagugcaacgucaagaccaccgagguggugggcgacaucauccugaagccggccaacaacucccucaagaucacggaggaggucgggcacaccgaccugauggccgccuacguggacaacagcucccugaccaucaagaagcccaacgagcucagccgcgugcugggccugaagacccucgcgacgcacgggcuggccgccgucaacuccgugcccugggacaccaucgccaacuacgccaagccguuccugaacaagguggucagcaccaccacgaacaucgugacccgcugccucaaccgggugugcaccaacuacaugcccuacuucuucacccugcugcuccagcugugcaccuucacgcgcuccaccaacagccggaucaaggcguccaugcccaccaccaucgccaagaacacggucaagagcgugggcaaguucugccuggaggccagcuucaacuaccucaagucccccaacuucagcaagcugaucaacaucaucaucugguuccugcuccuguccgugugccugggcagccucaucuacuccaccgccgcccuggggguccugaugagcaaccucggcaugccguccuacugcaccggguaccgcgagggcuaccugaacagcaccaacgugacgaucgcgaccuacugcaccggcuccauccccugcagcgugugccuguccgggcucgacagccuggacaccuaccccucccuggagacgauccagaucaccaucagcuccuucaagugggaccucaccgccuucggccuggucgccgagugguuccuggccuacauccucuucacccgguucuucuacgugcuggggcuggccgcgaucaugcagcucuucuucagcuacuucgccgugcacuucaucuccaacagcuggcugauguggcugaucaucaaccugguccagauggcccccaucuccgccauggugcgcauguacaucuucuucgcgagcuucuacuacguguggaagagcuacguccacgugguggacggcugcaacuccagcacgugcaugaugugcuacaagcggaaccgcgccacccgggucgagugcaccaccaucgugaacgggguccgccgguccuucuacguguacgccaacggcggcaagggguucugcaagcuccacaacuggaacugcgugaacugcgacacguucugcgccggcagcaccuucaucuccgacgaggucgcccgcgaccugagccugcaguucaagcggccgaucaaccccaccgaccaguccagcuacaucguggacuccgugaccgucaagaacgggagcauccaccucuacuucgacaaggcgggccagaagacguacgagcgccacucccugagccacuucgugaaccuggacaaccuccgggccaacaacaccaaggggucccugcccaucaacgugaucgucuucgacggcaagagcaagugcgaggaguccagcgccaaguccgccagcguguacuacucccagcugaugugccagcccauccuccugcuggaccaggcccucgugagcgacgucggcgacagcgcggagguggccgugaagauguucgacgccuacgucaacaccuucuccagcaccuucaacgugccgauggagaagcugaagacgcugguggccaccgccgaggcggagcucgccaagaacgucucccuggacaacgugcugagcaccuucaucuccgccgcccgccagggguucguggacagcgacgucgagaccaaggacgugguggagugccucaagcugucccaccagagcgacaucgaggucacgggcgacuccugcaacaacuacaugcugaccuacaacaagguggagaacaugaccccccgggaccucggggcgugcaucgacugcagcgcccgccacaucaacgcccagguggccaagucccacaacaucgcccugaucuggaacgucaaggacuucaugagccuguccgagcagcuccggaagcagauccgcagcgcggccaagaagaacaaccugcccuucaagcugaccugcgccacgacccgccagguggugaacgucgugaccaccaagaucgcccucaagggcggguga

SEQ ID NO: 18070 - RNA, 5841 nt, Artificial Sequence
  SARS-CoV-2__MT642365.1__non-structural protein 3 (NSP3) CDS gc
auggcccccaccaaggugaccuucggcgacgacacggucaucgaggugcagggguacaagagcgugaacaucaccuucgagcuggacgagcgcaucgacaagguccucaacgagaagugcuccgccuacaccguggagcugggcaccgaggugaacgaguucgcgugcgucguggccgacgccgugaucaagacgcugcagccggucagcgagcuccugaccccccuggggaucgaccucgacgagugguccauggccaccuacuaccuguucgacgagagcggcgaguucaagcuggccucccacauguacugcagcuucuacccccccgacgaggacgaggaggagggggacugcgaggaggaggaguucgagccguccacccaguacgaguacggcacggaggacgacuaccagggcaagccccucgaguucggggcgaccagcgccgcccugcagcccgaggaggagcaggaggaggacuggcuggacgacgacucccagcagaccgugggccagcaggacgggagcgaggacaaccagaccacgaccauccagaccaucguggagguccagccccagcucgagauggagcugaccccgguggugcagacgaucgaggucaacuccuucagcggcuaccugaagcucaccgacaacguguacaucaagaacgccgacaucguggaggaggcgaagaaggucaagcccaccgugguggucaacgccgccaacguguaccugaagcacgggggcggcguggccggggcccugaacaaggcgaccaacaacgccaugcaggucgaguccgacgacuacaucgccacgaacggcccccucaagguggggggcagcugcguccuguccggccacaaccuggccaagcacugccuccacgugguggggcccaacgucaacaagggcgaggacauccagcugcugaagagcgccuacgagaacuucaaccagcacgaggugcuccuggcgccgcugcucuccgccgggaucuucggcgccgaccccauccacagccugcgggugugcgucgacaccgugcgcaccaacguguaccuggccgucuucgacaagaaccucuacgacaagcugguguccagcuuccuggagaugaagagcgagaagcagguggagcagaagaucgccgagauccccaaggaggaggucaagcccuucaucaccgaguccaagccgagcguggagcagcggaagcaggacgacaagaagaucaaggcgugcguggaggaggucacgaccacccucgaggagaccaaguuccugacggagaaccugcuccuguacaucgacaucaacgggaaccugcaccccgacuccgccacccucgugagcgacaucgacaucaccuuccugaagaaggacgcccccuacaucgugggcgacgucgugcaggagggcgugcugaccgccgucgugauccccacgaagaaggccgggggcaccaccgagaugcucgcgaaggcccugcgcaaggugccgaccgacaacuacaucacgaccuaccccgggcagggccugaacggguacaccgucgaggaggccaagaccgugcucaagaagugcaaguccgccuucuacauccugcccagcaucaucuccaacgagaagcaggagauccugggcaccgugagcuggaaccuccgggagaugcuggcgcacgccgaggagacgcgcaagcugaugcccgucugcguggagaccaaggccaucguguccaccauccagcggaaguacaagggcaucaagauccaggagggggucguggacuacggcgcccgcuucuacuucuacaccagcaagacgaccguggccucccugaucaacacccucaacgaccugaacgagacccuggucacgaugccgcucggguacgugacccacggccugaaccuggaggaggcggcccgguacaugcgcagccucaaggugcccgccaccgucuccgugagcucccccgacgccgugaccgccuacaacggguaccugacgagcuccagcaagacccccgaggagcacuucaucgagaccaucucccuggcgggcagcuacaaggacuggagcuacuccggccagagcacccagcucgggaucgaguuccugaagcggggcgacaaguccgucuacuacacgagcaacccgaccaccuuccaccuggacggggaggugaucaccuucgacaaccucaagacgcugcugucccuccgcgaggugcggaccaucaaggucuucaccaccguggacaacaucaaccugcacacgcagguggucgacaugagcaugaccuacggccagcaguucggccccaccuaccuggacggggccgacgugaccaagaucaagccccacaacucccacgagggcaagacguucuacgugcucccgaacgacgacacccugcgcaucgaggccuucgaguacuaccacaccaccgaccccagcuuccuggggcgguacauguccgcccucaaccacacgaagaaguggaaguacccccaggucaacggccugaccagcaucaagugggccgacaacaacugcuaccuggcgaccgcccuccugacccugcagcagaucgagcucaaguucaaccccccggcccugcaggacgccuacuaccgcgcgcgggccggggaggccgccaacuucugcgcccugauccucgcguacugcaacaagacggugggcgagcugggcgacgugcgcgagaccauguccuaccuguuccagcacgccaaccucgacagcugcaagcggguccugaacguggucugcaagaccugcgggcagcagcagaccacccugaagggcguggaggccgugauguacauggggacgcucuccuacgagcaguucaagaagggcguccagauccccugcaccugcgggaagcaggccaccaaguaccuggugcagcaggagagccccuucgugaugauguccgcccccccggcgcaguacgagcugaagcacggcaccuucacgugcgccagcgaguacaccggcaacuaccagugcgggcacuacaagcacaucaccuccaaggagacccucuacugcaucgacggcgcccugcugacgaagagcagcgaguacaaggggcccaucaccgacgucuucuacaaggagaacuccuacaccaccacgaucaagcccgugaccuacaagcucgacggcguggucugcaccgagaucgaccccaagcuggacaacuacuacaagaaggacaacagcuacuucaccgagcagccgaucgaccuggugcccaaccagcccuaccccaacgccuccuucgacaacuucaaguucgugugcgacaacaucaaguucgccgacgaccucaaccagcugacgggguacaagaagccggcgagccgcgagcugaaggucaccuucuuccccgaccucaacggcgacgugguggccaucgacuacaagcacuacacccccuccuucaagaagggcgccaagcugcugcacaagcccaucgucuggcacgugaacaacgccaccaacaaggcgacguacaagccgaacaccuggugcauccggugccucuggagcaccaagcccguggagaccuccaacagcuucgacguccugaaguccgaggacgcccaggggauggacaaccuggccugcgaggaccucaagcccgugagcgaggagguggucgagaaccccacgauccagaaggacgugcuggagugcaacgugaagaccaccgaggucgugggcgacaucauccugaagccggccaacaacucccucaagaucaccgaggagguggggcacacggaccugauggccgcguacgucgacaacagcucccugaccaucaagaagcccaacgagcucagccgcgugcugggccugaagacccucgccacccacgggcuggccgccgugaacuccguccccugggacacgaucgccaacuacgcgaagccguuccugaacaagguggugagcaccaccaccaacaucgucacgcgcugccucaaccgggugugcaccaacuacaugcccuacuucuucacccugcugcuccagcugugcaccuucacccgcuccacgaacagccggaucaaggccuccaugcccaccaccaucgccaagaacaccgugaagagcgucggcaaguucugccuggaggccagcuucaacuaccucaagucccccaacuucagcaagcugaucaacaucaucaucugguuccugcuccuguccgugugccugggcagccucaucuacuccacggccgcgcugggggugcugaugagcaaccucggcaugccguccuacugcaccggguaccgcgagggcuaccugaacagcaccaacgucaccaucgccacguacugcaccggcuccauccccugcagcgugugccuguccgggcucgacagccuggacaccuaccccucccuggagaccauccagaucacgaucagcuccuucaagugggaccucaccgccuucggccugguggccgagugguuccuggccuacauccucuucacccgguucuucuacguccuggggcuggcggccaucaugcagcucuucuucagcuacuucgccgugcacuucaucuccaacagcuggcugauguggcugaucaucaaccuggugcagauggcccccaucuccgcgaugguccgcauguacaucuucuucgccagcuucuacuacguguggaagagcuacgugcacgucguggacggcugcaacuccagcaccugcaugaugugcuacaagcggaaccgcgccacgcggguggagugcaccaccaucgucaacggggugcgccgguccuucuacgucuacgccaacggcggcaagggguucugcaagcuccacaacuggaacugcgugaacugcgacaccuucugcgccggcagcacguucaucuccgacgagguggcgcgcgaccugagccugcaguucaagcggccgaucaaccccaccgaccaguccagcuacaucgucgacuccgugaccgugaagaacgggagcauccaccucuacuucgacaaggccggccagaagaccuacgagcgccacucccugagccacuucgucaaccuggacaaccuccgggccaacaacacgaaggggucccugcccaucaacgugaucguguucgacggcaagagcaagugcgaggaguccagcgccaaguccgccagcgucuacuacucccagcugaugugccagcccauccuccugcuggaccaggcgcucgugagcgacgugggcgacagcgccgaggucgccgugaagauguucgacgccuacgugaacaccuucuccagcaccuucaacgucccgauggagaagcugaagacccugguggccacggcggaggccgagcucgccaagaacgugucccuggacaacguccugagcaccuucaucuccgccgcgcgccagggguucguggacagcgacguggagaccaaggacgucguggagugccucaagcugucccaccagagcgacaucgaggugaccggcgacuccugcaacaacuacaugcugacguacaacaaggucgagaacaugaccccccgggaccucggggccugcaucgacugcagcgcccgccacaucaacgcccagguggccaagucccacaacaucgcgcugaucuggaacgugaaggacuucaugagccuguccgagcagcuccggaagcagauccgcagcgccgccaagaagaacaaccugcccuucaagcugaccugcgccaccacgcgccaggucgugaacguggucaccaccaagaucgcccucaagggcggguga

SEQ ID NO: 18071 - RNA, 5841 nt, Artificial Sequence
  SARS-CoV-2__MT642428.1__non-structural protein 3 (NSP3) CDS gc
auggcccccaccaaggugaccuucggcgacgacacggucaucgaggugcagggguacaagagcgugaacaucaccuucgagcuggacgagcgcaucgacaagguccucaacgagaagugcuccgccuacaccguggagcugggcaccgaggugaacgaguucgcgugcgucguggccgacgccgugaucaagacgcugcagccggucagcgagcuccugaccccccuggggaucgaccucgacgagugguccauggccaccuacuaccuguucgacgagagcggcgaguucaagcuggccucccacauguacugcagcuucuacccccccgacgaggacgaggaggagggggacugcgaggaggaggaguucgagccguccacccaguacgaguacggcacggaggacgacuaccagggcaagccccucgaguucggggcgaccagcgccgcccugcagcccgaggaggagcaggaggaggacuggcuggacgacgacucccagcagaccgugggccagcaggacgggagcgaggacaaccagaccacgaccauccagaccaucguggagguccagccccagcucgagauggagcugaccccgguggugcagacgaucgaggucaacuccuucagcggcuaccugaagcucaccgacaacguguacaucaagaacgccgacaucguggaggaggcgaagaaggucaagcccaccgugguggucaacgccgccaacguguaccugaagcacgggggcggcguggccggggcccugaacaaggcgaccaacaacgccaugcaggucgaguccgacgacuacaucgccacgaacggcccccucaagguggggggcagcugcguccuguccggccacaaccuggccaagcacugccuccacgugguggggcccaacgucaacaagggcgaggacauccagcugcugaagagcgccuacgagaacuucaaccagcacgaggugcuccuggcgccgcugcucuccgccgggaucuucggcgccgaccccauccacagccugcgggugugcgucgacaccgugcgcaccaacguguaccuggccgucuucgacaagaaccucuacgacaagcugguguccagcuuccuggagaugaagagcgagaagcagguggagcagaagaucgccgagauccccaaggaggaggucaagcccuucaucaccgaguccaagccgagcguggagcagcggaagcaggacgacaagaagaucaaggcgugcguggaggaggucacgaccacccucgaggagaccaaguuccugacggagaaccugcuccuguacaucgacaucaacgggaaccugcaccccgacuccgccacccucgugagcgacaucgacaucaccuuccugaagaaggacgcccccuacaucgugggcgacgucgugcaggagggcgugcugaccgccgucgugauccccacgaagaaggccgggggcaccaccgagaugcucgcgaaggcccugcgcaaggugccgaccgacaacuacaucacgaccuaccccgggcagggccugaacggguacaccgucgaggaggccaagaccgugcucaagaagugcaaguccgccuucuacauccugcccagcaucaucuccaacgagaagcaggagauccugggcaccgugagcuggaaccuccgggagaugcuggcgcacgccgaggagacgcgcaagcugaugcccgucugcguggagaccaaggccaucguguccaccauccagcggaaguacaagggcaucaagauccaggagggggucguggacuacggcgcccgcuucuacuucuacaccagcaagacgaccguggccucccugaucaacacccucaacgaccugaacgagacccuggucacgaugccgcucggguacgugacccacggccugaaccuggaggaggcggcccgguacaugcgcagccucaaggugcccgccaccgucuccgugagcucccccgacgccgugaccgccuacaacggguaccugacgagcuccagcaagacccccgaggagcacuucaucgagaccaucucccuggcgggcagcuacaaggacuggagcuacuccggccagagcacccagcucgggaucgaguuccugaagcggggcgacaaguccgucuacuacacgagcaacccgaccaccuuccaccuggacggggaggugaucaccuucgacaaccucaagacgcugcugucccuccgcgaggugcggaccaucaaggucuucaccaccguggacaacaucaaccugcacacgcagguggucgacaugagcaugaccuacggccagcaguucggccccaccuaccuggacggggccgacgugaccaagaucaagccccacaacucccacgagggcaagacguucuacgugcucccgaacgacgacacccugcgcgucgaggccuucgaguacuaccacaccaccgaccccagcuuccuggggcgguacauguccgcccucaaccacacgaagaaguggaaguacccccaggugaacggccugaccagcaucaagugggccgacaacaacugcuaccuggcgaccgcccuccugacccugcagcagaucgagcucaaguucaaccccccggcccugcaggacgccuacuaccgcgcgcgggccggggaggccgccaacuucugcgcccugauccucgcguacugcaacaagacggugggcgagcugggcgacguccgcgagaccauguccuaccuguuccagcacgccaaccucgacagcugcaagcgggugcugaacgucgugugcaagaccugcgggcagcagcagaccacccugaagggcguggaggccgucauguacauggggacgcucuccuacgagcaguucaagaagggcgugcagauccccugcaccugcgggaagcaggccaccaaguaccuggugcagcaggagagccccuucgucaugauguccgcccccccggcgcaguacgagcugaagcacggcaccuucacgugcgccagcgaguacaccggcaacuaccagugcgggcacuacaagcacaucaccuccaaggagacccucuacugcaucgacggcgcccugcugacgaagagcagcgaguacaaggggcccaucaccgacguguucuacaaggagaacuccuacaccaccacgaucaagcccgugaccuacaagcucgacggcgucgugugcaccgagaucgaccccaagcuggacaacuacuacaagaaggacaacagcuacuucaccgagcagccgaucgaccuggugcccaaccagcccuaccccaacgccuccuucgacaacuucaaguucgucugcgacaacaucaaguucgccgacgaccucaaccagcugacgggguacaagaagccggcgagccgcgagcugaaggugaccuucuuccccgaccucaacggcgacguggucgccaucgacuacaagcacuacacccccuccuucaagaagggcgccaagcugcugcacaagcccaucguguggcacgugaacaacgccaccaacaaggcgacguacaagccgaacaucuggugcauccggugccucuggagcaccaagcccgucgagaccuccaacagcuucgacgugcugaaguccgaggacgcccaggggauggacaaccuggccugcgaggaccucaagcccgugagcgaggaggucguggagaaccccaccauccagaaggacgugcuggagugcaacgucaagacgaccgagguggugggcgacaucauccugaagccggccaacaacucccucaagaucaccgaggaggucgggcacaccgaccugauggccgcguacguggacaacagcucccugacgaucaagaagcccaacgagcucagccgcgugcugggccugaagacccucgccacccacgggcuggccgccgucaacuccgugcccugggacaccaucgccaacuacgcgaagccguuccugaacaagguggucagcacgaccaccaacaucgugacccgcugccucaaccgggugugcacgaacuacaugcccuacuucuucacccugcugcuccagcugugcaccuucacccgcuccaccaacagccggaucaaggccuccaugcccacgaccaucgccaagaacaccgucaagagcgugggcaaguucugccuggaggccagcuucaacuaccucaagucccccaacuucagcaagcugaucaacaucaucaucugguuccugcuccuguccgugugccugggcagccucaucuacuccaccgccgcgcuggggguccugaugagcaaccucggcaugccguccuacugcacgggguaccgcgagggcuaccugaacagcaccaacgugaccaucgccaccuacugcacgggcuccauccccugcagcgugugccuguccgggcucgacagccuggacaccuaccccucccuggagaccauccagaucaccaucagcuccuucaagugggaccucacggccuucggccuggucgccgagugguuccuggccuacauccucuucacccgguucuucuacgugcuggggcuggcggccaucaugcagcucuucuucagcuacuucgccgugcacuucaucuccaacagcuggcugauguggcugaucaucaaccugguccagauggcccccaucuccgcgauggugcgcauguacaucuucuucgccagcuucuacuacguguggaagagcuacguccacgugguggacggcugcaacuccagcaccugcaugaugugcuacaagcggaaccgcgccacccgggucgagugcacgaccaucgugaacgggguccgccgguccuucuacguguacgccaacggcggcaagggguucugcaagcuccacaacuggaacugcgugaacugcgacaccuucugcgccggcagcaccuucaucuccgacgaggucgcgcgcgaccugagccugcaguucaagcggccgaucaaccccacggaccaguccagcuacaucguggacuccgugaccgucaagaacgggagcauccaccucuacuucgacaaggccggccagaagaccuacgagcgccacucccugagccacuucgugaaccuggacaaccuccgggccaacaacaccaaggggucccugcccaucaacgugaucgucuucgacggcaagagcaagugcgaggaguccagcgccaaguccgccagcguguacuacucccagcugaugugccagcccauccuccugcuggaccaggcgcucgugagcgacgucggcgacagcgccgagguggccgugaagauguucgacgccuacgucaacacguucuccagcaccuucaacgugccgauggagaagcugaagacccugguggccaccgcggaggccgagcucgccaagaacgucucccuggacaacgugcugagcacguucaucuccgccgcgcgccagggguucguggacagcgacgucgagaucaaggacgugguggagugccucaagcugucccaccagagcgacaucgaggucaccggcgacuccugcaacaacuacaugcugaccuacaacaagguggagaacaugaccccccgggaccucggggccugcaucgacugcagcgcccgccacaucaacgcccagguggccaagucccacaacaucgcgcugaucuggaacgucaaggacuucaugagccuguccgagcagcuccggaagcagauccgcagcgccgccaagaagaacaaccugcccuucaagcugacgugcgccaccacccgccagguggugaacgucgugaccacgaagaucgcccucaagggcggguga

SEQ ID NO: 18072 - RNA, 5841 nt, Artificial Sequence
  SARS-CoV-2__MT635408.1__non-structural protein 3 (NSP3) CDS gc
auggcccccaccaaggugaccuucggcgacgacacggucaucgaggugcagggguacaagagcgugaacaucaccuucgagcuggacgagcgcaucgacaagguccucaacgagaagugcuccgccuacaccguggagcugggcaccgaggugaacgaguucgcgugcgucguggccgacgccgugaucaagacgcugcagccggucagcgagcuccugaccccccuggggaucgaccucgacgagugguccauggccaccuacuaccuguucgacgagagcggcgaguucaagcuggccucccacauguacugcagcuucuacccccccgacgaggacgaggaggagggggacugcgaggaggaggaguucgagccguccacccaguacgaguacggcacggaggacgacuaccagggcaagccccucgaguucggggcgaccagcgccgcccugcagcccgaggaggagcaggaggaggacuggcuggacgacgacucccagcagaccgugggccagcaggacgggagcgaggacaaccagaccacgaccauccagaccaucguggagguccagccccagcucgagauggagcugaccccgguggugcagacgaucgaggucaacuccuucagcggcuaccugaagcucaccgacaacguguacaucaagaacgccgacaucguggaggaggcgaagaaggucaagcccaccgugguggucaacgccgccaacguguaccugaagcacgggggcggcguggccggggcccugaacaaggcgaccaacaacgccaugcaggucgaguccgacgacuacaucgccacgaacggcccccucaagguggggggcagcugcguccuguccggccacaaccuggccaagcacugccuccacgugguggggcccaacgucaacaagggcgacgacauccagcugcugaagagcgccuacgagaacuucaaccagcacgaggugcuccuggcgccgcugcucuccgccgggaucuucggcgccgaccccauccacagccugcgggugugcgucgacaccgugcgcaccaacguguaccuggccgucuucgacaagaaccucuacgacaagcugguguccagcuuccuggagaugaagagcgagaagcagguggagcagaagaucgccgagauccccaaggaggaggucaagcccuucaucaccgaguccaagccgagcguggagcagcggaagcaggacgacaagaagaucaaggcgugcguggaggaggucacgaccacccucgaggagaccaaguuccugacggagaaccugcuccuguacaucgacaucaacgggaaccugcaccccgacuccgccacccucgugagcgacaucgacaucaccuuccugaagaaggacgcccccuacaucgugggcgacgucgugcaggagggcgugcugaccgccgucgugauccccacgaagaaggccgggggcaccaccgagaugcucgcgaaggcccugcgcaaggugccgaccgacaacuacaucacgaccuaccccgggcagggccugaacggguacaccgucgaggaggccaagaccgugcucaagaagugcaaguccgccuucuacauccugcccagcaucaucuccaacgagaagcaggagauccugggcaccgugagcuggaaccuccgggagaugcuggcgcacgccgaggagacgcgcaagcugaugcccgucugcguggagaccaaggccaucguguccaccauccagcggaaguacaagggcaucaagauccaggagggggucguggacuacggcgcccgcuucuacuucuacaccagcaagacgaccguggccucccugaucaacacccucaacgaccugaacgagacccuggucacgaugccgcucggguacgugacccacggccugaaccuggaggaggcggcccgguacaugcgcagccucaaggugcccgccaccgucuccgugagcucccccgacgccgugaccgccuacaacggguaccugacgagcuccagcaagacccccgaggagcacuucaucgagaccaucucccuggcgggcagcuacaaggacuggagcuacuccggccagagcacccagcucgggaucgaguuccugaagcggggcgacaaguccgucuacuacacgagcaacccgaccaccuuccaccuggacggggaggugaucaccuucgacaaccucaagacgcugcugucccuccgcgaggugcggaccaucaaggucuucaccaccguggacaacaucaaccugcacacgcagguggucgacaugagcaugaccuacggccagcaguucggccccaccuaccuggacggggccgacgugaccaagaucaagccccacaacucccacgagggcaagacguucuacgugcucccgaacgacgacacccugcgcgucgaggccuucgaguacuaccacaccaccgaccccagcuuccuggggcgguacauguccgcccucaaccacacgaagaaguggaaguacccccaggugaacggccugaccagcaucaagugggccgacaacaacugcuaccuggcgaccgcccuccugacccugcagcagaucgagcucaaguucaaccccccggcccugcaggacgccuacuaccgcgcgcgggccggggaggccgccaacuucugcgcccugauccucgcguacugcaacaagacggugggcgagcugggcgacguccgcgagaccauguccuaccuguuccagcacgccaaccucgacagcugcaagcgggugcugaacgucgugugcaagaccugcgggcagcagcagaccacccugaagggcguggaggccgucauguacauggggacgcucuccuacgagcaguucaagaagggcgugcagauccccugcaccugcgggaagcaggccaccaaguaccuggugcagcaggagagccccuucgucaugauguccgcccccccggcgcaguacgagcugaagcacggcaccuucacgugcgccagcgaguacaccggcaacuaccagugcgggcacuacaagcacaucaccuccaaggagacccucuacugcaucgacggcgcccugcugacgaagagcagcgaguacaaggggcccaucaccgacguguucuacaaggagaacuccuacaccaccacgaucaagcccgugaccuacaagcucgacggcgucgugugcaccgagaucgaccccaagcuggacaacuacuacaagaaggacaacagcuacuucaccgagcagccgaucgaccuggugcccaaccagcccuaccccaacgccuccuucgacaacuucaaguucgucugcgacaacaucaaguucgccgacgaccucaaccagcugacgggguacaagaagccggcgagccgcgagcugaaggugaccuucuuccccgaccucaacggcgacguggucgccaucgacuacaagcacuacacccccuccuucaagaagggcgccaagcugcugcacaagcccaucguguggcacgugaacaacgccaccaacaaggcgacguacaagccgaacaccuggugcauccggugccucuggagcaccaagcccgucgagaccuccaacagcuucgacgugcugaaguccgaggacgcccaggggauggacaaccuggccugcgaggaccucaagcccgugagcgaggaggucguggagaaccccacgauccagaaggacgugcuggagugcaacgucaagaccaccgagguggugggcgacaucauccugaagccggccaacaacucccucaagaucaccgaggaggucgggcacacggaccugauggccgcguacguggacaacagcucccugaccaucaagaagcccaacgagcucagccgcgugcugggccugaagacccucgccacccacgggcuggccgccgucaacuccgugcccugggacacgaucgccaacuacgcgaagccguuccugaacaagguggucagcaccaccaccaacaucgugacgcgcugccucaaccgggugugcaccaacuacaugcccuacuucuucacccugcugcuccagcugugcaccuucacccgcuccacgaacagccggaucaaggccuccaugcccaccaccaucgccaagaacaccgucaagagcgugggcaaguucugccuggaggccagcuucaacuaccucaagucccccaacuucagcaagcugaucaacaucaucaucugguuccugcuccuguccgugugccugggcagccucaucuacuccacggccgcgcuggggguccugaugagcaaccucggcaugccguccuacugcaccggguaccgcgagggcuaccugaacagcaccaacgugaccaucgccacguacugcaccggcuccauccccugcagcgugugccuguccgggcucgacagccuggacaccuaccccucccuggagaccauccagaucacgaucagcuccuucaagugggaccucaccgccuucggccuggucgccgagugguuccuggccuacauccucuucacccgguucuucuacgugcuggggcuggcggccaucaugcagcucuucuucagcuacuucgccgugcacuucaucuccaacagcuggcugauguggcugaucaucaaccugguccagauggcccccaucuccgcgauggugcgcauguacaucuucuucgccagcuucuacuacguguggaagagcuacguccacgugguggacggcugcaacuccagcaccugcaugaugugcuacaagcggaaccgcgccacgcgggucgagugcaccaccaucgugaacgggguccgccgguccuucuacguguacgccaacggcggcaagggguucugcaagcuccacaacuggaacugcgugaacugcgacaccuucugcgccggcagcacguucaucuccgacgaggucgcgcgcgaccugagccugcaguucaagcggccgaucaaccccaccgaccaguccagcuacaucguggacuccgugaccgucaagaacgggagcauccaccucuacuucgacaaggccggccagaagaccuacgagcgccacucccugagccacuucgugaaccuggacaaccuccgggccaacaacacgaaggggucccugcccaucaacgugaucgucuucgacggcaagagcaagugcgaggaguccagcgccaaguccgccagcguguacuacucccagcugaugugccagcccauccuccugcuggaccaggcgcucgugagcgacgucggcgacagcgccgagguggccgugaagauguucgacgccuacgucaacaccuucuccagcaccuucaacgugccgauggagaagcugaagacccugguggccacggcggaggccgagcucgccaagaacgucucccuggacaacgugcugagcaccuucaucuccgccgcgcgccagggguucguggacagcgacgucgagaccaaggacgugguggagugccucaagcugucccaccagagcgacaucgaggucaccggcgacuccugcaacaacuacaugcugacguacaacaagguggagaacaugaccccccgggaccucggggccugcaucgacugcagcgcccgccacaucaacgcccagguggccaagucccacaacaucgcgcugaucuggaacgucaaggacuucaugagccuguccgagcagcuccggaagcagauccgcagcgccgccaagaagaacaaccugcccuucaagcugaccugcgccaccacgcgccagguggugaacgucgugaccaccaagaucgcccucaagggcggguga

SEQ ID NO: 18073 - RNA, 5841 nt, Artificial Sequence
  SARS-CoV-2__MT635648.1__non-structural protein 3 (NSP3) CDS gc
auggcccccaccaaggugaccuucggcgacgacacggucaucgaggugcagggguacaagagcgugaacaucaccuucgagcuggacgagcgcaucgacaagguccucaacgagaagugcuccgccuacaccguggagcugggcaccgaggugaacgaguucgcgugcgucguggccgacgccgugaucaagacgcugcagccggucagcgagcuccugaccccccuggggaucgaccucgacgagugguccauggccaccuacuaccuguucgacgagagcggcgaguucaagcuggccucccacauguacugcagcuucuacccccccgacgaggacgaggaggagggggacugcgaggaggaggaguucgagccguccacccaguacgaguacggcacggaggacgacuaccagggcaagccccucgaguucggggcgaccagcgccgcccugcagcccgaggaggagcaggaggaggacuggcuggacgacgacucccagcagaccgugggccagcaggacgggagcgaggacaaccagaccacgaccauccagaccaucguggagguccagccccagcucgagauggagcugaccccgguggugcagacgaucgaggucaacuccuucagcggcuaccugaagcucaccgacaacguguacaucaagaacgccgacaucguggaggaggcgaagaaggucaagcccaccgugguggucaacgccgccaacguguaccugaagcacgggggcggcguggccggggcccugaacaaggcgaccaacaacgccaugcaggucgaguccgacgacuacaucgccacgaacggcccccucaagguggggggcagcugcguccuguccggccacaaccuggccaagcacugccuccacgugguggggcccaacgucaacaagggcgaggacauccagcugcugaagagcgccuacgagaacuucaaccagcacgaggugcuccuggcgccgcugcucuccgccgggaucuucggcgccgaccccauccacagccugcgggugugcgucgacaccgugcgcaccaacguguaccuggccgucuucgacaagaaccucuacgacaagcugguguccagcuuccuggagaugaagagcgagaagcagguggagcagaagaucgccgagauccccaaggaggaggucaagcccuucaucaccgaguccaagccgagcguggagcagcggaagcaggacgacaagaagaucaaggcgugcguggaggaggucacgaccacccucgaggagaccaaguuccugacggagaaccugcuccuguacaucgacaucaacgggaaccugcaccccgacuccgccacccucgugagcgacaucgacaucaccuuccugaagaaggacgcccccuacaucgugggcgacgucgugcaggagggcgugcugaccgccgucgugauccccacgaagaaggccgggggcaccaccgagaugcucgcgaaggcccugcgcaaggugccgaaggacaacuacaucaccacguaccccgggcagggccugaacggguacaccgucgaggaggccaagaccgugcucaagaagugcaaguccgccuucuacauccugcccagcaucaucuccaacgagaagcaggagauccugggcaccgugagcuggaaccuccgggagaugcuggcgcacgccgaggagacccgcaagcugaugcccgucugcguggagacgaaggccaucguguccaccauccagcggaaguacaagggcaucaagauccaggagggggucguggacuacggcgcccgcuucuacuucuacaccagcaagaccacgguggccucccugaucaacacccucaacgaccugaacgagacccuggucaccaugccgcucggguacgugacgcacggccugaaccuggaggaggcggcccgguacaugcgcagccucaaggugcccgccaccgucuccgugagcucccccgacgccgugaccgccuacaacggguaccugaccagcuccagcaagacgcccgaggagcacuucaucgagaccaucucccuggcgggcagcuacaaggacuggagcuacuccggccagagcacccagcucgggaucgaguuccugaagcggggcgacaaguccgucuacuacaccagcaacccgacgaccuuccaccuggacggggaggugaucaccuucgacaaccucaagacccugcugucccuccgcgaggugcggacgaucaaggucuucaccaccguggacaacaucaaccugcacacccagguggucgacaugagcaugacguacggccagcaguucggccccaccuaccuggacggggccgacgugaccaagaucaagccccacaacucccacgagggcaagaccuucuacgugcucccgaacgacgacacgcugcgcgucgaggccuucgaguacuaccacaccaccgaccccagcuuccuggggcgguacauguccgcccucaaccacaccaagaaguggaaguacccccaggugaacggccugacgagcaucaagugggccgacaacaacugcuaccuggcgaccgcccuccugacccugcagcagaucgagcucaaguucaaccccccggcccugcaggacgccuacuaccgcgcgcgggccggggaggccgccaacuucugcgcccugauccucgcguacugcaacaagaccgugggcgagcugggcgacguccgcgagacgauguccuaccuguuccagcacgccaaccucgacagcugcaagcgggugcugaacgucgugugcaagaccugcgggcagcagcagaccacccugaagggcguggaggccgucauguacauggggacccucuccuacgagcaguucaagaagggcgugcagauccccugcacgugcgggaagcaggccaccaaguaccuggugcagcaggagagccccuucgucaugauguccgcccccccggcgcaguacgagcugaagcacggcaccuucaccugcgccagcgaguacacgggcaacuaccagugcgggcacuacaagcacaucaccuccaaggagacccucuacugcaucgacggcgcccugcugaccaagagcagcgaguacaaggggcccaucacggacguguucuacaaggagaacuccuacaccaccaccaucaagcccgugacguacaagcucgacggcgucgugugcaccgagaucgaccccaagcuggacaacuacuacaagaaggacaacagcuacuucaccgagcagccgaucgaccuggugcccaaccagcccuaccccaacgccuccuucgacaacuucaaguucgucugcgacaacaucaaguucgccgacgaccucaaccagcugaccggguacaagaagccggcgagccgcgagcugaaggugacguucuuccccgaccucaacggcgacguggucgccaucgacuacaagcacuacacccccuccuucaagaagggcgccaagcugcugcacaagcccaucguguggcacgugaacaacgccaccaacaaggcgaccuacaagccgaacacguggugcauccggugccucuggagcaccaagcccgucgagaccuccaacagcuucgacgugcugaaguccgaggacgcccaggggauggacaaccuggccugcgaggaccucaagcccgugagcgaggaggucguggagaaccccaccauccagaaggacgugcuggagugcaacgucaagacgaccgagguggugggcgacaucauccugaagccggccaacaacucccucaagaucaccgaggaggucgggcacaccgaccugauggccgcguacguggacaacagcucccugacgaucaagaagcccaacgagcucagccgcgugcugggccugaagacccucgccacccacgggcuggccgccgucaacuccgugcccugggacaccaucgccaacuacgcgaagccguuccugaacaagguggucagcacgaccaccaacaucgugacccgcugccucaaccgggugugcacgaacuacaugcccuacuucuucacccugcugcuccagcugugcaccuucacccgcuccaccaacagccggaucaaggccuccaugcccacgaccaucgccaagaacaccgucaagagcgugggcaaguucugccuggaggccagcuucaacuaccucaagucccccaacuucagcaagcugaucaacaucaucaucugguuccugcuccuguccgugugccugggcagccucaucuacuccaccgccgcgcuggggguccugaugagcaaccucggcaugccguccuacugcacgggguaccgcgagggcuaccugaacagcaccaacgugaccaucgccaccuacugcacgggcuccauccccugcagcgugugccuguccgggcucgacagccuggacaccuaccccucccuggagaccauccagaucaccaucagcuccuucaagugggaccucacggccuucggccuggucgccgagugguuccuggccuacauccucuucacccgguucuucuacgugcuggggcuggcggccaucaugcagcucuucuucagcuacuucgccgugcacuucaucuccaacagcuggcugauguggcugaucaucaaccugguccagauggcccccaucuccgcgauggugcgcauguacaucuucuucgccagcuucuacuacguguggaagagcuacguccacgugguggacggcugcaacuccagcaccugcaugaugugcuacaagcggaaccgcgccacccgggucgagugcacgaccaucgugaacgggguccgccgguccuucuacguguacgccaacggcggcaagggguucugcaagcuccacaacuggaacugcgugaacugcgacaccuucugcgccggcagcaccuucaucuccgacgaggucgcgcgcgaccugagccugcaguucaagcggccgaucaaccccacggaccaguccagcuacaucguggacuccgugaccgucaagaacgggagcauccaccucuacuucgacaaggccggccagaagaccuacgagcgccacucccugagccacuucgugaaccuggacaaccuccgggccaacaacaccaaggggucccugcccaucaacgugaucgucuucgacggcaagagcaagugcgaggaguccagcgccaaguccgccagcguguacuacucccagcugaugugccagcccauccuccugcuggaccaggcgcucgugagcgacgucggcgacagcgccgagguggccgugaagauguucgacgccuacgucaacacguucuccagcaccuucaacgugccgauggagaagcugaagacccugguggccaccgcggaggccgagcucgccaagaacgucucccuggacaacgugcugagcacguucaucuccgccgcgcgccagggguucguggacagcgacgucgagaccaaggacgugguggagugccucaagcugucccaccagagcgacaucgaggucaccggcgacuccugcaacaacuacaugcugaccuacaacaagguggagaacaugacgccccgggaccucggggccugcaucgacugcagcgcccgccacaucaacgcccagguggccaagucccacaacaucgcgcugaucuggaacgucaaggacuucaugagccuguccgagcagcuccggaagcagauccgcagcgccgccaagaagaacaaccugcccuucaagcugaccugcgccaccacccgccagguggugaacgucgugacgaccaagaucgcccucaagggcggguga

SEQ ID NO: 18074 - RNA, 5841 nt, Artificial Sequence
  SARS-CoV-2__MT627263.1__non-structural protein 3 (NSP3) CDS gc
auggcccccaccaaggugaccuucggcgacgacacggucaucgaggugcagggguacaagagcgugaacaucaccuucgagcuggacgagcgcaucgacaagguccucaacgagaagugcuccgccuacaccguggagcugggcaccgaggugaacgaguucgcgugcgucguggccgacgccgugaucaagacgcugcagccggucagcgagcuccugaccccccuggggaucgaccucgacgagugguccauggccaccuacuaccuguucgacgagagcggcgaguucaagcuggccucccacauguacugcagcuucuacccccccgacgaggacgaggaggagggggacugcgaggaggaggaguucgagccguccacccaguacgaguacggcacggaggacgacuaccagggcaagccccucgaguucggggcgaccagcgccgcccugcagcccgaggaggagcaggaggaggacuggcuggacgacgacucccagcagaccgugggccagcaggacgggagcgaggacaaccagaccacgaccauccagaccaucguggagguccagccccagcucgagauggagcugaccccgguggugcagacgaucgaggucaacuccuucagcggcuaccugaagcucaccgacaacguguacaucaagaacgccgacaucguggaggaggcgaagaaggucaagcccaccgugguggucaacgccgccaacguguaccugaagcacgggggcggcguggccggggcccugaacaaggcgaccaacaacgccaugcaggucgaguccgacgacuacaucgccacgaacggcccccucaagguggggggcagcugcguccuguccggccacaaccuggccaagcacugccuccacgugguggggcccaacgucaacaagggcgaggacauccagcugcugaagagcgccuacgagaacuucaaccagcacgaggugcuccuggcgccgcugcucuccgccgggaucuucggcgccgaccccauccacagccugcgggugugcgucgacaccgugcgcaccaacguguaccuggccgucuucgacaagaaccucuacgacaagcugguguccagcuuccuggagaugaagagcgagaagcagguggagcagaagaucgccgagauccccaaggaggaggucaagcccuucaucaccgaguccaagccgagcguggagcagcggaagcaggacgacaagaagaucaaggcgugcguggaggaggucacgaccacccucgaggagaccaaguuccugacggagaaccugcuccuguacaucgacaucaacgggaaccugcaccccgacuccgccacccucgugagcgacaucgacaucaccuuccugaagaaggacgcccccuacaucgugggcgacgucgugcaggagggcgugcugaccgccgucgugauccccacgaagaaggccgggggcaccaccgagaugcucgcgaaggcccugcgcaaggugccgaccgacaacuacaucacgaccuaccccgggcagggccugaacggguacaccgucgaggaggccaagaccgugcucaagaagugcaaguccgccuucuacauccugcccagcaucaucuccaacgagaagcaggagauccugggcaccgugagcuggaaccuccgggagaugcuggcgcacgccgaggagacgcgcaagcugaugcccgucugcguggagaccaaggccaucguguccaccauccagcggaaguacaagggcauccgcauccaggagggggucguggacuacggcgcccgguucuacuucuacaccagcaagacgaccguggccucccugaucaacacccucaacgaccugaacgagacccuggucacgaugccgcucggguacgugacccacggccugaaccuggaggaggcggcccgcuacaugcggagccucaaggugcccgccaccgucuccgugagcucccccgacgccgugaccgccuacaacggguaccugacgagcuccagcaagacccccgaggagcacuucaucgagaccaucucccuggcgggcagcuacaaggacuggagcuacuccggccagagcacccagcucgggaucgaguuccugaagcgcggcgacaaguccgucuacuacacgagcaacccgaccaccuuccaccuggacggggaggugaucaccuucgacaaccucaagacgcugcugucccuccgggaggugcgcaccaucaaggucuucaccaccguggacaacaucaaccugcacacgcagguggucgacaugagcaugaccuacggccagcaguucggccccaccuaccuggacggggccgacgugaccaagaucaagccccacaacucccacgagggcaagacguucuacgugcucccgaacgacgacacccugcgggucgaggccuucgaguacuaccacaccaccgaccccagcuuccuggggcgcuacauguccgcccucaaccacacgaagaaguggaaguacccccaggugaacggccugaccagcaucaagugggccgacaacaacugcuaccuggcgaccgcccuccugacccugcagcagaucgagcucaaguucaaccccccggcccugcaggacgccuacuaccgggcgcgcgccggggaggccgccaacuucugcgcccugauccucgcguacugcaacaagacggugggcgagcugggcgacguccgggagaccauguccuaccuguuccagcacgccaaccucgacagcugcaagcgcgugcugaacgucgugugcaagaccugcgggcagcagcagaccacccugaagggcguggaggccgucauguacauggggacgcucuccuacgagcaguucaagaagggcgugcagauccccugcaccugcgggaagcaggccaccaaguaccuggugcagcaggagagccccuucgucaugauguccgcccccccggcgcaguacgagcugaagcacggcaccuucacgugcgccagcgaguacaccggcaacuaccagugcgggcacuacaagcacaucaccuccaaggagacccucuacugcaucgacggcgcccugcugacgaagagcagcgaguacaaggggcccaucaccgacguguucuacaaggagaacuccuacaccaccacgaucaagcccgugaccuacaagcucgacggcgucgugugcaccgagaucgaccccaagcuggacaacuacuacaagaaggacaacagcuacuucaccgagcagccgaucgaccuggugcccaaccagcccuaccccaacgccuccuucgacaacuucaaguucgucugcgacaacaucaaguucgccgacgaccucaaccagcugacgggguacaagaagccggcgagccgggagcugaaggugaccuucuuccccgaccucaacggcgacguggucgccaucgacuacaagcacuacacccccuccuucaagaagggcgccaagcugcugcacaagcccaucguguggcacgugaacaacgccaccaacaaggcgacguacaagccgaacaccuggugcauccgcugccucuggagcaccaagcccgucgagaccuccaacagcuucgacgugcugaaguccgaggacgcccaggggauggacaaccuggccugcgaggaccucaagcccgugagcgaggaggucguggagaaccccacgauccagaaggacgugcuggagugcaacgucaagaccaccgagguggugggcgacaucauccugaagccggccaacaacucccucaagaucaccgaggaggucgggcacacggaccugauggccgcguacguggacaacagcucccugaccaucaagaagcccaacgagcucagccgcgugcugggccugaagacccucgccacccacgggcuggccgccgucaacuccgugcccugggacacgaucgccaacuacgcgaagccguuccugaacaagguggucagcaccaccaccaacaucgugacgcggugccucaaccgcgugugcaccaacuacaugcccuacuucuucacccugcugcuccagcugugcaccuucacccgguccacgaacagccgcaucaaggccuccaugcccaccaccaucgccaagaacaccgucaagagcgugggcaaguucugccuggaggccagcuucaacuaccucaagucccccaacuucagcaagcugaucaacaucaucaucugguuccugcuccuguccgugugccugggcagccucaucuacuccacggccgcgcuggggguccugaugagcaaccucggcaugccguccuacugcaccggguaccgggagggcuaccugaacagcaccaacgugaccaucgccacguacugcaccggcuccauccccugcagcgugugccuguccgggcucgacagccuggacaccuaccccucccuggagaccauccagaucacgaucagcuccuucaagugggaccucaccgccuucggccuggucgccgagugguuccuggccuacauccucuucacccgcuucuucuacgugcuggggcuggcggccaucaugcagcucuucuucagcuacuucgccgugcacuucaucuccaacagcuggcugauguggcugaucaucaaccugguccagauggcccccaucuccgcgauggugcggauguacaucuucuucgccagcuucuacuacguguggaagagcuacguccacgugguggacggcugcaacuccagcaccugcaugaugugcuacaagcgcaaccgggccacgcgcgucgagugcaccaccaucgugaacgggguccggcgcuccuucuacguguacgccaacggcggcaagggguucugcaagcuccacaacuggaacugcgugaacugcgacaccuucugcgccggcagcacguucaucuccgacgaggucgcgcgggaccugagccugcaguucaagcgcccgaucaaccccaccgaccaguccagcuacaucguggacuccgugaccgucaagaacgggagcauccaccucuacuucgacaaggccggccagaagaccuacgagcggcacucccugagccacuucgugaaccuggacaaccuccgcgccaacaacacgaaggggucccugcccaucaacgugaucgucuucgacggcaagagcaagugcgaggaguccagcgccaaguccgccagcguguacuacucccagcugaugugccagcccauccuccugcuggaccaggcgcucgugagcgacgucggcgacagcgccgagguggccgugaagauguucgacgccuacgucaacaccuucuccagcaccuucaacgugccgauggagaagcugaagacccugguggccacggcggaggccgagcucgccaagaacgucucccuggacaacgugcugagcaccuucaucuccgccgcgcggcagggguucguggacagcgacgucgagaccaaggacgugguggagugccucaagcugucccaccagagcgacaucgaggucaccggcgacuccugcaacaacuacaugcugacguacaacaagguggagaacaugaccccccgcgaccucggggccugcaucgacugcagcgcccggcacaucaacgcccagguggccaagucccacaacaucgcgcugaucuggaacgucaaggacuucaugagccuguccgagcagcuccgcaagcagauccgcagcgccgccaagaagaacaaccugcccuucaagcugaccugcgccaccacgcggcagguggugaacgucgugaccaccaagaucgcccucaagggcggguga

SEQ ID NO: 18075 - RNA, 5841 nt, Artificial Sequence
  SARS-CoV-2__MT627414.1__non-structural protein 3 (NSP3) CDS gc
auggcccccaccaaggugaccuucggcgacgacacggucaucgaggugcagggguacaagagcgugaacaucaccuucgagcuggacgagcgcaucgacaagguccucaacgagaagugcuccgccuacaccguggagcugggcaccgaggugaacgaguucgcgugcgucguggccgacgccgugaucaagacgcugcagccggucagcgagcuccugaccccccuggggaucgaccucgacgagugguccauggccaccuacuaccuguucgacgagagcggcgaguucaagcuggccucccacauguacugcagcuucuacccccccgacgaggacgaggaggagggggacugcgaggaggaggaguucgagccguccacccaguacgaguacggcacggaggacgacuaccagggcaagccccucgaguucggggcgaccagcgccgcccugcagcccgaggaggagcaggaggaggacuggcuggacgacgacucccagcagaccgugggccagcaggacgggagcgaggacaaccagaccacgaccauccagaccaucguggagguccagccccagcucgagauggagcugaccccgguggugcagacgaucgaggucaacuccuucagcggcuaccugaagcucaccgacaacguguacaucaagaacgccgacaucguggaggaggcgaagaaggucaagcccaccgugguggucaacgccgccaacguguaccugaagcacgggggcggcguggccggggcccugaacaaggcgaccaacaacgccaugcaggucgaguccgacgacuacaucgccacgaacggcccccucaagguggggggcagcugcguccuguccggccacaaccuggccaagcacugccuccacgugguggggcccaacgucaacaagggcgaggacauccagcugcugaagagcgccuacgagaacuucaaccagcacgaggugcuccuggcgccgcugcucuccgccgggaucuucggcgccgaccccauccacagccugcgggugugcgucgacaccgugcgcaccaacguguaccuggccgucuucgacaagaaccucuacgacaagcugguguccagcuuccuggagaugaagagcgagaagcagguggagcagaagaucgccgagauccccaaggaggaggucaagcccuucaucaccgaguccaagccgagcguggagcagcggaagcaggacgacaagaagaucaaggcgugcguggaggaggucacgaccacccucgaggagaccaaguuccugacggagaaccugcuccuguacaucgacaucaacgggaaccugcaccccgacuccgccacccucgugagcgacaucgacaucaccuuccugaagaaggacgccuccuacaucgugggcgacgucgugcaggagggcgugcugaccgccgucgugauccccacgaagaaggccgggggcaccaccgagaugcucgcgaaggcccugcgcaaggugcccaccgacaacuacaucacgaccuacccggggcagggccugaacggguacaccgucgaggaggccaagaccgugcucaagaagugcaagagcgccuucuacauccugcccuccaucaucagcaacgagaagcaggagauccugggcaccguguccuggaaccuccgggagaugcuggcgcacgccgaggagacgcgcaagcugaugcccgucugcguggagaccaaggccaucgugagcaccauccagcggaaguacaagggcaucaagauccaggagggggucguggacuacggcgcccgcuucuacuucuacaccuccaagacgaccguggccagccugaucaacacccucaacgaccugaacgagacccuggucacgaugccccucggguacgugacccacggccugaaccuggaggaggcggcccgguacaugcgcucccucaaggugccggccaccgucagcguguccagccccgacgccgugaccgccuacaacggguaccugacguccagcuccaagacccccgaggagcacuucaucgagaccaucagccuggcgggcagcuacaaggacugguccuacagcggccaguccacccagcucgggaucgaguuccugaagcggggcgacaagagcgucuacuacacguccaaccccaccaccuuccaccuggacggggaggugaucaccuucgacaaccucaagacgcugcugagccuccgcgaggugcggaccaucaaggucuucaccaccguggacaacaucaaccugcacacgcagguggucgacauguccaugaccuacggccagcaguucggcccgaccuaccuggacggggccgacgugaccaagaucaagccccacaacagccacgagggcaagacguucuacgugcuccccaacgacgacacccugcgcgucgaggccuucgaguacuaccacaccaccgacccguccuuccuggggcgguacaugagcgcccucaaccacacgaagaaguggaaguacccccaggugaacggccugaccuccaucaagugggccgacaacaacugcuaccuggcgaccgcccuccugacccugcagcagaucgagcucaaguucaacccccccgcccugcaggacgccuacuaccgcgcgcgggccggggaggccgccaacuucugcgcccugauccucgcguacugcaacaagacggugggcgagcugggcgacguccgcgagaccaugagcuaccuguuccagcacgccaaccucgacuccugcaagcgggugcugaacgucgugugcaagaccugcgggcagcagcagaccacccugaagggcguggaggccgucauguacauggggacgcucagcuacgagcaguucaagaagggcgugcagaucccgugcaccugcgggaagcaggccaccaaguaccuggugcagcaggagucccccuucgucaugaugagcgccccccccgcgcaguacgagcugaagcacggcaccuucacgugcgccuccgaguacaccggcaacuaccagugcgggcacuacaagcacaucaccagcaaggagacccucuacugcaucgacggcgcccugcugacgaagagcuccgaguacaaggggccgaucaccgacguguucuacaaggagaacagcuacaccaccacgaucaagcccgugaccuacaagcucgacggcgucgugugcaccgagaucgaccccaagcuggacaacuacuacaagaaggacaacuccuacuucaccgagcagcccaucgaccuggugccgaaccagcccuaccccaacgccagcuucgacaacuucaaguucgucugcgacaacaucaaguucgccgacgaccucaaccagcugacgggguacaagaagcccgcgucccgcgagcugaaggugaccuucuucccggaccucaacggcgacguggucgccaucgacuacaagcacuacacccccagcuucaagaagggcgccaagcugcugcacaagcccaucguguggcacgugaacaacgccaccaacaaggcgacguacaagcccaacaccuggugcauccggugccucugguccaccaagccggucgagaccagcaacuccuucgacgugcugaagagcgaggacgcccaggggauggacaaccuggccugcgaggaccucaagcccguguccgaggaggucguggagaaccccacgauccagaaggacgugcuggagugcaacgucaagaccaccgagguggugggcgacaucauccugaagcccgccaacaacagccucaagaucaccgaggaggucgggcacacggaccugauggccgcguacguggacaacuccagccugaccaucaagaagccgaacgagcucucccgcgugcugggccugaagacccucgccacccacgggcuggccgccgucaacagcgugcccugggacacgaucgccaacuacgcgaagcccuuccugaacaagguggucuccaccaccaccaacaucgugacgcgcugccucaaccgggugugcaccaacuacaugccguacuucuucacccugcugcuccagcugugcaccuucacccgcagcacgaacucccggaucaaggccagcaugcccaccaccaucgccaagaacaccgucaagagcgugggcaaguucugccuggaggccuccuucaacuaccucaagagccccaacuucuccaagcugaucaacaucaucaucugguuccugcuccugagcgugugccugggcucccucaucuacagcacggccgcgcuggggguccugauguccaaccucggcaugcccagcuacugcaccggguaccgcgagggcuaccugaacuccaccaacgugaccaucgccacguacugcaccggcagcaucccgugcuccgugugccugagcgggcucgacucccuggacaccuaccccagccuggagaccauccagaucacgaucuccagcuucaagugggaccucaccgccuucggccuggucgccgagugguuccuggccuacauccucuucacccgguucuucuacgugcuggggcuggcggccaucaugcagcucuucuucuccuacuucgccgugcacuucaucagcaacuccuggcugauguggcugaucaucaaccugguccagauggcccccaucagcgcgauggugcgcauguacaucuucuucgccagcuucuacuacguguggaaguccuacguccacgugguggacggcugcaacagcuccaccugcaugaugugcuacaagcggaaccgcgccacgcgggucgagugcaccaccaucgugaacgggguccgccggagcuucuacguguacgccaacggcggcaagggguucugcaagcuccacaacuggaacugcgugaacugcgacaccuucugcgccggcuccacguucaucagcgacgaggucgcgcgcgaccugucccugcaguucaagcggcccaucaacccgaccgaccagagcuccuacaucguggacagcgugaccgucaagaacggguccauccaccucuacuucgacaaggccggccagaagaccuacgagcgccacagccugucccacuucgugaaccuggacaaccuccgggccaacaacacgaaggggagccugcccaucaacgugaucgucuucgacggcaaguccaagugcgaggagagcuccgccaagagcgccuccguguacuacagccagcugaugugccagcccauccuccugcuggaccaggcgcucgugagcgacgucggcgacuccgccgagguggccgugaagauguucgacgccuacgucaacaccuucagcuccaccuucaacgugcccauggagaagcugaagacccugguggccacggcggaggccgagcucgccaagaacgucagccuggacaacgugcuguccaccuucaucagcgccgcgcgccagggguucguggacuccgacgucgagaccaaggacgugguggagugccucaagcugagccaccaguccgacaucgaggucaccggcgacagcugcaacaacuacaugcugacguacaacaagguggagaacaugaccccgcgggaccucggggccugcaucgacugcuccgcccgccacaucaacgcccagguggccaagagccacaacaucgcgcugaucuggaacgucaaggacuucaugucccugagcgagcagcuccggaagcagauccgcuccgccgccaagaagaacaaccugcccuucaagcugaccugcgccaccacgcgccagguggugaacgucgugaccaccaagaucgcccucaagggcggguga

SEQ ID NO: 18076 - RNA, 5841 nt, Artificial Sequence
  SARS-CoV-2__MT627437.1__non-structural protein 3 (NSP3) CDS gc
auggcccccaccaaggugaccuucggcgacgacacggucaucgaggugcagggguacaagagcgugaacaucaccuucgagcuggacgagcgcaucgacaagguccucaacgagaagugcuccgccuacaccguggagcugggcaccgaggugaacgaguucgcgugcgucguggccgacgccgugaucaagacgcugcagccggucagcgagcuccugaccccccuggggaucgaccucgacgagugguccauggccaccuacuaccuguucgacgagagcggcgaguucaagcuggccucccacauguacugcagcuucuacccccccgacgaggacgaggaggagggggacugcgaggaggaggaguucgagccguccacccaguacgaguacggcacggaggacgacuaccagggcaagccccucgaguucggggcgaccagcgccgcccugcagcccgaggaggagcaggaggaggacuggcuggacgacgacucccagcagaccgugggccagcaggacgggagcgaggacaaccagaccacgaccauccagaccaucguggagguccagccccagcucgagauggagcugaccccgguggugcagacgaucgaggucaacuccuucagcggcuaccugaagcucaccgacaacguguacaucaagaacgccgacaucguggaggaggcgaagaaggucaagcccaccgugguggucaacgccgccaacguguaccugaagcacgggggcggcguggccggggcccugaacaaggcgaccaacaacgccaugcaggucgaguccgacgacuacaucgccacgaacggcccccucaagguggggggcagcugcguccuguccggccacaaccuggccaagcacugccuccacgugguggggcccaacgucaacaagggcgaggacauccagcugcugaagagcgccuacgagaacuucaaccagcacgaggugcuccuggcgccgcugcucuccgccgggaucuucggcgccgaccccauccacagccugcgggugugcgucgacaccgugcgcaccaacguguaccuggccgucuucgacaagaaccucuacgacaagcugguguccagcuuccuggagaugaagagcgagaagcagguggagcagaagaucgccgagauccccaaggaggaggucaagcccuucaucaccgaguccaagccgagcguggagcagcggaagcaggacgacaagaagaucaaggcgugcguggaggaggucacgaccacccucgaggagaccaaguuccugacggagaaccugcuccuguacaucgacaucaacgggaaccugcaccccgacuccgccacccucgugagcgacaucgacaucaccuuccugaagaaggacgcccccuacaucgugggcgacgucgugcaggagggcgugcugaccgccgucgugauccccacgaagaaggccgggggcaccaccgagaugcucgcgaaggcccugcgcaaggugccgaccgacaacuacaucacgaccuaccccgggcagggccugaacggguacaccgucgaggaggccaagaccgugcucaagaagugcaaguccgccuucuacauccugcccagcaucaucuccaacgagaagcaggagauccugggcaccgugagcuggaaccuccgggagaugcuggcgcacgccgaggagacgcgcaagcugaugcccgucugcguggagaccaaggccaucguguccaccauccagcggaaguacaagggcaucaagauccaggagggggucguggacuacggcgcccgcuucuacuucuacaccagcaagacgaccguggccucccugaucaacacccucaacgaccugagcgagacccuggucacgaugccgcucggguacgugacccacggccugaaccuggaggaggcggcccgguacaugcgcucccucaaggugcccgccaccgucagcguguccagccccgacgccgugaccgccuacaacggguaccugacguccagcuccaagacccccgaggagcacuucaucgagaccaucagccuggcgggcagcuacaaggacugguccuacagcggccaguccacccagcucgggaucgaguuccugaagcggggcgacaagagcgucuacuacacguccaacccgaccaccuuccaccuggacggggaggugaucaccuucgacaaccucaagacgcugcugagccuccgcgaggugcggaccaucaaggucuucaccaccguggacaacaucaaccugcacacgcagguggucgacauguccaugaccuacggccagcaguucggccccaccuaccuggacggggccgacgugaccaagaucaagccccacaacagccacgagggcaagacguucuacgugcucccgaacgacgacacccugcgcgucgaggccuucgaguacuaccacaccaccgaccccuccuuccuggggcgguacaugagcgcccucaaccacacgaagaaguggaaguacccccaggugaacggccugaccuccaucaagugggccgacaacaacugcuaccuggcgaccgcccuccugacccugcagcagaucgagcucaaguucaaccccccggcccugcaggacgccuacuaccgcgcgcgggccggggaggccgccaacuucugcgcccugauccucgcguacugcaacaagacggugggcgagcugggcgacguccgcgagaccaugagcuaccuguuccagcacgccaaccucgacuccugcaagcgggugcugaacgucgugugcaagaccugcgggcagcagcagaccacccugaagggcguggaggccgucauguacauggggacgcucagcuacgagcaguucaagaagggcgugcagauccccugcaccugcgggaagcaggccaccaaguaccuggugcagcaggagucccccuucgucaugaugagcgcccccccggcgcaguacgagcugaagcacggcaccuucacgugcgccuccgaguacaccggcaacuaccagugcgggcacuacaagcacaucaccagcaaggagacccucuacugcaucgacggcgcccugcugacgaagagcuccgaguacaaggggcccaucaccgacguguucuacaaggagaacagcuacaccaccacgaucaagcccgugaccuacaagcucgacggcgucgugugcaccgagaucgaccccaagcuggacaacuacuacaagaaggacaacuccuacuucaccgagcagccgaucgaccuggugcccaaccagcccuaccccaacgccagcuucgacaacuucaaguucgucugcgacaacaucaaguucgccgacgaccucaaccagcugacgggguacaagaagccggcgucccgcgagcugaaggugaccuucuuccccgaccucaacggcgacguggucgccaucgacuacaagcacuacacccccagcuucaagaagggcgccaagcugcugcacaagcccaucguguggcacgugaacaacgccaccaacaaggcgacguacaagccgaacaccuggugcauccggugccucugguccaccaagcccgucgagaccagcaacuccuucgacgugcugaagagcgaggacgcccaggggauggacaaccuggccugcgaggaccucaagcccguguccgaggaggucguggagaaccccacgauccagaaggacgugcuggagugcaacgucaagaccaccgagguggugggcgacaucauccugaagccggccaacaacagccucaagaucaccgaggaggucgggcacacggaccugauggccgcguacguggacaacuccagccugaccaucaagaagcccaacgagcucucccgcgugcugggccugaagacccucgccacccacgggcuggccgccgucaacagcgugcccugggacacgaucgccaacuacgcgaagccguuccugaacaagguggucuccaccaccaccaacaucgugacgcgcugccucaaccgggugugcaccaacuacaugcccuacuucuucacccugcugcuccagcugugcaccuucacccgcagcacgaacucccggaucaaggccagcaugcccaccaccaucgccaagaacaccgucaagagcgugggcaaguucugccuggaggccuccuucaacuaccucaagagccccaacuucuccaagcugaucaacaucaucaucugguuccugcuccugagcgugugccugggcucccucaucuacagcacggccgcgcuggggguccugauguccaaccucggcaugccgagcuacugcaccggguaccgcgagggcuaccugaacuccaccaacgugaccaucgccacguacugcaccggcagcauccccugcuccgugugccugagcgggcucgacucccuggacaccuaccccagccuggagaccauccagaucacgaucuccagcuucaagugggaccucaccgccuucggccuggucgccgagugguuccuggccuacauccucuucacccgguucuucuacgugcuggggcuggcggccaucaugcagcucuucuucuccuacuucgccgugcacuucaucagcaacuccuggcugauguggcugaucaucaaccugguccagauggcccccaucagcgcgauggugcgcauguacaucuucuucgccagcuucuacuacguguggaaguccuacguccacgugguggacggcugcaacagcuccaccugcaugaugugcuacaagcggaaccgcgccacgcgggucgagugcaccaccaucgugaacgggguccgccggagcuucuacguguacgccaacggcggcaagggguucugcaagcuccacaacuggaacugcgugaacugcgacaccuucugcgccggcuccacguucaucagcgacgaggucgcgcgcgaccugucccugcaguucaagcggccgaucaaccccaccgaccagagcuccuacaucguggacagcgugaccgucaagaacggguccauccaccucuacuucgacaaggccggccagaagaccuacgagcgccacagccugucccacuucgugaaccuggacaaccuccgggccaacaacacgaaggggagccugcccaucaacgugaucgucuucgacggcaaguccaagugcgaggagagcuccgccaagagcgccuccguguacuacagccagcugaugugccagcccauccuccugcuggaccaggcgcucgugagcgacgucggcgacuccgccgagguggccgugaagauguucgacgccuacgucaacaccuucagcuccaccuucaacgugccgauggagaagcugaagacccugguggccacggcggaggccgagcucgccaagaacgucagccuggacaacgugcuguccaccuucaucagcgccgcgcgccagggguucguggacuccgacgucgagaccaaggacgugguggagugccucaagcugagccaccaguccgacaucgaggucaccggcgacagcugcaacaacuacaugcugacguacaacaagguggagaacaugaccccccgggaccucggggccugcaucgacugcuccgcccgccacaucaacgcccagguggccaagagccacaacaucgcgcugaucuggaacgucaaggacuucaugucccugagcgagcagcuccggaagcagauccgcuccgccgccaagaagaacaaccugcccuucaagcugaccugcgccaccacgcgccagguggugaacgucgugaccaccaagaucgcccucaagggcggguga

SEQ ID NO: 18077 - RNA, 5841 nt, Artificial Sequence
  SARS-CoV-2__MT627748.1__non-structural protein 3 (NSP3) CDS gc
auggcccccaccaaggugaccuucggcgacgacacggucaucgaggugcagggguacaagagcgugaacaucaccuucgagcuggacgagcgcaucgacaagguccucaacgagaagugcuccgccuacaccguggagcugggcaccgaggugaacgaguucgcgugcgucguggccgacgccgugaucaagacgcugcagccggucagcgagcuccugaccccccuggggaucgaccucgacgagugguccauggccaccuacuaccuguucgacgagagcggcgaguucaagcuggccucccacauguacugcagcuucuacccccccgacgaggacgaggaggagggggacugcgaggaggaggaguucgagccguccacccaguacgaguacggcacggaggacgacuaccagggcaagccccucgaguucggggcgaccagcgccgcccugcagcccgaggaggagcaggaggaggacuggcuggacgacgacucccagcagaccgugggccagcaggacgggagcgaggacaaccagaccacgaccauccagaccaucguggagguccagccccagcucgagauggagcugaccccgguggugcagacgaucgaggucaacuccuucagcggcuaccugaagcucaccgacaacguguacaucaagaacgccgacaucguggaggaggcgaagaaggucaagcccaccgugguggucaacgccgccaacguguaccugaagcacgggggcggcguggccggggcccugaacaaggcgaccaacaacgccaugcaggucgaguccgacgacuacaucgccacgaacggcccccucaagguggggggcagcugcguccuguccggccacaaccuggccaagcacugccuccacgugguggggcccaacgucaacaagggcgaggacauccagcugcugaagagcgccuacgagaacuucaaccagcacgaggugcuccuggcgccgcugcucuccgccgggaucuucggcgccgaccccauccacagccugcgggugugcgucgacaccgugcgcaccaacguguaccuggccgucuucgacaagaaccucuacgacaagcugguguccagcuuccuggagaugaagagcgagaagcagguggagcagaagaucgccgagauccccaaggaggaggucaagcccuucaucaccgaguccaagccgagcguggagcagcggaagcaggacgacaagaagaucaaggcgugcguggaggaggucacgaccacccucgaggagaccaaguuccugacggagaaccugcuccuguacaucgacaucaacgggaaccugcaccccgacuccgccacccucgugagcgacaucgacaucaccuuccugaagaaggacgcccccuacaucgugggcgacgucgugcaggagggcgugcugaccgccgucgugauccccacgaagaaggccgggggcaccaccgagaugcucgcgaaggcccugcgcaaggugccgaccgacaacuacaucacgaccuaccccgggcagggccugaacggguacaccgucgaggaggccaagaccgugcucaagaagugcaaguccgccuucuacauccugcccagcaucaucuccaacgagaagcaggagauccugggcaccgugagcuggaaccuccgggagaugcuggcgcacgccgaggagacgcgcaagcugaugcccgucugcguggagaccaaggccaucguguccaccauccagcggaaguacaagggcaucaagauccaggagggggucguggacuacggcgcccgcuucuacuucuacaccagcaagacgaccguggccucccugaucaacacccucaacgaccugaacgagacccuggucacgaugccgcucggguacgugacccacggccugaaccuggaggaggcggcccgguacaugcgcagccucaaggugcccgccaccgucuccgugagcucccccgacgccgugaccgccuacaacggguaccugacgagcuccagcaagacccccgaggagcacuucaucgagaccaucucccuggcgggcagcuacaaggacuggagcuacuccggccagagcacccagcucgggaucgaguuccugaagcggggcgacaaguccgucuacuacacgagcaacccgaccaccuuccaccuggacggggaggugaucaccuucgacaaccucaagacgcugcugucccuccgcgaggugcggaccaucaaggucuucaccaccguggacaacaucaaccugcacacgcagguggucgacaugagcaugaccuacggccagcaguucggccccaccuaccuggacggggccgacgugaccaagaucaagccccacaacucccacgagggcaagacguucuacgugcucccgaacgacgacacccugcgcgucgaggccuucgaguacuaccacaccaccgaccccagcuuccuggggcgguacauguccgcccucaaccacacgaagaaguggaaguacccccaggugaacggccugaccagcaucaagugggccgacaacaacugcuaccuggcgaccgcccuccugacccugcagcagaucgagcucaaguucaaccccccggcccugcaggacgccuacuaccgcgcgcgggccggggaggccgccaacuucugcgcccugauccucgcguacugcaacaagacggugggcgagcugggcgacguccgcgagaccauguccuaccuguuccagcacgccaaccucgacagcugcaagcgggugcugaacgucgugugcaagaccugcgggcagcagcagaccacccugaagggcguggaggccgucauguacauggggacgcucuccuacgagcaguucaagaagggcgugcagauccccugcaccugcgggaagcaggccaccaaguaccuggugcagcaggagagccccuucgucaugauguccgcccccccggcgcaguacgagcugaaguacggcaccuucacgugcgccagcgaguacaccggcaacuaccagugcgggcacuacaagcacaucaccuccaaggagacccucuacugcaucgacggcgcccugcugacgaagagcagcgaguacaaggggcccaucaccgacguguucuacaaggagaacuccuacaccaccacgaucaagcccgugaccuacaagcucgacggcgucgugugcaccgagaucgaccccaagcuggacaacuacuacaagaaggacaacagcuacuucaccgagcagccgaucgaccuggugcccaaccagcccuaccccaacgccuccuucgacaacuucaaguucgucugcgacaacaucaaguucgccgacgaccucaaccagcugacgggguacaagaagccggcgagccgcgagcugaaggugaccuucuuccccgaccucaacggcgacguggucgccaucgacuacaagcacuacacccccuccuucaagaagggcgccaagcugcugcacaagcccaucguguggcacgugaacaacgccaccaacaaggcgacguacaagccgaacaccuggugcauccggugccucuggagcaccaagcccgucgagaccuccaacagcuucgacgugcugaaguccgaggacgcccaggggauggacaaccuggccugcgaggaccucaagcccgugagcgaggaggucguggagaaccccacgauccagaaggacgugcuggagugcaacgucaagaccaccgagguggugggcgacaucauccugaagccggccaacaacucccucaagaucaccgaggaggucgggcacacggaccugauggccgcguacguggacaacagcucccugaccaucaagaagcccaacgagcucagccgcgugcugggccugaagacccucgccacccacgggcuggccgccgucaacuccgugcccugggacacgaucgccaacuacgcgaagccguuccugaacaagguggucagcaccaccaccaacaucgugacgcgcugccucaaccgggugugcaccaacuacaugcccuacuucuucacccugcugcuccagcugugcaccuucacccgcuccacgaacagccggaucaaggccuccaugcccaccaccaucgccaagaacaccgucaagagcgugggcaaguucugccuggaggccagcuucaacuaccucaagucccccaacuucagcaagcugaucaacaucaucaucugguuccugcuccuguccgugugccugggcagccucaucuacuccacggccgcgcuggggguccugaugagcaaccucggcaugccguccuacugcaccggguaccgcgagggcuaccugaacagcaccaacgugaccaucgccacguacugcaccggcuccauccccugcagcgugugccuguccgggcucgacagccuggacaccuaccccucccuggagaccauccagaucacgaucagcuccuucaagugggaccucaccgccuucggccuggucgccgagugguuccuggccuacauccucuucacccgguucuucuacgugcuggggcuggcggccaucaugcagcucuucuucagcuacuucgccgugcacuucaucuccaacagcuggcugauguggcugaucaucaaccugguccagauggcccccaucuccgcgauggugcgcauguacaucuucuucgccagcuucuacuacguguggaagagcuacguccacgugguggacggcugcaacuccagcaccugcaugaugugcuacaagcggaaccgcgccacgcgggucgagugcaccaccaucgugaacgggguccgccgguccuucuacguguacgccaacggcggcaagggguucugcaagcuccacaacuggaacugcgugaacugcgacaccuucugcgccggcagcacguucaucuccgacgaggucgcgcgcgaccugagccugcaguucaagcggccgaucaaccccaccgaccaguccagcuacaucguggacuccgugaccgucaagaacgggagcauccaccucuacuucgacaaggccggccagaagaccuacgagcgccacucccugagccacuucgugaaccuggacaaccuccgggccaacaacacgaaggggucccugcccaucaacgugaucgucuucgacggcaagagcaagugcgaggaguccagcgccaaguccgccagcguguacuacucccagcugaugugccagcccauccuccugcuggaccaggcgcucgugagcgacgucggcgacagcgccgagguggccgugaagauguucgacgccuacgucaacaccuucuccagcaccuucaacgugccgauggagaagcugaagacccugguggccacggcggaggccgagcucgccaagaacgucucccuggacaacgugcugagcaccuucaucuccgccgcgcgccagggguucguggacagcgacgucgagaccaaggacgugguggagugccucaagcugucccaccagagcgacaucgaggucaccggcgacuccugcaacaacuacaugcugacguacaacaagguggagaacaugaccccccgggaccucggggccugcaucgacugcagcgcccgccacaucaacgcccagguggccaagucccacaacaucgcgcugaucuggaacgucaaggacuucaugagccuguccgagcagcuccggaagcagauccgcagcgccgccaagaagaacaaccugcccuucaagcugaccugcgccaccacgcgccagguggugaacgucgugaccaccaagaucgcccucaagggcggguga

SEQ ID NO: 18078 - RNA, 5841 nt, Artificial Sequence
  SARS-CoV-2__MT627757.1__non-structural protein 3 (NSP3) CDS gc
auggcccccaccaaggugaccuucggcgacgacacggucaucgaggugcagggguacaagagcgugaacaucaccuucgagcuggacgagcgcaucgacaagguccucaacgagaagugcuccgccuacaccguggagcugggcaccgaggugaacgaguucgcgugcgucguggccgacgccgugaucaagacgcugcagccggucagcgagcuccugaccccccuggggaucgaccucgacgagugguccauggccaccuacuaccuguucgacgagagcggcgaguucaagcuggccucccacauguacugcagcuucuacccccccgacgaggacgaggaggagggggacugcgaggaggaggaguucgagccguccacccaguacgaguacggcacggaggacgacuaccagggcaagccccucgaguucggggcgaccagcgccgcccugcagcccgaggaggagcaggaggaggacuggcuggacgacgacucccagcagaccguggugcagcaggacggcagcgaggacaaccagaccacgaccauccagaccaucgucgaggugcagccccagcucgagauggagcugaccccggugguccagacgaucgaggugaacuccuucagcggguaccugaagcucaccgacaacguguacaucaagaacgccgacaucgucgaggaggcgaagaaggugaagcccaccguggucgugaacgccgccaacguguaccugaagcacggcgggggcgucgccggcgcccugaacaaggcgaccaacaacgccaugcagguggaguccgacgacuacaucgccacgaacgggccccucaaggucggcgggagcugcgugcuguccggccacaaccuggccaagcacugccuccacguggucggccccaacgugaacaagggggaggacauccagcugcugaagagcgccuacgagaacuucaaccagcacgaggugcuccuggcgccgcugcucuccgccggcaucuucggggccgaccccauccacagccugcgggucugcguggacaccgugcgcaccaacgucuaccuggccguguucgacaagaaccucuacgacaagcugguguccagcuuccuggagaugaagagcgagaagcaggucgagcagaagaucgccgagauccccaaggaggaggugaagcccuucaucaccgaguccaagccgagcguggagcagcggaagcaggacgacaagaagaucaaggcgugcgucgaggaggugacgaccacccucgaggagaccaaguuccugacggagaaccugcuccuguacaucgacaucaacggcaaccugcaccccgacuccgccacccucgugagcgacaucgacaucaccuuccugaagaaggacgcccccuacaucgucggggacguggugcaggagggcguccugaccgccguggugauccccacgaagaaggccggcgggaccaccgagaugcucgcgaaggcccugcgcaaggucccgaccgacaacuacaucacgaccuaccccggccaggggcugaacggcuacaccguggaggaggccaagaccgugcucaagaagugcaaguccgccuucuacauccugcccagcaucaucuccaacgagaagcaggagauccuggggaccgucagcuggaaccuccgggagaugcuggcgcacgccgaggagacgcgcaagcugaugcccgugugcguggagaccaaggccaucgucuccaccauccagcggaaguacaagggcaucaagauccaggagggcgugguggacuacggggcccgcuucuacuucuacaccagcaagacgaccgucgccucccugaucaacacccucaacgaccugaacgagacccuggugacgaugccgcucggcuacgugacccacgggcugaaccuggaggaggcggcccgguacaugcgcagccucaagguccccgccaccguguccgugagcucccccgacgccgucaccgccuacaacggcuaccugacgagcuccagcaagacccccgaggagcacuucaucgagaccaucucccuggcggggagcuacaaggacuggagcuacuccggccagagcacccagcucggcaucgaguuccugaagcggggggacaaguccguguacuacacgagcaacccgaccaccuuccaccuggacggcgaggugaucaccuucgacaaccucaagacgcugcugucccuccgcgagguccggaccaucaagguguucaccaccguggacaacaucaaccugcacacgcaggucguggacaugagcaugaccuacgggcagcaguucggccccaccuaccuggacggcgccgacgugaccaagaucaagccccacaacucccacgaggggaagacguucuacguccucccgaacgacgacacccugcgcguggaggccuucgaguacuaccacaccaccgaccccagcuuccugggccgguacauguccgcccucaaccacacgaagaaguggaaguacccccaggugaacgggcugaccagcaucaagugggccgacaacaacugcuaccuggcgaccgcccuccugacccugcagcagaucgagcucaaguucaaccccccggcccugcaggacgccuacuaccgcgcgcgggccggcgaggccgccaacuucugcgcccugauccucgcguacugcaacaagacggucggggagcugggcgacgugcgcgagaccauguccuaccuguuccagcacgccaaccucgacagcugcaagcggguccugaacguggugugcaagaccugcggccagcagcagaccacccugaagggggucgaggccgugauguacaugggcacgcucuccuacgagcaguucaagaagggggugcagauccccugcaccugcggcaagcaggccaccaaguaccugguccagcaggagagccccuucgugaugauguccgcccccccggcgcaguacgagcugaagcacgggaccuucacgugcgccagcgaguacaccggcaacuaccagugcggccacuacaagcacaucaccuccaaggagacccucuacugcaucgacggggcccugcugacgaagagcagcgaguacaagggccccaucaccgacguguucuacaaggagaacuccuacaccaccacgaucaagcccgucaccuacaagcucgacgggguggugugcaccgagaucgaccccaagcuggacaacuacuacaagaaggacaacagcuacuucaccgagcagccgaucgaccugguccccaaccagcccuaccccaacgccuccuucgacaacuucaaguucgugugcgacaacaucaaguucgccgacgaccucaaccagcugacgggcuacaagaagccggcgagccgcgagcugaaggugaccuucuuccccgaccucaacggggacgucguggccaucgacuacaagcacuacacccccuccuucaagaagggcgccaagcugcugcacaagcccaucguguggcacgucaacaacgccaccaacaaggcgacguacaagccgaacaccuggugcauccggugccucuggagcaccaagcccguggagaccuccaacagcuucgacgugcugaaguccgaggacgcccagggcauggacaaccuggccugcgaggaccucaagcccgucagcgaggaggugguggagaaccccacgauccagaaggacguccuggagugcaacgugaagaccaccgagguggucggggacaucauccugaagccggccaacaacucccucaagaucaccgaggaggugggccacacggaccugauggccgcguacguggacaacagcucccugaccaucaagaagcccaacgagcucagccgcguccuggggcugaagacccucgccacccacggccuggccgccgugaacuccgugcccugggacacgaucgccaacuacgcgaagccguuccugaacaaggucgugagcaccaccaccaacaucgugacgcgcugccucaaccgggucugcaccaacuacaugcccuacuucuucacccugcugcuccagcugugcaccuucacccgcuccacgaacagccggaucaaggccuccaugcccaccaccaucgccaagaacaccgugaagagcguggggaaguucugccuggaggccagcuucaacuaccucaagucccccaacuucagcaagcugaucaacaucaucaucugguuccugcuccuguccgucugccugggcagccucaucuacuccacggccgcgcugggcgugcugaugagcaaccucgggaugccguccuacugcaccggcuaccgcgagggguaccugaacagcaccaacgugaccaucgccacguacugcaccggcuccauccccugcagcgucugccuguccggccucgacagccuggacaccuaccccucccuggagaccauccagaucacgaucagcuccuucaagugggaccucaccgccuucgggcugguggccgagugguuccuggccuacauccucuucacccgguucuucuacgugcugggccuggcggccaucaugcagcucuucuucagcuacuucgccguccacuucaucuccaacagcuggcugauguggcugaucaucaaccuggugcagauggcccccaucuccgcgauggugcgcauguacaucuucuucgccagcuucuacuacgucuggaagagcuacgugcacguggucgacgggugcaacuccagcaccugcaugaugugcuacaagcggaaccgcgccacgcggguggagugcaccaccaucgucaacggcgugcgccgguccuucuacguguacgccaacgggggcaagggcuucugcaagcuccacaacuggaacugcgucaacugcgacaccuucugcgccgggagcacguucaucuccgacgagguggcgcgcgaccugagccugcaguucaagcggccgaucaaccccaccgaccaguccagcuacaucguggacuccgucaccgugaagaacggcagcauccaccucuacuucgacaaggccgggcagaagaccuacgagcgccacucccugagccacuucgugaaccuggacaaccuccgggccaacaacacgaagggcucccugcccaucaacgucaucguguucgacgggaagagcaagugcgaggaguccagcgccaaguccgccagcguguacuacucccagcugaugugccagcccauccuccugcuggaccaggcgcucgucagcgacgugggcgacagcgccgagguggccgucaagauguucgacgccuacgugaacaccuucuccagcaccuucaacgugccgauggagaagcugaagacccuggucgccacggcggaggccgagcucgccaagaacgugucccuggacaacgugcugagcaccuucaucuccgccgcgcgccagggcuucgucgacagcgacguggagaccaaggacguggucgagugccucaagcugucccaccagagcgacaucgaggugaccggggacuccugcaacaacuacaugcugacguacaacaagguggagaacaugaccccccgggaccucggcgccugcaucgacugcagcgcccgccacaucaacgcccaggucgccaagucccacaacaucgcgcugaucuggaacgugaaggacuucaugagccuguccgagcagcuccggaagcagauccgcagcgccgccaagaagaacaaccugcccuucaagcugaccugcgccaccacgcgccagguggucaacguggugaccaccaagaucgcccucaaggggggcuga

SEQ ID NO: 18079 - RNA, 5841 nt, Artificial Sequence
  SARS-CoV-2__MT628061.1__non-structural protein 3 (NSP3) CDS gc
auggcccccaccaaggugaccuucggcgacgacacggucaucgaggugcagggguacaagagcgugaacaucaccuucgagcuggacgagcgcaucgacaagguccucaacgagaagugcuccgccuacaccguggagcugggcaccgaggugaacgaguucgcgugcgucguggccgacgccgugaucaagacgcugcagccggucagcgagcuccugaccccccuggggaucgaccucgacgagugguccauggccaccuacuaccuguucgacgagagcggcgaguucaagcuggccucccacauguacugcagcuucuacccccccgacgaggacgaggaggagggggacugcgaggaggaggaguucgagccguccacccaguacgaguacggcacggaggacgacuaccagggcaagccccucgaguucggggcgaccagcgccgcccugcagcccgaggaggagcaggaggaggacuggcuggacgacgacucccagcagaccgugggccagcaggacgggagcgaggacaaccagaccacgaccauccagaccaucguggagguccagccccagcucgagauggagcugaccccgguggugcagacgaucgaggucaacuccuucagcggcuaccugaagcucaccgacaacguguacaucaagaacgccgacaucguggaggaggcgaagaaggucaagcccaccgugguggucaacgccgccaacguguaccugaagcacgggggcggcguggccggggcccugaacaaggcgaccaacaacgccaugcaggucgaguccgacgacuacaucgccacgaacggcccccucaagguggggggcagcugcguccuguccggccacaaccuggccaagcacugccuccacgugguggggcccaacgucaacaagggcgaggacauccagcugcugaagagcgccuacgagaacuucaaccagcacgaggugcuccuggcgccgcugcucuccgccgggaucuucggcgccgaccccauccacagccugcgggugugcgucgacaccgugcgcaccaacguguaccuggccgucuucgacaagaaccucuacgacaagcugguguccagcuuccuggagaugaagagcgagaagcagguggagcagaagaucgccgagauccccaaggaggaggucaagcccuucaucaccgaguccaagccgagcguggagcagcggaagcaggacgacaagaagaucaaggcgugcguggaggaggucacgaccacccucgaggagaccaaguuccugacggagaaccugcuccuguacaucgacaucaacgggaaccugcaccccgacuccgccacccucgugagcgacaucgacaucaccuuccugaagaaggacgcccccuacaucgugggcgacgucgugcaggagggcgugcugaccgccgucgugauccccacgaagaaggccgggggcaccaccgagaugcucgcgaaggcccugcgcaaggugccgaccgacaacuacaucacgaccuaccccgggcagggccugaacggguacaccgucgaggaggccaagaccgugcucaagaagugcaaguccgccuucuacauccugcccagcaucaucuccaacgagaagcaggagauccugggcaccgugagcuggaaccuccgggagaugcuggcgcacgccgaggagacgcgcaagcugaugcccgucugcguggagaccaaggccaucguguccaccauccagcggaaguacaagggcaucaagauccaggagggggucguggacuacggcgcccgcuucuacuucuacaccagcaagacgaccguggccucccugaucaacacccucaacgaccugaacgagacccuggucacgaugccgcucggguacgugacccacggccugaaccuggaggaggcggcccgguacaugcgcagccucaaggugcccgccaccgucuccgugagcucccccgacgccgugaccgccuacaacggguaccugacgagcuccagcaagacccccgaggagcacuucaucgagaccaucucccuggcgggcagcuacaaggacuggagcuacuccggccagagcacccagcucgggaucgaguuccugaagcggggcgacaaguccgucuacuacacgagcaacccgaccaccuuccaccuggacggggaggugaucaccuucgacaaccucaagacgcugcugucccuccgcgaggugcggaccaucaaggucuucaccaccguggacaacaucaaccugcacacgcagguggucgacaugagcaugaccuacggccagcaguucggccccaccuaccuggacggggccgacgugaccaagaucaagccccacaacucccacgagggcaagacguucuacgugcucccgaacgacgacacccugcgcgucgaggccuucgaguacuaccacaccaccgaccccagcuuccuggggcgguacauguccgcccucaaccacacgaagaaguggaaguacccccaggugaacggccugaccagcaucaagugggccgacaacaacugcuaccuggcgaccgcccuccugacccugcagcagaucgagcucaaguucaaccccccggcccugcaggacgccuacuaccgcgcgcgggccggggaggccgccaacuucugcgcccugauccucgcguacugcaacaagacggugggcgagcugggcgacguccgcgagaccauguccuaccuguuccagcacgccaaccucgacagcugcaagcgggugcugaacgucgugugcaagaccugcgggcagcagcagaccacccugaagggcguggaggccgucauguacauggggacgcucuccuacgagcaguucaagaagggcgugcagauccccugcaccugcgggaagcaggccaccaaguaccuggugcagcaggagagccccuucgucaugauguccgcccccccggcgcaguacgagcugaagcacggcaccuucacgugcgccagcgaguacaccggcaacuaccagugcgggcacuacaagcacaucaccuccaaggagacccucuacugcaucgacggcgcccugcugacgaagagcagcgaguacaaggggcccaucaccgacguguucuacaaggagaacuccuacaccaccacgaucaagcccgugaccuacaagcucgacggcgucgugugcaccgagaucgaccccaagcuggacaacuacuacaagaaggacaacagcuacuucaccgagcagccgaucgaccuggugcccaaccagcccuaccccaacgccuccuucgacaacuucaaguucgucugcgacaacaucaaguucgccgacgaccucaaccagcugacgggguacaagaagccggcgagccgcgagcugaaggugaccuucuuccccgaccucaacggcgacguggucgccaucgacuacaagcacuacacccccuccuucaagaagggcgccaagcugcugcacaagcccaucguguggcacgugaacaacgccaccaacaaggcgacguacaagccgaacaccuggugcauccggugccucuggagcaccaagcccgucgagaccuccaacagcuucgacgugcugaaguccgaggacgcccaggggauggacaaccuggccugcgaggaccucaagcccgugagcgaggaggucguggagaaccccacgauccagaaggacgugcuggagugcaacgucaagaccaccgagguggugggcgacaucauccugaagccggccaacaacucccucaagaucaccgaggaggucgggcacacggaccugauggccgcguacguggacaacagcucccugaccaucaagaagcccaacgagcucagccgcgugcugggccugaagacccucgccacccacgggcuggccgccgucaacuccgugcccugggacacgaucgccaacuacgcgaagccguuccugaacaagguggucagcaccaccaccaacaucgugacgcgcugccucaaccgggugugcaccaacuacaugcccuacuucuucacccugcugcuccagcugugcaccuucacccgcuccacgaacagccggaucaaggccuccaugcccaccaccaucgccaagaacaccgucaagagcgugggcaaguucugccuggaggccagcuucaacuaccucaagucccccaacuucagcaagcugaucaacaucaucaucugguuccugcuccuguccgugugccugggcagccucaucuacuccacggccgcgcuggggguccugaugagcaaccucggcaugccguucuacugcaccggguaccgcgagggcuaccugaacuccaccaacgugaccaucgccacguacugcaccggcagcauccccugcuccgugugccugagcgggcucgacucccuggacaccuaccccagccuggagaccauccagaucacgaucuccagcuucaagugggaccucaccgccuucggccuggucgccgagugguuccuggccuacauccucuucacccgguucuucuacgugcuggggcuggcggccaucaugcagcucuucuucuccuacuucgccgugcacuucaucagcaacuccuggcugauguggcugaucaucaaccugguccagauggcccccaucagcgcgauggugcgcauguacaucuucuucgccuccuucuacuacguguggaagagcuacguccacgugguggacggcugcaacagcuccaccugcaugaugugcuacaagcggaaccgcgccacgcgggucgagugcaccaccaucgugaacgggguccgccggagcuucuacguguacgccaacggcggcaagggguucugcaagcuccacaacuggaacugcgugaacugcgacaccuucugcgccggcuccacguucaucagcgacgaggucgcgcgcgaccugucccugcaguucaagcggccgaucaaccccaccgaccagagcuccuacaucguggacagcgugaccgucaagaacggguccauccaccucuacuucgacaaggccggccagaagaccuacgagcgccacagccugucccacuucgugaaccuggacaaccuccgggccaacaacacgaaggggagccugcccaucaacgugaucgucuucgacggcaaguccaagugcgaggagagcuccgccaagagcgccuccguguacuacagccagcugaugugccagcccauccuccugcuggaccaggcgcucguguccgacgucggcgacagcgccgagguggccgugaagauguucgacgccuacgucaacaccuucagcuccaccuucaacgugccgauggagaagcugaagacccugguggccacggcggaggccgagcucgccaagaacgucagccuggacaacgugcuguccaccuucaucagcgccgcgcgccagggguucguggacuccgacgucgagaccaaggacgugguggagugccucaagcugagccaccaguccgacaucgaggucaccggcgacagcugcaacaacuacaugcugacguacaacaagguggagaacaugaccccccgggaccucggggccugcaucgacugcuccgcccgccacaucaacgcccagguggccaagagccacaacaucgcgcugaucuggaacgucaaggacuucaugucccugagcgagcagcuccggaagcagauccgcuccgccgccaagaagaacaaccugcccuucaagcugaccugcgccaccacgcgccagguggugaacgucgugaccaccaagaucgcccucaagggcggguga

SEQ ID NO: 18080 - RNA, 5841 nt, Artificial Sequence
  SARS-CoV-2__MT628098.1__non-structural protein 3 (NSP3) CDS gc
auggcccccaccaaggugaccuucggcgacgacacggucaucgaggugcagggguacaagagcgugaacaucaccuucgagcuggacgagcgcaucgacaagguccucaacgagaagugcuccgccuacaccguggagcugggcaccgaggugaacgaguucgcgugcgucguggccgacgccgugaucaagacgcugcagccggucagcgagcuccugaccccccuggggaucgaccucgacgagugguccauggccaccuacuaccuguucgacgagagcggcgaguucaagcuggccucccacauguacugcagcuucuacccccccgacgaggacgaggaggagggggacugcgaggaggaggaguucgagccguccacccaguacgaguacggcacggaggacgacuaccagggcaagccccucgaguucggggcgaccagcgccgcccugcagcccgaggaggagcaggaggaggacuggcuggacgacgacucccagcagaccgugggccagcaggacgggagcgaggacaaccagaccacgaccauccagaccaucguggagguccagccccagcucgagauggagcugaccccgguggugcagacgaucgaggucaacuccuucagcggcuaccugaagcucaccgacaacguguacaucaagaacgccgacaucguggaggaggcgaagaaggucaagcccaccgugguggucaacgccgccaacguguaccugaagcacgggggcggcguggccggggcccugaacaaggcgaccaacaacgccaugcaggucgaguccgacgacuacaucgccacgaacggcccccucaagguggggggcagcugcguccuguccggccacaaccuggccaagcacugccuccacgugguggggcccaacgucaacaagggcgaggacauccagcugcugaagagcgccuacgagaacuucaaccagcacgaggugcuccuggcgccgcugcucuccgccgggaucuucggcgccgaccccauccacagccugcgggugugcgucgacaccgugcgcaccaacguguaccuggccgucuucgacaagaaccucuacgacaagcugguguccagcuuccuggagaugaagagcgagaagcagguggagcagaagaucgccgagauccccaaggaggaggucaagcccuucaucaccgaguccaagccgagcguggagcagcggaagcaggacgacaagaagaucaaggcgugcguggaggaggucacgaccacccucgaggagaccaaguuccugacggagaaccugcuccuguacaucgacaucaacgggaaccugcaccccgacuccgccacccucgugagcgacaucgacaucaccuuccugaagaaggacgcccccuacaucgugggcgacgucgugcaggagggcgugcugaccgccgucgugauccccacgaagaaggccgggggcaccaccgagaugcucgcgaaggcccugcgcaaggugccgaccgacaacuacaucacgaccuaccccgggcagggccugaacggguacaccgucgaggaggccaagaccgugcucaagaagugcaaguccgccuucuacauccugcccagcaucaucuccaacgagaagcaggagauccugggcaccgugagcuggaaccuccgggagaugcuggcgcacgccgaggagacgcgcaagcugaugcccgucugcguggagaccaaggccaucguguccaccauccagcggaaguacaagggcaucaagauccaggagggggucguggacuacggcgcccgcuucuacuucuacaccagcaagacgaccguggccucccugaucaacacccucaacgaccugaacgagacccuggucacgaugccgcucggguacgugacccacggccugaaccuggaggaggcggcccgguacaugcgcagccucaaggugcccgccaccgucuccgugagcucccccgacgccgugaccgccuacaacggguaccugacgagcuccagcaagacccccgaggagcacuucaucgagaccaucucccuggcgggcagcuacaaggacuggagcuacuccggccagagcacccagcucgggaucgaguuccugaagcggggcgacaaguccgucuacuacacgagcaacccgaccaccuuccaccuggacggggaggugaucaccuucgacaaccucaagacgcugcugucccuccgcgaggugcggaccaucaaggucuucaccaccguggacaacaucaaccugcacacgcagguggucgacaugagcaugaccuacggccagcaguucggccccaccuaccuggacggggccgacgugaccaagaucaagccccacaacucccacgagggcaagacguucuacgugcucccgaacgacgacacccugcgcgucgaggccuucgaguacuaccacaccaccgaccccagcuuccuggggcgguacauguccgcccucaaccacacgaagaaguggaaguacccccaggugaacggccugaccagcaucaagugggccgacaacaacugcuaccuggcgaccgcccuccugacccugcagcagaucgagcucaaguucaaccccccggcccugcaggacgccuacuaccgcgcgcgggccggggaggccgccaacuucugcgcccugauccucgcguacugcaacaagacggugggcgagcugggcgacguccgcgagaccauguccuaccuguuccagcacgccaaccucgacagcugcaagcgggugcugaacgucgugugcaagaccugcgggcagcagcagaccacccugaagggcguggaggccgucauguacauggggacgcucuccuacgagcaguucaagaagggcgugcagauccccugcaccugcgggaagcaggccaccaaguaccuggugcagcaggagagccccuucgucaugauguccgcccccccggcgcaguacgagcugaagcacggcaccuucacgugcgccagcgaguacaccggcaacuaccagugcgggcacuacaagcacaucaccuccaaggagacccucuacugcaucgacggcgcccugcugacgaagagcagcgaguacaaggggcccaucaccgacguguucuacaaggagaacuccuacaccaccacgaucaagcccgugaccuacaagcucgacggcgucgugugcaccgagaucgaccccaagcuggacaacuacuacaagaaggacaacagcuacuucaccgagcagccgaucgaccuggugcccaaccagcccuaccccaacgccuccuucgacaacuucaaguucgucugcgacaacaucaaguucgccgacgaccucaaccagcugacgggguacaagaagccggcgagccgcgagcugaaggugaccuucuuccccgaccucaacggcgacguggucgccaucgacuacaagcacuacacccccuccuucaagaagggcgccaagcugcugcacaagcccaucguguggcacgugaacaacgccaccaacaaggcgacguacaagccgaacaccuggugcauccggugccucuggagcaccaagcccgucgagaccuccaacagcuucgacgugcugaaguccgaggacgcccaggggauggacaaccuggccugcgaggaccucaagcccgugagcgaggaggucguggagaaccccacgauccagaaggacgugcuggagugcaacgucaagaccaccgagguggugggcgacaucauccugaagccggccaacaacucccucaagaucaccgaggaggucgggcacacggaccugauggccgcguacguggacaacagcucccugaccaucaagaagcccaacgagcucagccgcgugcugggccugaagacccucgccacccacgggcuggccgccgucaacuccgugcccugggacacgaucgccaacuacgcgaagccguuccugaacaagguggucagcaccaccaccaacaucgugacgcgcugccucaaccgggugugcaccaacuacaugcccuacuucuucacccugcugcuccagcugugcaccuucacccgcuccacgaacagccggaucaaggccuccaugcccaccaccaucgccaagaacaccgucaagagcgugggcaaguucugccuggaggccagcuucaacuaccucaagucccccaacuucagcaagcugaucaacaucaucaucugguuccugcuccuguccgugugccugggcagccucaucuacuccacggccgcgcuggggguccugaugagcaaccucggcaugccguccuacugcaccggguaccgcgagggcuaccugaacagcaccaacgugaccaucgccacguacugcaccggcuccauccccugcagcgugugccuguccgggcucgacagccuggacaccuaccccucccuggagaccauccagaucacgaucagcuccuucaagugggaccucaccgccuucggccuggucgccgagugguuccuggccuacauccucuucacccgguucuucuacgugcuggggcuggcggccaucaugcagcucuucuucagcuacuucgccgugcacuucaucuccaacagcuggcugauguggcugaucaucaaccugguccagauggcccccaucuccgcgauggugcgcauguacaucuucuucgccagcuucuacuacguguggaagagcuacguccacgugguggacggcugcaacuccagcaccugcaugaugugcuacaagcggaaccgcgccacgcgggucgagugcaccaccaucgugaacgggguccgccgguccuucuacguguacgccaacggcggcaagggguucugcaagcuccacaacuggaacugcgugaacugcgacaccuucugcgccggcagcacguucaucuccgacgaggucgcgcgcgaccugagccugcaguucaagcggccgaucaaccccaccgaccaguccagcuacaucguggacuccgugaccgucaagaacgggagcauccaccucuacuucgacaaggccggccagaagaccuacgagcgccacucccugagccacuucgugaaccuggacaaccuccgggccaacaacacgaaggggucccugcccaucaacgugaucgucuucgacggcaagagcaagugcgaggaguccagcgccaaguccgccagcguguacuacucccagcugaugugccagcccauccuccugcuggaccaggcgcucgugagcgacgucggcgacagcgccgagguggccgugaagauguucgacgccuacgucaacaccuucuccagcaccuucaacgugccgauggagaagcugaagacccugguggccacggcggaggccgagcucgccaagaacgucucccuggacaacgugcugagcaccuucaucuccgccgcgcgccagggguucguggacagcgacgucgagaccaaggacgugguggagugccucaagcugucccaccagagcgacaucgaggucaccggcgacuccugcaacaacuacaugcugacguacaacaagguggagaacaugaccccccgggaccucggggccugcaucgacugcagcgcccgccacaucaacgcccagguggccaagucccacaacaucgcgcugaucuggaacgucaaggacuucaugagccuguccgagcagcuccggaagcagauccgcagcgccgccaagaagaacaaccugcccuucaagcugaccugcgccaccacgcgccagguggugaacgucaucaccaccaagaucgcccucaagggcggguga

SEQ ID NO: 18081 - RNA, 5841 nt, Artificial Sequence
  SARS-CoV-2__MT628104.1__non-structural protein 3 (NSP3) CDS gc
auggcccccaccaaggugaccuucggcgacgacacggucaucgaggugcagggguacaagagcgugaacaucaccuucgagcuggacgagcgcaucgacaagguccucaacgagaagugcuccgccuacaccguggagcugggcaccgaggugaacgaguucgcgugcgucguggccgacgccgugaucaagacgcugcagccggucagcgagcuccugaccccccuggggaucgaccucgacgagugguccauggccaccuacuaccuguucgacgagagcggcgaguucaagcuggccucccacauguacugcagcuucuacccccccgacgaggacgaggaggagggggacugcgaggaggaggaguucgagccguccacccaguacgaguacggcacggaggacgacuaccagggcaagccccucgaguucggggcgaccagcgccgcccugcagcccgaggaggagcaggaggaggacuggcuggacgacgacucccagcagaccgugggccagcaggacgggagcgaggacaaccagaccacgaccauccagaccaucguggagguccagccccagcucgagauggagcugaccccgguggugcagacgaucgaggucaacuccuucagcggcuaccugaagcucaccgacaacguguacaucaagaacgccgacaucguggaggaggcgaagaaggucaagcccaccgugguggucaacgccgccaacguguaccugaagcacgggggcggcguggccggggcccugaacaaggcgaccaacaacgccaugcaggucgaguccgacgacuacaucgccacgaacggcccccucaagguggggggcagcugcguccuguccggccacaaccuggccaagcacugccuccacgugguggggcccaacgucaacaagggcgaggacauccagcugcugaagagcgccuacgagaacuucaaccagcacgaggugcuccuggcgccgcugcucuccgccgggaucuucggcgccgaccccauccacagccugcgggugugcgucgacaccgugcgcaccaacguguaccuggccgucuucgacaagaaccucuacgacaagcugguguccagcuuccuggagaugaagagcgagaagcagguggagcagaagaucgccgagauccccaaggaggaggucaagcccuucaucaccgaguccaagccgagcguggagcagcggaagcaggacgacaagaagaucaaggcgugcguggaggaggucacgaccacccucgaggagaccaaguuccugacggagaaccugcuccuguacaucgacaucaacgggaaccugcaccccgacuccgccacccucgugagcgacaucgacaucaccuuccugaagaaggacgcccccuacaucgugggcgacgucgugcaggagggcgugcugaccgccgucgugauccccacgaagaaggccgggggcaccaccgagaugcucgcgaaggcccugcgcaaggugccgaccgacaacuacaucacgaccuaccccgggcagggccugaacggguacaccgucgaggaggccaagaccgugcucaagaagugcaaguccgccuucuacauccugcccagcaucaucuccaacgagaagcaggagauccugggcaccgugagcuggaaccuccgggagaugcuggcgcacgccgaggagacgcgcaagcugaugcccgucugcguggagaccaaggccaucguguccaccauccagcggaaguacaagggcaucaagauccaggagggggucguggacuacggcgcccgcuucuacuucuacaccagcaagacgaccguggccucccugaucaacacccucaacgaccugaacgagacccuggucacgaugccgcucggguacgugacccacggccugaaccuggaggaggcggcccgguacaugcgcagccucaaggugcccgccaccgucuccgugagcucccccgacgccgugaccgccuacaacggguaccugacgagcuccagcaagacccccgaggagcacuucaucgagaucaucucccuggcgggcagcuacaaggacuggagcuacuccggccagagcacccagcucgggaucgaguuccugaagcggggcgacaaguccgucuacuacaccagcaacccgacgaccuuccaccuggacggggaggugaucaccuucgacaaccucaagacccugcugucccuccgcgaggugcggacgaucaaggucuucaccaccguggacaacaucaaccugcacacccagguggucgacaugagcaugacguacggccagcaguucggccccaccuaccuggacggggccgacgugaccaagaucaagccccacaacucccacgagggcaagaccuucuacgugcucccgaacgacgacacgcugcgcgucgaggccuucgaguacuaccacaccaccgaccccagcuuccuggggcgguacauguccgcccucaaccacaccaagaaguggaaguacccccaggugaacggccugacgagcaucaagugggccgacaacaacugcuaccuggcgaccgcccuccugacccugcagcagaucgagcucaaguucaaccccccggcccugcaggacgccuacuaccgcgcgcgggccggggaggccgccaacuucugcgcccugauccucgcguacugcaacaagaccgugggcgagcugggcgacguccgcgagacgauguccuaccuguuccagcacgccaaccucgacagcugcaagcgggugcugaacgucgugugcaagaccugcgggcagcagcagaccacccugaagggcguggaggccgucauguacauggggacccucuccuacgagcaguucaagaagggcgugcagauccccugcacgugcgggaagcaggccaccaaguaccuggugcagcaggagagccccuucgucaugauguccgcccccccggcgcaguacgagcugaagcacggcaccuucaccugcgccagcgaguacacgggcaacuaccagugcgggcacuacaagcacaucaccuccaaggagacccucuacugcaucgacggcgcccugcugaccaagagcagcgaguacaaggggcccaucacggacguguucuacaaggagaacuccuacaccaccaccaucaagcccgugacguacaagcucgacggcgucgugugcaccgagaucgaccccaagcuggacaacuacuacaagaaggacaacagcuacuucaccgagcagccgaucgaccuggugcccaaccagcccuaccccaacgccuccuucgacaacuucaaguucgucugcgacaacaucaaguucgccgacgaccucaaccagcugaccggguacaagaagccggcgagccgcgagcugaaggugacguucuuccccgaccucaacggcgacguggucgccaucgacuacaagcacuacacccccuccuucaagaagggcgccaagcugcugcacaagcccaucguguggcacgugaacaacgccaccaacaaggcgaccuacaagccgaacacguggugcauccggugccucuggagcaccaagcccgucgagaccuccaacagcuucgacgugcugaaguccgaggacgcccaggggaugggcaaccuggccugcgaggaccucaagcccgugagcgaggaggucguggagaaccccaccauccagaaggacgugcuggagugcaacgucaagacgaccgagguggugggggacaucauccugaagccggccaacaacucccucaagaucaccgaggaggucggccacaccgaccugauggccgcguacguggacaacagcucccugacgaucaagaagcccaacgagcucagccgcgugcuggggcugaagacccucgccauccacggccuggccgccgucaacuccgugcccugggacaccaucgccaacuacgcgaagccguuccugaacaagguggucagcaccacgaccaacaucgugacccgcugccucaaccgggugugcaccaacuacaugcccuacuucuucacgcugcugcuccagcugugcaccuucacccgcuccaccaacagccggaucaaggccuccaugcccaccacgaucgccaagaacaccgucaagagcgugggcaaguucugccuggaggccagcuucaacuaccucaagucccccaacuucagcaagcugaucaacaucaucaucugguuccugcuccuguccgugugccuggggagccucaucuacuccaccgccgcgcugggcguccugaugagcaaccucgggaugccguccuacugcaccggcuaccgcgagggcuaccugaacagcacgaacgugaccaucgccaccuacugcaccggguccauccccugcagcgugugccuguccggccucgacagccuggacacguaccccucccuggagaccauccagaucaccaucagcuccuucaagugggaccucaccgccuucgggcuggucgccgagugguuccuggccuacauccucuucacgcgguucuucuacgugcugggccuggcggccaucaugcagcucuucuucagcuacuucgccgugcacuucaucuccaacagcuggcugauguggcugaucaucaaccugguccagauggcccccaucuccgcgauggugcgcauguacaucuucuucgccagcuucuacuacguguggaagagcuacguccacgugguggacgggugcaacuccagcaccugcaugaugugcuacaagcggaaccgcgccacccgggucgagugcaccacgaucgugaacggcguccgccgguccuucuacguguacgccaacggcgggaagggcuucugcaagcuccacaacuggaacugcgugaacugcgacaccuucugcgccgggagcaccuucaucuccgacgaggucgcgcgcgaccugagccugcaguucaagcggccgaucaaccccaccgaccaguccagcuacaucguggacuccgugacggucaagaacggcagcauccaccucuacuucgacaaggccgggcagaagaccuacgagcgccacucccugagccacuucgugaaccuggacaaccuccgggccaacaacaccaagggcucccugcccaucaacgugaucgucuucgacggcaagagcaagugcgaggaguccagcgccaaguccgccagcguguacuacucccagcugaugugccagcccauccuccugcuggaccaggcgcucgugagcgacgucggggacagcgccgagguggccgugaagauguucgacgccuacgucaacaccuucuccagcacguucaacgugccgauggagaagcugaagacccugguggccaccgcggaggccgagcucgccaagaacgucucccuggacaacgugcugagcaccuucaucuccgccgcgcgccagggcuucguggacagcgacgucgagacgaaggacgugguggagugccucaagcugucccaccagagcgacaucgaggucaccggggacuccugcaacaacuacaugcugaccuacaacaagguggagaacaugaccccccgggaccucggcgccugcaucgacugcagcgcccgccacaucaacgcccagguggccaagucccacaacaucgcgcugaucuggaacgucaaggacuucaugagccuguccgagcagcuccggaagcagauccgcagcgccgccaagaagaacaaccugcccuucaagcugacgugcgccaccacccgccagguggugaacgucgugaccacgaagaucgcccucaaggggggcuga

SEQ ID NO: 18082 - RNA, 5841 nt, Artificial Sequence
  SARS-CoV-2__MT628127.1__non-structural protein 3 (NSP3) CDS gc
auggcccccaccaaggugaccuucggcgacgacacggucaucgaggugcagggguacaagagcgugaacaucaccuucgagcuggacgagcgcaucgacaagguccucaacgagaagugcuccgccuacaccguggagcugggcaccgaggugaacgaguucgcgugcgucguggccgacgccgugaucaagacgcugcagccggucagcgagcuccugaccccccuggggaucgaccucgacgagugguccauggccaccuacuaccuguucgacgagagcggcgaguucaagcuggccucccacauguacugcagcuucuacccccccgacgaggacgaggaggagggggacugcgaggaggaggaguucgagccguccacccaguacgaguacggcacggaggacgacuaccagggcaagccccucgaguucggggcgaccagcgccgcccugcagcccgaggaggagcaggaggaggacuggcuggacgacgacucccagcagaccgugggccagcaggacgggagcgaggacaaccagaccacgaccauccagaccaucguggagguccagccccagcucgagauggagcugaccccgguggugcagacgaucgaggucaacuccuucagcggcuaccugaagcucaccgacaacguguacaucaagaacgccgacaucguggaggaggcgaagaaggucaagcccaccgugguggucaacgccgccaacguguaccugaagcacgggggcggcguggccggggcccugaacaaggcgaccaacaacgccaugcaggucgaguccgacgacuacaucgccacgaacggcccccucaagguggggggcagcugcguccuguccggccacaaccuggccaagcacugccuccacgugguggggcccaacgucaacaagggcgaggacauccagcugcugaagagcgccuacgagaacuucaaccagcacgaggugcuccuggcgccgcugcucuccgccgggaucuucggcgccgaccccauccacagccugcgggugugcgucgacaccgugcgcaccaacguguaccuggccgucuucgacaagaaccucuacgacaagcugguguccagcuuccuggagaugaagagcgagaagcagguggagcagaagaucgccgagauccccaaggaggaggucaagcccuucaucaccgaguccaagccgagcguggagcagcggaagcaggacgacaagaagaucaaggcgugcguggaggaggucacgaccacccucgaggagaccaaguuccugacggagaaccugcuccuguacaucgacaucaacgggaaccugcaccccgacuccgccacccucgugagcgacaucgacaucaccuuccugaagaaggacgcccccuacaucgugggcgacgucgugcaggagggcgugcugaccgccgucgugauccccacgaagaaggccgggggcaccaccgagaugcucgcgaaggcccugcgcaaggugccgaccgacaacuacaucacgaccuaccccgggcagggccugaacggguacaccgucgaggaggccaagaccgugcucaagaagugcaaguccgccuucuacauccugcccagcaucaucuccaacgagaagcaggagauccugggcaccgugagcuggaaccuccgggagaugcuggcgcacgccgaggagacgcgcaagcugaugcccgucugcguggagaccaaggccaucguguccaccauccagcggaaguacaagggcaucaagauccaggagggggucguggacuacggcgcccgcuucuacuucuacaccagcaagacgaccguggccucccugaucaacacccucaacgaccugaacgagacccuggucacgaugccgcucggguacgugacccacggccugaaccuggaggaggcggcccgguacaugcgcagccucaaggugcccgccaccgucuccgugagcucccccgacgccgugaccgccuacaacggguaccugacgagcuccagcaagacccccgaggagcacuucaucgagaccaucucccuggcgggcagcuacaaggacuggagcuacuccggccagagcacccagcucgggaucgaguuccugaagcggggcgacaaguccgucuacuacacgagcaacccgaccaccuuccaccuggacggggaggugaucaccuucgacaaccucaagacgcugcugucccuccgcgaggugcggaccaucaaggucuucaccaccguggacaacaucaaccugcacacgcagguggucgacaugagcaugaccuacggccagcaguucggccccaccuaccuggacggggccgacgugaccaagaucaagccccacaacucccacgagggcaagacguucuacgugcucccgaacgacgacacccugcgcgucgaggccuucgaguacuaccacaccaccgaccccagcuuccuggggcgguacauguccgcccucaaccacacgaagaaguggaaguacccccaggugaacggccugaccagcaucaagugggccgacaacaacugcuaccuggcgaccgcccuccugacccugcagcagaucgagcucaaguucaaccccccggcccugcaggacgccuacuaccgcgcgcgggccggggaggccgccaacuucugcgcccugauccucgcguacugcaacaagacggugggcgagcugggcgacguccgcgagaccauguccuaccuguuccagcacgccaaccucgacagcugcaagcgggugcugaacgucgugugcaagaccugcgggcagcagcagaccacccugaagggcguggaggccgucauguacauggggacgcucuccuacgagcaguucaagaagggcgugcagauccccugcaccugcgggaagcaggccaccaaguaccuggugcagcaggagagccccuucgucaugauguccgcccccccggcgcaguacgagcugaagcacggcaccuucacgugcgccagcgaguacaccggcaacuaccagugcgggcacuacaagcacaucaccuccaaggagacccucuacugcaucgacggcgcccugcugacgaagagcagcgaguacaaggggcccaucaccgacguguucuacaaggagaacuccuacaccaccacgaucaagcccgugaccuacaagcucgacggcgucgugugcaccgagaucgaccccaagcuggacaacuacuacaagaaggacaacagcuacuucaccgagcagccgaucgaccuggugcccaaccagcccuaccccaacgccuccuucgacaacuucaaguucgucugcgacaacaucaaguucgccgacgaccucaaccagcugacgggguacaagaagccggcgagccgcgagcugaaggugaccuucuuccccgaccucaacggcgacguggucgccaucgacuacaagcacuacacccccuccuucaagaagggcgccaagcugcugcacaagcccaucguguggcacgugaacaacgccaccaacaaggcgacguacaagccgaacaccuggugcauccggugccucuggagcaccaagcccgucgagaccuccaacagcuucgacgugcugaaguccgaggacgcccaggggauggacaaccuggccugcgaggaccuccagcccgugagcgaggaggucguggagaaccccacgauccagaaggacgugcuggagugcaacgucaagaccaccgagguggugggcgacaucauccugaagccggccaacaacucccucaagaucaccgaggaggucgggcacacggaccugauggccgcguacguggacaacagcucccugaccaucaagaagcccaacgagcucagccgcgugcugggccugaagacccucgccacccacgggcuggccgccgucaacuccgugcccugggacacgaucgccaacuacgcgaagccguuccugaacaagguggucagcaccaccaccaacaucgugacgcgcugccucaaccgggugugcaccaacuacaugcccuacuucuucacccugcugcuccagcugugcaccuucacccgcuccacgaacagccggaucaaggccuccaugcccaccaccaucgccaagaacaccgucaagagcgugggcaaguucugccuggaggccagcuucaacuaccucaagucccccaacuucagcaagcugaucaacaucaucaucugguuccugcuccuguccgugugccugggcagccucaucuacuccacggccgcgcuggggguccugaugagcaaccucggcaugccguccuacugcaccggguaccgcgagggcuaccugaacagcaccaacgugaccaucgccacguacugcaccggcuccauccccugcagcgugugccuguccgggcucgacagccuggacaccuaccccucccuggagaccauccagaucacgaucagcuccuucaagugggaccucaccgccuucggccuggucgccgagugguuccuggccuacauccucuucacccgguucuucuacgugcuggggcuggcggccaucaugcagcucuucuucagcuacuucgccgugcacuucaucuccaacagcuggcugauguggcugaucaucaaccugguccagauggcccccaucuccgcgauggugcgcauguacaucuucuucgccagcuucuacuacguguggaagagcuacguccacgugguggacggcugcaacuccagcaccugcaugaugugcuacaagcggaaccgcgccacgcgggucgagugcaccaccaucgugaacgggguccgccgguccuucuacguguacgccaacggcggcaagggguucugcaagcuccacaacuggaacugcgugaacugcgacaccuucugcgccggcagcacguucaucuccgacgaggucgcgcgcgaccugagccugcaguucaagcggccgaucaaccccaccgaccaguccagcuacaucguggacuccgugaccgucaagaacgggagcauccaccucuacuucgacaaggccggccagaagaccuacgagcgccacucccugagccacuucgugaaccuggacaaccuccgggccaacaacacgaaggggucccugcccaucaacgugaucgucuucgacggcaagagcaagugcgaggaguccagcgccaaguccgccagcguguacuacucccagcugaugugccagcccauccuccugcuggaccaggcgcucgugagcgacgucggcgacagcgccgagguggccgugaagauguucgacgccuacgucaacaccuucuccagcaccuucaacgugccgauggagaagcugaagacccugguggccacggcggaggccgagcucgccaagaacgucucccuggacaacgugcugagcaccuucaucuccgccgcgcgccagggguucguggacagcgacgucgagaccaaggacgugguggagugccucaagcugucccaccagagcgacaucgaggucaccggcgacuccugcaacaacuacaugcugacguacaacaagguggagaacaugaccccccgggaccucggggccugcaucgacugcagcgcccgccacaucaacgcccagguggccaagucccacaacaucgcgcugaucuggaacgucaaggacuucaugagccuguccgagcagcuccggaagcagauccgcagcgccgccaagaagaacaaccugcccuucaagcugaccugcgccaccacgcgccagguggugaacgucgugaccaccaagaucgcccucaagggcggguga

SEQ ID NO: 18083 - RNA, 5841 nt, Artificial Sequence
  SARS-CoV-2__MT628152.1__non-structural protein 3 (NSP3) CDS gc
auggcccccaccaaggugaccuucggcgacgacacggucaucgaggugcagggguacaagagcgugaacaucaccuucgagcuggacgagcgcaucgacaagguccucaacgagaagugcuccgccuacaccguggagcugggcaccgaggugaacgaguucgcgugcgucguggccgacgccgugaucaagacgcugcagccggucagcgagcuccugaccccccuggggaucgaccucgacgagugguccauggccaccuacuaccuguucgacgagagcggcgaguucaagcuggccucccacauguacugcagcuucuacccccccgacgaggacgaggaggagggggacugcgaggaggaggaguucgagccguccacccaguacgaguacggcacggaggacgacuaccagggcaagccccucgaguucggggcgaccagcgccgcccugcagcccgaggaggagcaggaggaggacuggcuggacgacgacucccagcagaccgugggccagcaggacgggagcgaggacaaccagaccacgaccauccagaccaucguggagguccagccccagcucgagauggagcugaccccgguggugcagacgaucgaggucaacuccuucagcggcuaccugaagcucaccgacaacguguacaucaagaacgccgacaucguggaggaggcgaagaaggucaagcccaccgugguggucaacgccgccaacguguaccugaagcacgggggcggcguggccggggcccugaacaaggcgaccaacaacgccaugcaggucgaguccgacgacuacaucgccacgaacggcccccucaagguggggggcagcugcguccuguccggccacaaccuggccaagcacugccuccacgugguggggcccaacgucaacaagggcgaggacauccagcugcugaagagcgccuacgagaacuucaaccagcacgaggugcuccuggcgccgcugcucuccgccgggaucuucggcgccgaccccauccacagccugcgggugugcgucgacaccgugcgcaccaacguguaccuggccgucuucgacaagaaccucuacgacaagcugguguccagcuuccuggagaugaagagcgagaagcagguggagcagaagaucgccgagauccccaaggaggaggucaagcccuucaucaccgaguccaagccgagcguggagcagcggaagcaggacgacaagaagaucaaggcgugcguggaggaggucacgaccacccucgaggagaccaaguuccugacggagaaccugcuccuguacaucgacaucaacgggaaccugcaccccgacuccgccacccucgugagcgacaucgacaucaccuuccugaagaaggacgcccccuacaucgugggcgacgucgugcaggagggcgugcugaccgccgucgugauccccacgaagaaggccgggggcaccaccgagaugcucgcgaaggcccugcgcaaggugccgaccgacaacuacaucacgaccuaccccgggcagggccugaacggguacaccgucgaggaggccaagaccgugcucaagaagugcaaguccgccuucuacauccugcccagcaucaucuccaacgagaagcaggagauccugggcaccgugagcuggaaccuccgggagaugcuggcgcacgccgaggagacgcgcaagcugaugcccgucugcguggagaccaaggccaucguguccaccauccagcggaaguacaagggcaucaagauccaggagggggucguggacuacggcgcccgcuucuacuucuacaccagcaagacgaccguggccucccugaucaacacccucaacgaccugaacgagacccuggucacgaugccgcucggguacgugacccacggccugaaccuggaggaggcggcccgguacaugcgcagccucaaggugcccgccaccgucuccgugagcucccccgacgccgugaccgccuacaacggguaccugacgagcuccagcaagacccccgaggagcacuucaucgagaccaucucccuggcgggcagcuacaaggacuggagcuacuccggccagagcacccagcucgggaucgaguuccugaagcggggcgacaaguccgucuacuacacgagcaacccgaccaccuuccaccuggacggggaggugaucaccuucgacaaccucaagacgcugcugucccuccgcgaggugcggaccaucaaggucuucaccaccguggacaacaucaaccugcacacgcagguggucgacaugagcaugaccuacggccagcaguucggccccaccuaccuggacggggccgacgugaccaagaucaagccccacaacucccacgagggcaagacguucuacgugcucccgaacgacgacacccugcgcgucgaggccuucgaguacuaccacaccaccgaccccagcuuccuggggcgguacauguccgcccucaaccacacgaagaaguggaaguacccccaggugaacggccugaccagcaucaagugggccgacaacaacugcuaccuggcgaccgcccuccugacccugcagcagaucgagcucaaguucaaccccccggcccugcaggacgccuacuaccgcgcgcgggccggggaggccgccaacuucugcgcccugauccucgcguacugcaacaagacggugggcgagcugggcgacguccgcgagaccauguccuaccuguuccagcacgccaaccucgacagcugcaagcgggugcugaacgucgugugcaagaccugcgggcagcagcagaccacccugaagggcguggaggccgucauguacauggggacgcucuccuacgagcaguucaagaagggcgugcagauccccugcaccugcgggaagcaggccaccaaguaccuggugcagcaggagagccccuucgucaugauguccgcccccccggcgcaguacgagcugaagcacggcaccuucacgugcgccagcgaguacaccggcaacuaccagugcgggcacuacaagcacaucaccuccaaggagacccucuacugcaucgacggcgcccugcugacgaagagcagcgaguacaaggggcccaucaccgacguguucuacaaggagaacuccuacaccaccacgaucaagcccgugaccuacaagcucgacggcgucgugugcaccgagaucgaccccaagcuggacaacuacuacaagaaggacaacagcuacuucaccgagcagccgaucgaccugguguccaaccagcccuaccccaacgccagcuucgacaacuucaaguucgucugcgacaacaucaaguucgccgacgaccucaaccagcugacgggguacaagaagcccgcgucccgcgagcugaaggugaccuucuucccggaccucaacggcgacguggucgccaucgacuacaagcacuacacccccagcuucaagaagggcgccaagcugcugcacaagcccaucguguggcacgugaacaacgccaccaacaaggcgacguacaagcccaacaccuggugcauccggugccucugguccaccaagccggucgagaccagcaacuccuucgacgugcugaagagcgaggacgcccaggggauggacaaccuggccugcgaggaccucaagcccguguccgaggaggucguggagaaccccacgauccagaaggacgugcuggagugcaacgucaagaccaccgagguggugggcgacaucauccugaagcccgccaacaacagccucaagaucaccgaggaggucgggcacacggaccugauggccgcguacguggacaacuccagccugaccaucaagaagccgaacgagcucucccgcgugcugggccugaagacccucgccacccacgggcuggccgccgucaacagcgugcccugggacacgaucgccaacuacgcgaagcccuuccugaacaagguggucuccaccaccaccaacaucgugacgcgcugccucaaccgggugugcaccaacuacaugccguacuucuucacccugcugcuccagcugugcaccuucacccgcagcacgaacucccggaucaaggccagcaugcccaccaccaucgccaagaacaccgucaagagcgugggcaaguucugccuggaggccuccuucaacuaccucaagagccccaacuucuccaagcugaucaacaucaucaucugguuccugcuccugagcgugugccugggcucccucaucuacagcacggccgcgcuggggguccugauguccaaccucggcaugcccagcuacugcaccggguaccgcgagggcuaccugaacuccaccaacgugaccaucgccacguacugcaccggcagcaucccgugcuccgugugccugagcgggcucgacucccuggacaccuaccccagccuggagaccauccagaucacgaucuccagcuucaagugggaccucaccgccuucggccuggucgccgagugguuccuggccuacauccucuucacccgguucuucuacgugcuggggcuggcggccaucaugcagcucuucuucuccuacuucgccgugcacuucaucagcaacuccuggcugauguggcugaucaucaaccugguccagauggcccccaucagcgcgauggugcgcauguacaucuucuucgccagcuucuacuacguguggaaguccuacguccacgugguggacggcugcaacagcuccaccugcaugaugugcuacaagcggaaccgcgccacgcgggucgagugcaccaccaucgugaacgggguccgccggagcuucuacguguacgccaacggcggcaagggguucugcaagcuccacaacuggaacugcgugaacugcgacaccuucugcgccggcuccacguucaucagcgacgaggucgcgcgcgaccugucccugcaguucaagcggcccaucaacccgaccgaccagagcuccuacaucguggacagcgugaccgucaagaacggguccauccaccucuacuucgacaaggccggccagaagaccuacgagcgccacagccugucccacuucgugaaccuggacaaccuccgggccaacaacacgaaggggagccugcccaucaacgugaucgucuucgacggcaaguccaagugcgaggagagcuccgccaagagcgccuccguguacuacagccagcugaugugccagcccauccuccugcuggaccaggcgcucgugagcgacgucggcgacuccgccgagguggccgugaagauguucgacgccuacgucaacaccuucagcuccaccuucaacgugcccauggagaagcugaagacccugguggccacggcggaggccgagcucgccaagaacgucagccuggacaacgugcuguccaccuucaucagcgccgcgcgccagggguucguggacuccgacgucgagaccaaggacgugguggagugccucaagcugagccaccaguccgacaucgaggucaccggcgacagcugcaacaacuacaugcugacguacaacaagguggagaacaugaccccgcgggaccucggggccugcaucgacugcuccgcccgccacaucaacgcccagguggccaagagccacaacaucgcgcugaucuggaacgucaaggacuucaugucccugagcgagcagcuccggaagcagauccgcuccgccgccaagaagaacaaccugcccuucaagcugaccugcgccaccacgcgccagguggugaacgucgugaccaccaagaucgcccucaagggcggguga

SEQ ID NO: 18084 - RNA, 5841 nt, Artificial Sequence
  SARS-CoV-2__MT628204.1__non-structural protein 3 (NSP3) CDS gc
auggcccccaccaaggugaccuucggcgacgacacggucaucgaggugcagggguacaagagcgugaacaucaccuucgagcuggacgagcgcaucgacaagguccucaacgagaagugcuccgccuacaccguggagcugggcaccgaggugaacgaguucgcgugcgucguggccgacgccgugaucaagacgcugcagccggucagcgagcuccugaccccccuggggaucgaccucgacgagugguccauggccaucuacuaccuguucgacgagagcggcgaguucaagcuggccucccacauguacugcagcuucuacccccccgacgaggacgaggaggagggggacugcgaggaggaggaguucgagccguccacccaguacgaguacggcaccgaggacgacuaccagggcaagccccucgaguucggggcgacgagcgccgcccugcagcccgaggaggagcaggaggaggacuggcuggacgacgacucccagcagaccgugggccagcaggacgggagcgaggacaaccagaccaccacgauccagaccaucguggagguccagccccagcucgagauggagcugaccccgguggugcagaccaucgaggucaacuccuucagcggcuaccugaagcucacggacaacguguacaucaagaacgccgacaucguggaggaggcgaagaaggucaagcccaccgugguggucaacgccgccaacguguaccugaagcacgggggcggcguggccggggcccugaacaaggcgaccaacaacgccaugcaggucgaguccgacgacuacaucgccaccaacggcccccucaagguggggggcagcugcguccuguccggccacaaccuggccaagcacugccuccacgugguggggcccaacgucaacaagggcgaggacauccagcugcugaagagcgccuacgagaacuucaaccagcacgaggugcuccuggcgccgcugcucuccgccgggaucuucggcgccgaccccauccacagccugcgggugugcgucgacacggugcgcaccaacguguaccuggccgucuucgacaagaaccucuacgacaagcugguguccagcuuccuggagaugaagagcgagaagcagguggagcagaagaucgccgagauccccaaggaggaggucaagcccuucaucaccgaguccaagccgagcguggagcagcggaagcaggacgacaagaagaucaaggcgugcguggaggaggucaccacgacccucgaggagaccaaguuccugaccgagaaccugcuccuguacaucgacaucaacgggaaccugcaccccgacuccgccacgcucgugagcgacaucgacaucaccuuccugaagaaggacgcccccuacaucgugggcgacgucgugcaggagggcgugcugaccgccgucgugauccccaccaagaaggccgggggcacgaccgagaugcucgcgaaggcccugcgcaaggugccgaccgacaacuacaucaccacguaccccgggcagggccugaacggguacaccgucgaggaggccaagaccgugcucaagaagugcaaguccgccuucuacauccugcccagcaucaucuccaacgagaagcaggagauccugggcaccgugagcuggaaccuccgggagaugcuggcgcacgccgaggagacccgcaagcugaugcccgucugcguggagacgaaggccaucguguccaccauccagcggaaguacaagggcaucaagauccaggagggggucguggacuacggcgcccgcuucuacuucuacaccagcaagaccacgguggccucccugaucaacacccucaacgaccugaacgagacccuggucaccaugccgcucggguacgugacgcacggccugaaccuggaggaggcggcccgguacaugcgcagccucaaggugcccgccaccgucuccgugagcucccccgacgccgugaccgccuacaacggguaccugaccagcuccagcaagacgcccgaggagcacuucaucgagaccaucucccuggcgggcagcuacaaggacuggagcuacuccggccagagcacccagcucgggaucgaguuccugaagcggggcgacaaguccgucuacuacaccagcaacccgacgaccuuccaccuggacggggaggugaucaccuucgacaaccucaagacccugcugucccuccgcgaggugcggacgaucaaggucuucaccaccguggacaacaucaaccugcacacccagguggucgacaugagcaugacguacggccagcaguucggccccaccuaccuggacggggccgacgugaccaagaucaagccccacaacucccacgagggcaagaccuucuacgugcucccgaacgacgacacgcugcgcgucgaggccuucgaguacuaccacaccaccgaccccagcuuccuggggcgguacauguccgcccucaaccacaccaagaaguggaaguacccccaggugaacggccugacgagcaucaagugggccgacaacaacugcuaccuggcgaccgcccuccugacccugcagcagaucgagcucaaguucaaccccccggcccugcaggacgccuacuaccgcgcgcgggccggggaggccgccaacuucugcgcccugauccucgcguacugcaacaagaccgugggcgagcugggcgacguccgcgagacgauguccuaccuguuccagcacgccaaccucgacagcugcaagcgggugcugaacgucgugugcaagaccugcgggcagcagcagaccacccugaagggcguggaggccgucauguacauggggacccucuccuacgagcaguucaagaagggcgugcagauccccugcacgugcgggaagcaggccaccaaguaccuggugcagcaggagagccccuucgucaugauguccgcccccccggcgcaguacgagcugaagcacggcaccuucaccugcgccagcgaguacacgggcaacuaccagugcgggcacuacaagcacaucaccuccaaggagacccucuacugcaucgacggcgcccugcugaccaagagcagcgaguacaaggggcccaucacggacguguucuacaaggagaacuccuacaccaccaccaucaagcccgugacguacaagcucgacggcgucgugugcaccgagaucgaccccaagcuggacaacuacuacaagaaggacaacagcuacuucaccgagcagccgaucgaccuggugcccaaccagcccuaccccaacgccuccuucgacaacuucaaguucgucugcgacaacaucaaguucgccgacgaccucaaccagcugaccggguacaagaagccggcgagccgcgagcugaaggugacguucuuccccgaccucaacggcgacguggucgccaucgacuacaagcacuacacccccuccuucaagaagggcgccaagcugcugcacaagcccaucguguggcacgugaacaacgccaccaacaaggcgaccuacaagccgaacacguggugcauccggugccucuggagcaccaagcccgucgagaccuccaacagcuucgacgugcugaaguccgaggacgcccaggggauggacaaccuggccugcgaggaccucaagcccgugagcgaggaggucguggagaaccccaccauccagaaggacgugcuggagugcaacgucaagacgaccgagguggugggcgacaucauccugaagccggccaacaacucccucaagaucaccgaggaggucgggcacaccgaccugauggccgcguacguggacaacagcucccugacgaucaagaagcccaacgagcucagccgcgugcugggccugaagacccucgccacccacgggcuggccgccgucaacuccgugcccugggacaccaucgccaacuacgcgaagccguuccugaacaagguggucagcacgaccaccaacaucgugacccgcugccucaaccgggugugcacgaacuacaugcccuacuucuucacccugcugcuccagcugugcaccuucacccgcuccaccaacagccggaucaaggccuccaugcccacgaccaucgccaagaacaccgucaagagcgugggcaaguucugccuggaggccagcuucaacuaccucaagucccccaacuucagcaagcugaucaacaucaucaucugguuccugcuccuguccgugugccugggcagccucaucuacuccaccgccgcgcuggggguccugaugagcaaccucggcaugccguccuacugcacgggguaccgcgagggcuaccugaacagcaccaacgugaccaucgccaccuacugcacgggcuccauccccugcagcgugugccuguccgggcucgacagccuggacaccuaccccucccuggagaccauccagaucaccaucagcuccuucaagugggaccucacggccuucggccuggucgccgagugguuccuggccuacauccucuucacccgguucuucuacgugcuggggcuggcggccaucaugcagcucuucuucagcuacuucgccgugcacuucaucuccaacagcuggcugauguggcugaucaucaaccugguccagauggcccccaucuccgcgauggugcgcauguacaucuucuucgccagcuucuacuacguguggaagagcuacguccacgugguggacggcugcaacuccagcaccugcaugaugugcuacaagcggaaccgcgccacccgggucgagugcacgaccaucgugaacgggguccgccgguccuucuacguguacgccaacggcggcaagggguucugcaagcuccacaacuggaacugcgugaacugcgacaccuucugcgccggcagcaccuucaucuccgacgaggucgcgcgcgaccugagccugcaguucaagcggccgaucaaccccacggaccaguccagcuacaucguggacuccgugaccgucaagaacgggagcauccaccucuacuucgacaaggccggccagaagaccuacgagcgccacucccugagccacuucgugaaccuggacaaccuccgggccaacaacaccaaggggucccugcccaucaacgugaucgucuucgacggcaagagcaagugcgaggaguccagcgccaaguccgccagcguguacuacucccagcugaugugccagcccauccuccugcuggaccaggcgcucgugagcgacgucggcgacagcgccgagguggccgugaagauguucgacgccuacgucaacacguucuccagcaccuucaacgugccgauggagaagcugaagacccugguggccaccgcggaggccgagcucgccaagaacgucucccuggacaacgugcugagcacguucaucuccgccgcgcgccagggguucguggacagcgacgucgagaccaaggacgugguggagugccucaagcugucccaccagagcgacaucgaggucaccggcgacuccugcaacaacuacaugcugaccuacaacaagguggagaacaugacgccccgggaccucggggccugcaucgacugcagcgcccgccacaucaacgcccagguggccaagucccacaacaucgcgcugaucuggaacgucaaggacuucaugagccuguccgagcagcuccggaagcagauccgcagcgccgccaagaagaacaaccugcccuucaagcugaccugcgccaccacccgccagguggugaacgucgugacgaccaagaucgcccucaagggcggguga

SEQ ID NO: 18085 - RNA, 5841 nt, Artificial Sequence
  SARS-CoV-2__MT628215.1__non-structural protein 3 (NSP3) CDS gc
auggcccccaccaaggugaccuucggcgacgacacggucaucgaggugcagggguacaagagcgugaacaucaccuucgagcuggacgagcgcaucgacaagguccucaacgagaagugcuccgccuacaccguggagcugggcaccgaggugaacgaguucgcgugcgucguggccgacgccgugaucaagacgcugcagccggucagcgagcuccugaccccccuggggaucgaccucgacgagugguccauggccaccuacuaccuguucgacgagagcggcgaguucaagcuggccucccacauguacugcagcuucuacccccccgacgaggacgaggaggagggggacugcgaggaggaggaguucgagccguccacccaguacgaguacggcacggaggacgacuaccagggcaagccccucgaguucggggcgaccagcgccgcccugcagcccgaggaggagcaggaggaggacuggcuggacgacgacucccagcagaccgugggccagcaggacgggagcgaggacaaccagaccacgaccauccagaccaucguggagguccagccccagcucgagauggagcugaccccgguggugcagacgaucgaggucaacuccuucagcggcuaccugaagcucaccgacaacguguacaucaagaacgccgacaucguggaggaggcgaagaaggucaagcccaccgugguggucaacgccgccaacguguaccugaagcacgggggcggcguggccggggcccugaacaaggcgaccaacaacgccaugcaggucgaguccgacgacuacaucgccacgaacggcccccucaagguggggggcagcugcguccuguccggccacaaccuggccaagcacugccuccacgugguggggcccaacgucaacaagggcgaggacauccagcugcugaagagcgccuacgagaacuucaaccagcacgaggugcuccuggcgccgcugcucuccgccgggaucuucggcgccgaccccauccacagccugcgggugugcgucgacaccgugcgcaccaacguguaccuggccgucuucgacaagaaccucuacgacaagcugguguccagcuuccuggagaugaagagcgagaagcagguggagcagaagaucgccgagauccccaaggaggaggucaagcccuucaucaccgaguccaagccgagcguggagcagcggaagcaggacgacaagaagaucaaggcgugcguggaggaggucacgaccacccucgaggagaccaaguuccugacggagaaccugcuccuguacaucgacaucaacgggaaccugcaccccgacuccgccacccucgugagcgacaucgacaucaccuuccugaagaaggacgcccccuacaucgugggcgacgucgugcaggagggcgugcugaccgccgucgugauccccacgaagaaggccgggggcaccaccgagaugcucgcgaaggcccugcgcaaggugccgaccgacaacuacaucacgaccuaccccgggcagggccugaacggguacaccgucgaggaggccaagaccgugcucaagaagugcaaguccgccuucuacauccugcccagcaucaucuccaacgagaagcaggagauccugggcaccgugagcuggaaccuccgggagaugcuggcgcacgccgaggagacgcgcaagcugaugcccgucugcguggagaccaaggccaucguguccaccauccagcggaaguacaagggcaucaagauccaggagggggucguggacuacggcgcccgcuucuacuucuacaccagcaagacgaccguggccucccugaucaacacccucaacgaccugaacgagacccuggucacgaugccgcucggguacgugacccacggccugaaccuggaggaggcggcccgguacaugcgcagccucaaggugcccgccaccgucuccgugagcucccccgacgccgugaccgccuacaacggguaccugacgagcuccagcaagacccccgaggagcacuucaucgagaccaucucccuggcgggcagcuacaaggacuggagcuacuccggccagagcacccagcucgggaucgaguuccugaagcggggcgacaaguccgucuacuacacgagcaacccgaccaccuuccaccuggacggggaggugaucaccuucgacaaccucaagacgcugcugucccuccgcgaggugcggaccaucaaggucuucaccaccguggacaacaucaaccugcacacgcagguggucgacaugagcaugaccuacggccagcaguucggccccaccuaccuggacggggccgacgugaccaagaucaagccccacaacucccacgagggcaagacguucuacgugcucccgaacgacgacacccugcgcgucgaggccuucgaguacuaccacaccaccgaccccagcuuccuggggcgguacauguccgcccucaaccacacgaagaaguggaaguacccccaggugaacggccugaccagcaucaagugggccgacaacaacugcuaccuggcgaccgcccuccugacccugcagcagaucgagcucaaguucaaccccccggcccugcaggacgccuacuaccgcgcgcgggccggggaggccgccaacuucugcgcccugauccucgcguacugcaacaagacggugggcgagcugggcgacguccgcgagaccauguccuaccuguuccagcacgccaaccucgacagcugcaagcgggugcugaacgucgugugcaagaccugcgggcagcagcagaccacccugaagggcguggaggccgucauguacauggggacgcucuccuacgagcaguucaagaagggcgugcagauccccugcaccugcgggaagcaggccaccaaguaccuggugcagcaggagagccccuucgucaugauguccgcccccccggcgcaguacgagcugaagcacggcaccuucacgugcgccagcgaguacaccggcaacuaccagugcgggcacuacaagcacaucaccuccaaggagacccucuacugcaucgacggcgcccugcugacgaagagcagcgaguacaaggggcccaucaccgacguguucuacaaggagaacuccuacaccaccacgaucaagcccgugaccuacaagcucgacggcgucgugugcaccgagaucgaccccaagcuggacaacuacuacaagaaggacaacagcuacuucaccgagcagccgaucgaccuggugcccaaccagcccuaccccaacgccuccuucgacaacuucaaguucgucugcgacaacaucaaguucgccgacgaccucaaccagcugacgggguacaagaagccggcgagccgcgagcugaaggugaccuucuuccccgaccucaacggcgacguggucgccaucgacuacaagcacuacacccccuccuucaagaagggcgccaagcugcugcacaagcccaucguguggcacgugaacaacagcaccaacaaggccacguacaagccgaacaccuggugcauccggugccucugguccaccaagcccgucgagaccagcaacuccuucgacgugcugaagagcgaggacgcgcaggggauggacaaccuggccugcgaggaccucaagcccguguccgaggaggucguggagaaccccacgauccagaaggacgugcuggagugcaacgucaagaccaccgagguggugggcgacaucauccugaagccggccaacaacagccucaagaucaccgaggaggucgggcacacggaccugauggccgccuacguggacaacuccagccugaccaucaagaagcccaacgagcucucccgcgugcugggccugaagacccucgcgacccacgggcuggccgccgucaacagcgugcccugggacacgaucgccaacuacgccaagccguuccugaacaagguggucuccaccaccaccaacaucgugacgcgcugccucaaccgggugugcaccaacuacaugcccuacuucuucacccugcugcuccagcugugcaccuucacccgcagcacgaacucccggaucaaggcgagcaugcccaccaccaucgccaagaacaccgucaagagcgugggcaaguucugccuggaggccuccuucaacuaccucaagagccccaacuucuccaagcugaucaacaucaucaucugguuccugcuccugagcgugugccugggcucccucaucuacagcacggccgcccuggggguccugauguccaaccucggcaugccgagcuacugcaccggguaccgcgagggcuaccugaacuccaccaacgugaccaucgcgacguacugcaccggcagcauccccugcuccgugugccugagcgggcucgacucccuggacaccuaccccagccuggagaccauccagaucacgaucuccagcuucaagugggaccucaccgccuucggccuggucgccgagugguuccuggccuacauccucuucacccgguucuucuacgugcuggggcuggccgcgaucaugcagcucuucuucuccuacuucgccgugcacuucaucagcaacuccuggcugauguggcugaucaucaaccugguccagauggcccccaucagcgccauggugcgcauguacaucuucuucgcgagcuucuacuacguguggaaguccuacguccacgugguggacggcugcaacagcuccaccugcaugaugugcuacaagcggaaccgcgccacgcgggucgagugcaccaccaucgugaacgggguccgccggagcuucuacguguacgccaacggcggcaagggguucugcaagcuccacaacuggaacugcgugaacugcgacaccuucugcgccggcuccacguucaucagcgacgaggucgcccgcgaccugucccugcaguucaagcggccgaucaaccccaccgaccagagcuccuacaucguggacagcgugaccgucaagaacggguccauccaccucuacuucgacaaggcgggccagaagaccuacgagcgccacagccugucccacuucgugaaccuggacaaccuccgggccaacaacacgaaggggagccugcccaucaacgugaucgucuucgacggcaaguccaagugcgaggagagcuccgccaagagcgccuccguguacuacagccagcugaugugccagcccauccuccugcuggaccaggcccucgugagcgacgucggcgacuccgcggagguggccgugaagauguucgacgccuacgucaacaccuucagcuccaccuucaacgugccgauggagaagcugaagacccugguggccacggccgaggcggagcucgccaagaacgucagccuggacaacgugcuguccaccuucaucagcgccgcccgccagggguucguggacuccgacgucgagaccaaggacgugguggagugccucaagcugagccaccaguccgacaucgaggucaccggcgacagcugcaacaacuacaugcugacguacaacaagguggagaacaugaccccccgggaccucggggcgugcaucgacugcuccgcccgccacaucaacgcccagguggccaagagccacaacaucgcccugaucuggaacgucaaggacuucaugucccugagcgagcagcuccggaagcagauccgcuccgcggccaagaagaacaaccugcccuucaagcugaccugcgccaccacgcgccagguggugaacgucgugaccaccaagaucgcccucaagggcggguga

SEQ ID NO: 18086 - RNA, 5841 nt, Artificial Sequence
  SARS-CoV-2__MT628218.1__non-structural protein 3 (NSP3) CDS gc
auggcccccaccaaggugaccuucggcgacgacacggucaucgaggugcagggguacaagagcgugaacaucaccuucgagcuggacgagcgcaucgacaagguccucaacgagaagugcuccgccuacaccguggagcugggcaccgaggugaacgaguucgcgugcgucguggccgacgccgugaucaagacgcugcagccggucagcgagcuccugaccccccuggggaucgaccucgacgagugguccauggccaccuacuaccuguucgacgagagcggcgaguucaagcuggccucccacauguacugcagcuucuacccccccgacgaggacgaggaggagggggacugcgaggaggaggaguucgagccguccacccaguacgaguacggcacggaggacgacuaccagggcaagccccucgaguucggggcgaccagcgccgcccugcagcccgaggaggagcaggaggaggacuggcuggacgacgacucccagcagaccgugggccagcaggacgggagcgaggacaaccagaccacgaccauccagaccaucguggagguccagccccagcucgagauggagcugaccccgguggugcagacgaucgaggucaacuccuucagcggcuaccugaagcucaccgacaacguguacaucaagaacgccgacaucguggaggaggcgaagaaggucaagcccaccgugguggucaacgccgccaacguguaccugaagcacgggggcggcguggccggggcccugaacaaggcgaccaacaacgccaugcaggucgaguccgacgacuacaucgccacgaacggcccccucaagguggggggcagcugcguccuguccggccacaaccuggccaagcacugccuccacgugguggggcccaacgucaacaagggcgaggacauccagcugcugaagagcgccuacgagaacuucaaccagcacgaggugcuccuggcgccgcugcucuccgccgggaucuucggcgccgaccccauccacagccugcgggugugcgucgacaccgugcgcaccaacguguaccuggccgucuucgacaagaaccucuacgacaagcugguguccagcuuccuggagaugaagagcgagaagcagguggagcagaagaucgccgagauccccaaggaggaggucaagcccuucaucaccgaguccaagccgagcguggagcagcggaagcaggacgacaagaagaucaaggcgugcguggaggaggucacgaccacccucgaggagaccaaguuccugacggagaaccugcuccuguacaucgacaucaacgggaaccugcaccccgacuccgccacccucgugagcgacaucgacaucaccuuccugaagaaggacgcccccuacaucgugggcgacgucgugcaggagggcgugcugaccgccgucgugauccccacgaagaaggccgggggcaccaccgagaugcucgcgaaggcccugcgcaaggugccgaccgacaacuacaucacgaccuaccccgggcagggccugaacggguacaccgucgaggaggccaagaccgugcucaagaagugcaaguccgccuucuacauccugcccagcaucaucuccaacgagaagcaggagauccugggcaccgugagcuggaaccuccgggagaugcuggcgcacgccgaggagacgcgcaagcugaugcccgucugcguggagaccaaggccaucguguccaccauccagcggaaguacaagggcaucaagauccaggagggggucguggacuacggcgcccgcuucuacuucuacaccagcaagacgaccguggccucccugaucaacacccucaacgaccugaacgagacccuggucacgaugccgcucggguacgugacccacagccugaaccuggaggaggcggcccgguacaugcgcucccucaaggugcccgccaccgucagcguguccagccccgacgccgugaccgccuacaacggcuaccugacguccagcuccaagacccccgaggagcacuucaucgagaccaucagccuggcggggagcuacaaggacugguccuacagcggccaguccacccagcucggcaucgaguuccugaagcggggggacaagagcgucuacuacacguccaacccgaccaccuuccaccuggacggcgaggugaucaccuucgacaaccucaagacgcugcugagccuccgcgaggugcggaccaucaaggucuucaccaccguggacaacaucaaccugcacacgcagguggucgacauguccaugaccuacgggcagcaguucggccccaccuaccuggacggcgccgacgugaccaagaucaagccccacaacagccacgaggggaagacguucuacgugcucccgaacgacgacacccugcgcgucgaggccuucgaguacuaccacaccaccgaccccuccuuccugggccgguacaugagcgcccucaaccacacgaagaaguggaaguacccccaggugaacgggcugaccuccaucaagugggccgacaacaacugcuaccuggcgaccgcccuccugacccugcagcagaucgagcucaaguucaaccccccggcccugcaggacgccuacuaccgcgcgcgggccggcgaggccgccaacuucugcgcccugauccucgcguacugcaacaagacggugggggagcugggcgacguccgcgagaccaugagcuaccuguuccagcacgccaaccucgacuccugcaagcgggugcugaacgucgugugcaagaccugcggccagcagcagaccacccugaaggggguggaggccgucauguacaugggcacgcucagcuacgagcaguucaagaagggggugcagauccccugcaccugcggcaagcaggccaccaaguaccuggugcagcaggagucccccuucgucaugaugagcgcccccccggcgcaguacgagcugaagcacgggaccuucacgugcgccuccgaguacaccggcaacuaccagugcggccacuacaagcacaucaccagcaaggagacccucuacugcaucgacggggcccugcugacgaagagcuccgaguacaagggccccaucaccgacguguucuacaaggagaacagcuacaccaccacgaucaagcccgugaccuacaagcucgacggggucgugugcaccgagaucgaccccaagcuggacaacuacuacaagaaggacaacuccuacuucaccgagcagccgaucgaccuggugcccaaccagcccuaccccaacgccagcuucgacaacuucaaguucgucugcgacaacaucaaguucgccgacgaccucaaccagcugacgggcuacaagaagccggcgucccgcgagcugaaggugaccuucuuccccgaccucaacggggacguggucgccaucgacuacaagcacuacacccccagcuucaagaagggcgccaagcugcugcacaagcccaucguguggcacgugaacaacgccaccaacaaggcgacguacaagccgaacaccuggugcauccggugccucugguccaccaagcccgucgagaccagcaacuccuucgacgugcugaagagcgaggacgcccagggcauggacaaccuggccugcgaggaccucaagcccguguccgaggaggucguggagaaccccacgauccagaaggacgugcuggagugcaacgucaagaccaccgagguggugggggacaucauccugaagccggccaacaacagccucaagaucaccgaggaggucggccacacggaccugauggccgcguacguggacaacuccagccugaccaucaagaagcccaacgagcucucccgcgugcuggggcugaagacccucgccacccacggccuggccgccgucaacagcgugcccugggacacgaucgccaacuacgcgaagccguuccugaacaagguggucuccaccaccaccaacaucgugacgcgcugccucaaccgggugugcaccaacuacaugcccuacuucuucacccugcugcuccagcugugcaccuucacccgcagcacgaacucccggaucaaggccagcaugcccaccaccaucgccaagaacaccgucaagagcguggggaaguucugccuggaggccuccuucaacuaccucaagagccccaacuucuccaagcugaucaacaucaucaucugguuccugcuccugagcgugugccugggcucccucaucuacagcacggccgcgcugggcguccugauguccaaccucgggaugccgagcuacugcaccggcuaccgcgagggguaccugaacuccaccaacgugaccaucgccacguacugcaccggcagcauccccugcuccgugugccugagcggccucgacucccuggacaccuaccccagccuggagaccauccagaucacgaucuccagcuucaagugggaccucaccgccuucgggcuggucgccgagugguuccuggccuacauccucuucacccgguucuucuacgugcugggccuggcggccaucaugcagcucuucuucuccuacuucgccgugcacuucaucagcaacuccuggcugauguggcugaucaucaaccugguccagauggcccccaucagcgcgauggugcgcauguacaucuucuucgccagcuucuacuacguguggaaguccuacguccacgugguggacgggugcaacagcuccaccugcaugaugugcuacaagcggaaccgcgccacgcgggucgagugcaccaccaucgugaacggcguccgccggagcuucuacguguacgccaacgggggcaagggcuucugcaagcuccacaacuggaacugcgugaacugcgacaccuucugcgccggguccacguucaucagcgacgaggucgcgcgcgaccugucccugcaguucaagcggccgaucaaccccaccgaccagagcuccuacaucguggacagcgugaccgucaagaacggcuccauccaccucuacuucgacaaggccgggcagaagaccuacgagcgccacagccugucccacuucgugaaccuggacaaccuccgggccaacaacacgaagggcagccugcccaucaacgugaucgucuucgacgggaaguccaagugcgaggagagcuccgccaagagcgccuccguguacuacagccagcugaugugccagcccauccuccugcuggaccaggcgcucgugagcgacgucggcgacuccgccgagguggccgugaagauguucgacgccuacgucaacaccuucagcuccaccuucaacgugccgauggagaagcugaagacccugguggccacggcggaggccgagcucgccaagaacgucagccuggacaacgugcuguccaccuucaucagcgccgcgcgccagggcuucguggacuccgacgucgagaccaaggacgugguggagugccucaagcugagccaccaguccgacaucgaggucaccggggacagcugcaacaacuacaugcugacguacaacaagguggagaacaugaccccccgggaccucggcgccugcaucgacugcuccgcccgccacaucaacgcccagguggccaagagccacaacaucgcgcugaucuggaacgucaaggacuucaugucccugagcgagcagcuccggaagcagauccgcuccgccgccaagaagaacaaccugcccuucaagcugaccugcgccaccacgcgccagguggugaacgucgugaccaccaagaucgcccucaaggggggcuga

SEQ ID NO: 18087 - RNA, 5841 nt, Artificial Sequence
  SARS-CoV-2__MT628230.1__non-structural protein 3 (NSP3) CDS gc
auggcccccaccaaggugaccuucggcgacgacacggucaucgaggugcagggguacaagagcgugaacaucaccuucgagcuggacgagcgcaucgacaagguccucaacgagaagugcuccgccuacaccguggagcugggcaccgaggugaacgaguucgcgugcgucguggccgacgccgugaucaagacgcugcagccggucagcgagcuccugaccccccuggggaucgaccucgacgagugguccauggccaccuacuaccuguucgacgagagcggcgaguucaagcuggccucccacauguacugcagcuucuacccccccgacgaggacgaggaggagggggacugcgaggaggaggaguucgagccguccacccaguacgaguacggcacggaggacgacuaccagggcaagccccucgaguucggggcgaccagcgccgcccugcagcccgaggaggagcaggaggaggacuggcuggacgacgacucccagcagaccgugggccagcaggacgggagcgaggacaaccagaccacgaccauccagaccaucguggagguccagccccagcucgagauggagcugaccccgguggugcagacgaucgaggucaacuccuucagcggcuaccugaagcucaccgacaacguguacaucaagaacgccgacaucguggaggaggcgaagaaggucaagcccaccgugguggucaacgccgccaacguguaccugaagcacgggggcggcguggccggggcccugaacaaggcgaccaacaacgccaugcaggucgaguccgacgacuacaucgccacgaacggcccccucaagguggggggcagcugcguccuguccggccacaaccuggccaagcacugccuccacgugguggggcccaacgucaacaagggcgaggacauccagcugcugaagagcgccuacgagaacuucaaccagcacgaggugcuccuggcgccgcugcucuccgccgggaucuucggcgccgaccccauccacagccugcgggugugcgucgacaccgugcgcaccaacguguaccuggccgucuucgacaagaaccucuacgacaagcugguguccagcuuccuggagaugaagagcgagaagcagguggagcagaagaucgccgagauccccaaggaggaggucaagcccuucaucaccgaguccaagccgagcguggagcagcggaagcaggacgacaagaagaucaaggcgugcguggaggaggucacgaccacccucgaggagaccaaguuccugacggagaaccugcuccuguacaucgacaucaacgggaaccugcaccccgacuccgccacccucgugagcgacaucgacaucaccuuccugaagaaggacgcccccuacaucgugggcgacgucgugcaggagggcgugcugaccgccgucgugauccccacgaagaaggccgggggcaccaccgagaugcucgcgaaggcccugcgcaaggugccgaccgacaacuacaucacgaccuaccccgggcagggccugaacggguacaccgucgaggaggccaagaccgugcucaagaagugcaaguccgccuucuacauccugcccagcaucaucuccaacgagaagcaggagauccugggcaccgugagcuggaaccuccgggagaugcuggcgcacgccgaggagacgcgcaagcugaugcccgucugcguggagaccaaggccaucguguccaccauccagcggaaguacaagggcaucaagauccaggagggggucguggacuacggcgcccgcuucuacuucuacaccagcaagacgaccguggccucccugaucaacacccucaacgaccugaacgagacccuggucacgaugccgcucggguacgugacccacggccugaaccuggaggaggcggcccgguacaugcgcagccucaaggugcccgccaccgucuccgugagcucccccgacgccgugaccgccuacaacggguaccugacgagcuccagcaagacccccgaggagcacuucaucgagaucaucucccuggcgggcagcuacaaggacuggagcuacuccggccagagcacccagcucgggaucgaguuccugaagcggggcgacaaguccgucuacuacaccagcaacccgacgaccuuccaccuggacggggaggugaucaccuucgacaaccucaagacccugcugucccuccgcgaggugcggacgaucaaggucuucaccaccguggacaacaucaaccugcacacccagguggucgacaugagcaugacguacggccagcaguucggccccaccuaccuggacggggccgacgugaccaagaucaagccccacaacucccacgagggcaagaccuucuacgugcucccgaacgacgacacgcugcgcgucgaggccuucgaguacuaccacaccaccgaccccagcuuccuggggcgguacauguccgcccucaaccacaccaagaaguggaaguacccccaggugaacggccugacgagcaucaagugggccgacaacaacugcuaccuggcgaccgcccuccugacccugcagcagaucgagcucaaguucaaccccccggcccugcaggacgccuacuaccgcgcgcgggccggggaggccgccaacuucugcgcccugauccucgcguacugcaacaagaccgugggcgagcugggcgacguccgcgagacgauguccuaccuguuccagcacgccaaccucgacagcugcaagcgggugcugaacgucgugugcaagaccugcgggcagcagcagaccacccugaagggcguggaggccgucauguacauggggacccucuccuacgagcaguucaagaagggcgugcagauccccugcacgugcgggaagcaggccaccaaguaccuggugcagcaggagagccccuucgucaugauguccgcccccccggcgcaguacgagcugaagcacggcaccuucaccugcgccagcgaguacacgggcaacuaccagugcgggcacuacaagcacaucaccuccaaggagacccucuacugcaucgacggcgcccugcugaccaagagcagcgaguacaaggggcccaucacggacguguucuacaaggagaacuccuacaccaccaccaucaagcccgugacguacaagcucgacggcgucgugugcaccgagaucgaccccaagcuggacaacuacuacaagaaggacaacagcuacuucaccgagcagccgaucgaccuggugcccaaccagcccuaccccaacgccuccuucgacaacuucaaguucgucugcgacaacaucaaguucgccgacgaccucaaccagcugaccggguacaagaagccggcgagccgcgagcugaaggugacguucuuccccgaccucaacggcgacguggucgccaucgacuacaagcacuacacccccuccuucaagaagggcgccaagcugcugcacaagcccaucguguggcacgugaacaacgccaccaacaaggcgaccuacaagccgaacacguggugcauccggugccucuggagcaccaagcccgucgagaccuccaacagcuucgacgugcugaaguccgaggacgcccaggggauggacaaccuggccugcgaggaccucaagcccgugagcgaggaggucguggagaaccccaccauccagaaggacgugcuggagugcaacgucaagacgaccgagguggugggcgacaucauccugaagccggccaacaacucccucaagaucaccgaggaggucgggcacaccgaccugauggccgcguacguggacaacagcucccugacgaucaagaagcccaacgagcucagccgcgugcugggccugaagacccucgccacccacgggcuggccgccgucaacuccgugcccugggacaccaucgccaacuacgcgaagccguuccugaacaagguggucagcacgaccaccaacaucgugacccgcugccucaaccgggugugcacgaacuacaugcccuacuucuucacccugcugcuccagcugugcaccuucacccgcuccaccaacagccggaucaaggccuccaugcccacgaccaucgccaagagcaccgucaagagcgugggcaaguucugccuggaggccuccuucaacuaccucaagagccccaacuucuccaagcugaucaacaucaucaucugguuccugcuccugagcgugugccugggcucccucaucuacagcaccgccgcgcuggggguccugauguccaaccucggcaugccgagcuacugcacgggguaccgcgagggcuaccugaacuccaccaacgugaccaucgccaccuacugcacgggcagcauccccugcuccgugugccugagcgggcucgacucccuggacaccuaccccagccuggagaccauccagaucaccaucuccagcuucaagugggaccucacggccuucggccuggucgccgagugguuccuggccuacauccucuucacccgguucuucuacgugcuggggcuggcggccaucaugcagcucuucuucuccuacuucgccgugcacuucaucagcaacuccuggcugauguggcugaucaucaaccugguccagauggcccccaucagcgcgauggugcgcauguacaucuucuucgccagcuucuacuacguguggaaguccuacguccacgugguggacggcugcaacagcuccaccugcaugaugugcuacaagcggaaccgcgccacccgggucgagugcacgaccaucgugaacgggguccgccggagcuucuacguguacgccaacggcggcaagggguucugcaagcuccacaacuggaacugcgugaacugcgacaccuucugcgccggcuccaccuucaucagcgacgaggucgcgcgcgaccugucccugcaguucaagcggccgaucaaccccacggaccagagcuccuacaucguggacagcgugaccgucaagaacggguccauccaccucuacuucgacaaggccggccagaagaccuacgagcgccacagccugucccacuucgugaaccuggacaaccuccgggccaacaacaccaaggggagccugcccaucaacgugaucgucuucgacggcaaguccaagugcgaggagagcuccgccaagagcgccuccguguacuacagccagcugaugugccagcccauccuccugcuggaccaggcgcucgugagcgacgucggcgacuccgccgagguggccgugaagauguucgacgccuacgucaacacguucagcuccaccuucaacgugccgauggagaagcugaagacccugguggccaccgcggaggccgagcucgccaagaacgucagccuggacaacgugcuguccacguucaucagcgccgcgcgccagggguucguggacuccgacgucgagaccaaggacgugguggagugccucaagcugagccaccaguccgacaucgaggucaccggcgacagcugcaacaacuacaugcugaccuacaacaagguggagaacaugacgccccgggaccucggggccugcaucgacugcuccgcccgccacaucaacgcccagguggccaagagccacaacaucgcgcugaucuggaacgucaaggacuucaugucccugagcgagcagcuccggaagcagauccgcuccgccgccaagaagaacaaccugcccuucaagcugaccugcgccaccacccgccagguggugaacgucgugacgaccaagaucgcccucaagggcggguga

SEQ ID NO: 18088 - RNA, 5841 nt, Artificial Sequence
  SARS-CoV-2__MT628231.1__non-structural protein 3 (NSP3) CDS gc
auggcccccaccaaggugaccuucggcgacgacacggucaucgaggugcagggguacaagagcgugaacaucaccuucgagcuggacgagcgcaucgacaagguccucaacgagaagugcuccgccuacaccguggagcugggcaccgaggugaacgaguucgcgugcgucguggccgacgccgugaucaagacgcugcagccggucagcgagcuccugaccccccuggggaucgaccucgacgagugguccauggccaccuacuaccuguucgacgagagcggcgaguucaagcuggccucccacauguacugcagcuucuacccccccgacgaggacgaggaggagggggacugcgaggaggaggaguucgagccguccacccaguacgaguacggcacggaggacgacuaccagggcaagccccucgaguucggggcgaccagcgccgcccugcagcccgaggaggagcaggaggaggacuggcuggacgacgacucccagcagaccgugggccagcaggacgggagcgaggacaaccagaccacgaccauccagaccaucguggagguccagccccagcucgagauggagcugaccccgguggugcagacgaucgaggucaacuccuucagcggcuaccugaagcucaccgacaacguguacaucaagaacgccgacaucguggaggaggcgaagaaggucaagcccaccgugguggucaacgccgccaacguguaccugaagcacgggggcggcguggccggggcccugaacaaggcgaccaacaacgccaugcaggucgaguccgacgacuacaucgccacgaacggcccccucaagguggggggcagcugcguccuguccggccacaaccuggccaagcacugccuccacgugguggggcccaacgucaacaagggcgaggacauccagcugcugaagagcgccuacgagaacuucaaccagcacgaggugcuccuggcgccgcugcucuccgccgggaucuucggcgccgaccccauccacagccugcgggugugcgucgacaccgugcgcaccaacguguaccuggccgucuucgacaagaaccucuacgacaagcugguguccagcuuccuggagaugaagagcgagaagcagguggagcagaagaucgccgagauccccaaggaggaggucaagcccuucaucaccgaguccaagccgagcguggagcagcggaagcaggacgacaagaagaucaaggcgugcguggaggaggucacgaccacccucgaggagaccaaguuccugacggagaaccugcuccuguacaucgacaucaacgggaaccugcaccccgacuccgccacccucgugagcgacaucgacaucaccuuccugaagaaggacgcccccuacaucgugggcgacgucgugcaggagggcgugcugaccgccgucgugauccccacgaagaaggccgggggcaccaccgagaugcucgcgaaggcccugcgcaaggugccgaccgacaacuacaucacgaccuaccccgggcagggccugaacggguacaccgucgaggaggccaagaccgugcucaagaagugcaaguccgccuucuacauccugcccagcaucaucuccaacgagaagcaggagauccugggcaccgugagcuggaaccuccgggagaugcuggcgcacgccgaggagacgcgcaagcugaugcccgucugcguggagaccaaggccaucguguccaccauccagcggaaguacaagggcaucaagauccaggagggggucguggacuacggcgcccgcuucuacuucuacaccagcaagacgaccguggccucccugaucaacacccucaacgaccugaacgagacccuggucacgaugccgcucggguacgugacccacggccugaaccuggaggaggcggcccgguacaugcgcagccucaaggugcccgccaccgucuccgugagcucccccgacgccgugaccgccuacaacggguaccugacgagcuccagcaagacccccgaggagcacuucaucgagaucaucucccuggcgggcagcuacaaggacuggagcuacuccggccagagcacccagcucgggaucgaguuccugaagcggggcgacaaguccgucuacuacaccagcaacccgacgaccuuccaccuggacggggaggugaucaccuucgacaaccucaagacccugcugucccuccgcgaggugcggacgaucaaggucuucaccaccguggacaacaucaaccugcacacccagguggucgacaugagcaugacguacggccagcaguucggccccaccuaccuggacggggccgacgugaccaagaucaagccccacaacucccacgagggcaagaccuucuacgugcucccgaacgacgacacgcugcgcgucgaggccuucgaguacuaccacaccaccgaccccagcuuccuggggcgguacauguccgcccucaaccacaccaagaaguggaaguacccccaggugaacggccugacgagcaucaagugggccgacaacaacugcuaccuggcgaccgcccuccugacccugcagcagaucgagcucaaguucaaccccccggcccugcaggacgccuacuaccgcgcgcgggccggggaggccgccaacuucugcgcccugauccucgcguacugcaacaagaccgugggcgagcugggcgacguccgcgagacgauguccuaccuguuccagcacgccaaccucgacagcugcaagcgggugcugaacgucgugugcaagaccugcgggcagcagcagaccacccugaagggcguggaggccgucauguacauggggacccucuccuacgagcaguucaagaagggcgugcagauccccugcacgugcgggaagcaggccaccaaguaccuggugcagcaggagagccccuucgucaugauguccgcccccccggcgcaguacgagcugaagcacggcaccuucaccugcgccagcgaguacacgggcaacuaccagugcgggcacuacaagcacaucaccuccaaggagacccucuacugcaucgacggcgcccugcugaccaagagcagcgaguacaaggggcccaucacggacguguucuacaaggagaacuccuacaccaccaccaucaagcccgugacguacaagcucgacggcgucgugugcaccgagaucgaccccaagcuggacaacuacuacaagaaggacaacagcuacuucaccgagcagccgaucgaccuggugcccaaccagcccuaccccaacgccuccuucgacaacuucaaguucgucugcgacaacaucaaguucgccgacgaccucaaccagcugaccggguacaagaagccggcgagccgcgagcugaaggugacguucuuccccgaccucaacggcgacguggucgccaucgacuacaagcacuacacccccuccuucaagaagggcgccaagcugcugcacaagcccaucguguggcacgugaacaacgccaccaacaaggcgaccuacaagccgaacacguggugcauccggugccucuggagcaccaagcccgucgagaccuccaacagcuucgacgugcugaaguccgaggacgcccaggggauggacaaccuggccugcgaggaccucaagcccgugagcgaggaggucguggagaaccccaccauccagaaggacgugcuggagugcaacgucaagacgaccgagguggugggcgacaucauccugaagccggccaacaacucccucaagaucaccgaggaggucgggcacaccgaccugauggccgcguacguggacaacagcucccugacgaucaagaagcccaacgagcucagccgcgugcugggccugaagacccucgccacccacgggcuggccgccgucaacuccgugcccugggacaccaucgccaacuacgcgaagccguuccugaacaagguggucagcacgaccaccaacaucgugacccgcugccucaaccgggugugcacgaacuacaugcccuacuucuucacccugcugcuccagcugugcaccuucacccgcuccaccaacagccggaucaaggccuccaugcccacgaccaucgccaagaacaccgucaagagcgugggcaaguucugccuggaggccagcuucaacuaccucaagucccccaacuucagcaagcugaucaacaucaucaucugguuccugcuccuguccgugugccugggcagccucaucuacuccaccgccgcgcuggggguccugaugagcaaccucggcaugccguccuacugcacgggguaccgcgagggcuaccugaacagcaccaacgugaccaucgccaccuacugcacgggcuccauccccugcagcgugugccuguccgggcucgacagccuggacaccuaccccucccuggagaccauccagaucaccaucagcuccuucaagugggaccucacggccuucggccuggucgccgagugguuccuggccuacauccucuucacccgguucuucuacgugcuggggcuggcggccaucaugcagcucuucuucagcuacuucgccgugcacuucaucuccaacagcuggcugauguggcugaucaucaaccugguccagauggcccccaucuccgcgauggugcgcauguacaucuucuucgccagcuucuacuacguguggaagagcuacguccacgugguggacggcugcaacuccagcaccugcaugaugugcuacaagcggaaccgcgccacccgggucgagugcacgaccaucgugaacgggguccgccgguccuucuacguguacgccaacggcggcaagggguucugcaagcuccacaacuggaacugcgugaacugcgacaccuucugcgccggcagcaccuucaucuccgacgaggucgcgcgcgaccugagccugcaguucaagcggccgaucaaccccacggaccaguccagcuacaucguggacuccgugaccgucaagaacgggagcauccaccucuacuucgacaaggccggccagaagaccuacgagcgccacucccugagccacuucgugaaccuggacaaccuccgggccaacaacaccaaggggucccugcccaucaacgugaucgucuucgacggcaagagcaagugcgaggaguccagcgccaaguccgccagcguguacuacucccagcugaugugccagcccauccuccugcuggaccaggcgcucgugagcgacgucggcgacagcgccgagguggccgugaagauguucgacgccuacgucaacacguucuccagcaccuucaacgugccgauggagaagcugaagacccugguggccaccgcggaggccgagcucgccaagaacgucucccuggacaacgugcugagcacguucaucuccgccgcgcgccagggguucguggacagcgacgucgagaccaaggacgugguggagugccucaagcugucccaccagagcgacaucgaggucaccggcgacuccugcaacaacuacaugcugaccuacaacaagguggagaacaugacgccccgggaccucggggccugcaucgacugcagcgcccgccacaucaacgcccagguggccaagucccacaacaucgcgcugaucuggaacgucaaggacuucaugagccuguccgagcagcuccggaagcagauccgcagcgccgccaagaagaacaaccugcccuucaagcugaccugcgccaccacccgccagguggugaacgucgugacgaccaagaucgcccucaagggcggguga

SEQ ID NO: 18089 - RNA, 5841 nt, Artificial Sequence
  SARS-CoV-2__MT628273.1__non-structural protein 3 (NSP3) CDS gc
auggcccccaccaaggugaccuucggcgacgacacggucaucgaggugcagggguacaagagcgugaacaucaccuucgagcuggacgagcgcaucgacaagguccucaacgagaagugcuccgccuacaccguggagcugggcaccgaggugaacgaguucgcgugcgucguggccgacgccgugaucaagacgcugcagccggucagcgagcuccugaccccccuggggaucgaccucgacgagugguccauggccaccuacuaccuguucgacgagagcggcgaguucaagcuggccucccacauguacugcagcuucuacccccccgacgaggacgaggaggagggggacugcgaggaggaggaguucgagccguccacccaguacgaguacggcacggaggacgacuaccagggcaagccccucgaguucggggcgaccagcgccgcccugcagcccgaggaggagcaggaggaggacuggcuggacgacgacucccagcagaccgugggccagcaggacgggagcgaggacaaccagaccacgaccauccagaccaucguggagguccagccccagcucgagauggagcugaccccgguggugcagacgaucgaggucaacuccuucagcggcuaccugaagcucaccgacaacguguacaucaagaacgccgacaucguggaggaggcgaagaaggucaagcccaccgugguggucaacgccgccaacguguaccugaagcacgggggcggcguggccggggcccugaacaaggcgaccaacaacgccaugcaggucgaguccgacgacuacaucgccacgaacggcccccucaagguggggggcagcugcguccuguccggccacaaccuggccaagcacugccuccacgugguggggcccaacgucaacaagggcgaggacauccagcugcugaagagcgccuacgagaacuucaaccagcacgaggugcuccuggcgccgcugcucuccgccgggaucuucggcgccgaccccauccacagccugcgggugugcgucgacaccgugcgcaccaacguguaccuggccgucuucgacaagaaccucuacgacaagcugguguccagcuuccuggagaugaagagcgagaagcagguggagcagaagaucgccgagauccccaaggaggaggucaagcccuucaucaccgaguccaagccgagcguggagcagcggaagcaggacgacaagaagaucaaggcgugcguggaggaggucacgaccacccucgaggagaccaaguuccugacggagaaccugcuccuguacaucgacaucaacgggaaccugcaccccgacuccgccacccucgugagcgacaucgacaucaccuuccugaagaaggacgcccccuacaucgugggcgacgucgugcaggagggcgugcugaccgccgucgugauccccacgaagaaggccgggggcaccaccgagaugcucgcgaaggcccugcgcaaggugccgaccgacaacuacaucacgaccuaccccgggcagggccugaacggguacaccgucgaggaggccaagaccgugcucaagaagugcaaguccgccuucuacauccugcccagcaucaucuccaacgagaagcaggagauccugggcaccgugagcuggaaccuccgggagaugcuggcgcacgccgaggagacgcgcaagcugaugcccgucugcguggagaccaaggccaucguguccaccauccagcggaaguacaagggcaucaagauccaggagggggucguggacuacggcgcccgcuucuacuucuacaccagcaagacgaccguggccucccugaucaacacccucaacgaccugaacgagacccuggucacgaugccgcucggguacgugacccacggccugaaccuggaggaggcggcccgguacaugcgcagccucaaggugcccgccaccgucuccgugagcucccccgacgccgugaccgccuacaacggguaccugacgagcuccagcaagacccccgaggagcacuucaucgagaccaucucccuggcgggcagcuacaaggacuggagcuacuccggccagagcacccagcucgggaucgaguuccugaagcggggcgacaaguccgucuacuacacgagcaacccgaccaccuuccaccuggacggggaggugaucaccuucgacaaccucaagacgcugcugucccuccgcgaggugcggaccaucaaggucuucaccaccguggacaacaucaaccugcacacgcagguggucgacaugagcaugaccuacggccagcaguucggccccaccuaccuggacggggccgacgugaccaagaucaagccccacaacucccacgagggcaagacguucuacgugcucccgaacgacgacacccugcgcgucgaggccuucgaguacuaccacaccaccgaccccagcuuccuggggcgguacauguccgcccucaaccacacgaagaaguggaaguacccccaggugaacggccugaccagcaucaagugggccgacaacaacugcuaccuggcgaccgcccuccugacccugcagcagaucgagcucaaguucaaccccccggcccugcaggacgccuacuaccgcgcgcgggccggggaggccgccaacuucugcgcccugauccucgcguacugcaacaagacggugggcgagcugggcgacguccgcgagaccauguccuaccuguuccagcacgccaaccucgacagcugcaagcgggugcugaacgucgugugcaagaccugcgggcagcagcagaccacccugaagggcguggaggccgucauguacauggggacgcucuccuacgagcaguucaagaagggcgugcagauccccugcaccugcgggaagcaggccaccaaguaccuggugcagcaggagagccccuucgucaugauguccgcccccccggcgcaguacgagcugaagcacggcaccuucacgugcgccagcgaguacaccggcaacuaccagugcgggcacuacaagcacaucaccuccaaggagacccucuacugcaucgacggcgcccugcugacgaagagcagcgaguacaaggggcccaucaccgacguguucuacaaggagaacuccuacaccaccacgaucaagcccgugaccuacaagcucgacggcgucgugugcaccgagaucgaccccaagcuggacaacuacuacaagaaggacaacagcuacuucaccgagcagccgaucgaccuggugcccaaccagcccuaccccaacgccuccuucgacaacuucaaguucgucugcgacaacaucaaguucgccgacgaccucaaccagcugacgggguacaagaagccggcgagccgcgagcugaaggugaccuucuuccccgaccucaacggcgacguggucgccaucgacuacaagcacuacacccccuccuucaagaagggcgccaagcugcugcacaagcccaucguguggcacgugaacaacgccaccaacaaggcgacguacaagccgaacaccuggugcauccggugccucuggagcaccaagcccgucgagaccuccaacagcuucgacgugcugaaguccgaggacgcccgcgggauggacaaccuggccugcgaggaccucaagcccgugagcgaggaggucguggagaaccccacgauccagaaggacgugcuggagugcaacgucaagaccaccgagguggugggcgacaucauccugaagccggccaacaacucccucaagaucaccgaggaggucgggcacacggaccugauggccgcguacguggacaacagcucccugaccaucaagaagcccaacgagcucagccgcgugcugggccugaagacccucgccacccacgggcuggccgccgucaacuccgugcccugggacacgaucgccaacuacgcgaagccguuccugaacaagguggucagcaccaccaccaacaucgugacgcggugccucaaccgcgugugcaccaacuacaugcccuacuucuucacccugcugcuccagcugugcaccuucacccgguccacgaacagccgcaucaaggccuccaugcccaccaccaucgccaagaacaccgucaagagcgugggcaaguucugccuggaggccagcuucaacuaccucaagucccccaacuucagcaagcugaucaacaucaucaucugguuccugcuccuguccgugugccugggcagccucaucuacuccacggccgcgcuggggguccugaugagcaaccucggcaugccguccuacugcaccggguaccgggagggcuaccugaacagcaccaacgugaccaucgccacguacugcaccggcuccauccccugcagcgugugccuguccgggcucgacagccuggacaccuaccccucccuggagaccauccagaucacgaucagcuccuucaagugggaccucaccgccuucggccuggucgccgagugguuccuggccuacauccucuucacccgcuucuucuacgugcuggggcuggcggccaucaugcagcucuucuucagcuacuucgccgugcacuucaucuccaacagcuggcugauguggcugaucaucaaccugguccagauggcccccaucuccgcgauggugcggauguacaucuucuucgccagcuucuacuacguguggaagagcuacguccacgugguggacggcugcaacuccagcaccugcaugaugugcuacaagcgcaaccgggccacgcgcgucgagugcaccaccaucgugaacgggguccggcgcuccuucuacguguacgccaacggcggcaagggguucugcaagcuccacaacuggaacugcgugaacugcgacaccuucugcgccggcagcacguucaucuccgacgaggucgcgcgggaccugagccugcaguucaagcgcccgaucaaccccaccgaccaguccagcuacaucguggacuccgugaccgucaagaacgggagcauccaccucuacuucgacaaggccggccagaagaccuacgagcggcacucccugagccacuucgugaaccuggacaaccuccgcgccaacaacacgaaggggucccugcccaucaacgugaucgucuucgacggcaagagcaagugcgaggaguccagcgccaaguccgccagcguguacuacucccagcugaugugccagcccauccuccugcuggaccaggcgcucgugagcgacgucggcgacagcgccgagguggccgugaagauguucgacgccuacgucaacaccuucuccagcaccuucaacgugccgauggagaagcugaagacccugguggccacggcggaggccgagcucgccaagaacgucucccuggacaacgugcugagcaccuucaucuccgccgcgcggcagggguucguggacagcgacgucgagaccaaggacgugguggagugccucaagcugucccaccagagcgacaucgaggucaccggcgacuccugcaacaacuacaugcugacguacaacaagguggagaacaugaccccccgcgaccucggggccugcaucgacugcagcgcccggcacaucaacgcccagguggccaagucccacaacaucgcgcugaucuggaacgucaaggacuucaugagccuguccgagcagcuccgcaagcagauccgcagcgccgccaagaagaacaaccugcccuucaagcugaccugcgccaccacgcggcagguggugaacgucgugaccaccaagaucgcccucaagggcggguga

SEQ ID NO: 18090 - RNA, 5841 nt, Artificial Sequence
  SARS-CoV-2__MT632495.1__non-structural protein 3 (NSP3) CDS gc
auggcccccaccaaggugaccuucggcgacgacacggucaucgaggugcagggguacaagagcgugaacaucaccuucgagcuggacgagcgcaucgacaagguccucaacgagaagugcuccgccuacaccguggagcugggcaccgaggugaacgaguucgcgugcgucguggccgacgccgugaucaagacgcugcagccggucagcgagcuccugaccccccuggggaucgaccucgacgagugguccauggccaccuacuaccuguucgacgagagcggcgaguucaagcuggccucccacauguacugcagcuucuacccccccgacgaggacgaggaggagggggacugcgaggaggaggaguucgagccguccacccaguacgaguacggcacggaggacgacuaccagggcaagccccucgaguucggggcgaccagcgccgcccugcagcccgaggaggagcaggaggaggacuggcuggacgacgacucccagcagaccgugggccagcaggacgggagcgaggacaaccagaccacgaccauccagaccaucguggagguccagccccagcucgagauggagcugaccccgguggugcagacgaucgaggucaacuccuucagcggcuaccugaagcucaccgacaacguguacaucaagaacgccgacaucguggaggaggcgaagaaggucaagcccaccgugguggucaacgccgccaacguguaccugaagcacgggggcggcguggccggggcccugaacaaggcgaccaacaacgccaugcaggucgaguccgacgacuacaucgccacgaacggcccccucaagguggggggcagcugcguccuguccggccacaacuucgccaagcacugccugcacgugguggggcccaacgucaacaagggcgaggacauccagcuccugaagagcgccuacgagaacuucaaccagcacgaggugcugcucgcgccgcugcuguccgccgggaucuucggcgccgaccccauccacagccuccgggugugcgucgacaccgugcgcaccaacguguaccuggccgucuucgacaagaaccuguacgacaagcucguguccagcuuccuggagaugaagagcgagaagcagguggagcagaagaucgccgagauccccaaggaggaggucaagcccuucaucaccgaguccaagccgagcguggagcagcggaagcaggacgacaagaagaucaaggcgugcguggaggaggucacgaccacccuggaggagaccaaguuccucacggagaaccugcugcucuacaucgacaucaacgggaaccugcaccccgacuccgccacccuggugagcgacaucgacaucaccuuccucaagaaggacgcccccuacaucgugggcgacgucgugcaggagggcgugcugaccgccgucgugauccccacgaagaaggccgggggcaccaccgagaugcuggcgaaggcccuccgcaaggugccgaccgacaacuacaucacgaccuaccccgggcagggccugaacggguacaccgucgaggaggccaagaccgugcugaagaagugcaaguccgccuucuacauccuccccagcaucaucuccaacgagaagcaggagauccugggcaccgugagcuggaaccugcgggagaugcucgcgcacgccgaggagacgcgcaagcugaugcccgucugcguggagaccaaggccaucguguccaccauccagcggaaguacaagggcaucaagauccaggagggggucguggacuacggcgcccgcuucuacuucuacaccagcaagacgaccguggccucccugaucaacacccugaacgaccucaacgagacccuggucacgaugccgcugggguacgugacccacggccucaaccuggaggaggcggcccgguacaugcgcagccugaaggugcccgucaccguguccgugagcucccccgacgccgucaccgccuacaacggguaccucacgagcuccagcaagacccccgaggagcacuucaucgagaccaucucccuggccggcagcuacaaggacuggagcuacuccggccagagcacccagcuggggaucgaguuccucaagcggggcgacaaguccguguacuacacgagcaacccgaccaccuuccaccuggacggggaggugaucaccuucgacaaccugaagacgcuccugucccugcgcgagguccggaccaucaagguguucaccaccguggacaacaucaaccuccacacgcaggucguggacaugagcaugaccuacggccagcaguucggccccaccuaccuggacggggcggacgugaccaagaucaagccccacaacucccacgagggcaagacguucuacguccugccgaacgacgacacccuccgcguggaggccuucgaguacuaccacaccaccgaccccagcuuccuggggcgguacauguccgcccugaaccacacgaagaaguggaaguacccccaggugaacggccucaccagcaucaagugggccgacaacaacugcuaccuggccaccgcgcugcucacccugcagcagaucgagcugaaguucaaccccccggcccuccaggacgccuacuaccgcgcccgggcgggggaggccgccaacuucugcgcccugauccuggccuacugcaacaagacggucggcgagcucggcgacgugcgcgagaccauguccuaccuguuccagcacgcgaaccuggacagcugcaagcggguccucaacguggugugcaagaccugcgggcagcagcagaccacccugaagggcgucgaggccgugauguacauggggacgcuguccuacgagcaguucaagaagggcgugcagauccccugcaccugcgggaagcaggccaccaaguaccucguccagcaggagagccccuucgugaugauguccgcccccccggcccaguacgagcugaagcacggcaccuucacgugcgcgagcgaguacaccggcaacuaccagugcgggcacuacaagcacaucaccuccaaggagacccuguacugcaucgacggcgcccuccugacgaagagcagcgaguacaaggggcccaucaccgacguguucuacaaggagaacuccuacaccaccacgaucaagcccgucaccuacaagcuggacggcguggugugcaccgagaucgaccccaagcucgacaacuacuacaagaaggacaacagcuacuucaccgagcagccgaucgaccugguccccaaccagcccuaccccaacgccuccuucgacaacuucaaguucgugugcgacaacaucaaguucgccgacgaccugaaccagcucacgggguacaagaagccggccagccgcgagcugaaggugaccuucuuccccgaccugaacggcgacgucguggcgaucgacuacaagcacuacacccccuccuucaagaagggcgccaagcuccugcacaagcccaucguguggcacgucaacaacgccaccaacaaggccacguacaagccgaacaccuggugcauccggugccuguggagcaccaagcccguggagaccuccaacagcuucgacgugcucaaguccgaggacgcgcaggggauggacaaccuggccugcgaggaccugaagcccgucagcgaggaggugguggagaaccccacgauccagaaggacguccucgagugcaacgugaagaccaccgagguggucggcgacaucauccugaagccggccaacaacucccugaagaucaccgaggagguggggcacacggaccucauggccgccuacguggacaacagcucccugaccaucaagaagcccaacgagcugagccgcguccucggccugaagacccuggcgacccacgggcucgccgccgugaacuccgugcccugggacacgaucgccaacuacgccaagccguuccugaacaaggucgugagcaccaccaccaacaucgugacgcgcugccugaaccgggucugcaccaacuacaugcccuacuucuucacccuccugcugcagcucugcaccuucacccgcuccacgaacagccggaucaaggcguccaugcccaccaccaucgccaagaacaccgugaagagcgugggcaaguucugccuggaggccagcuucaacuaccugaagucccccaacuucagcaagcucaucaacaucaucaucugguuccugcugcucuccgucugccugggcagccugaucuacuccacggccgcccucggggugcugaugagcaaccugggcaugccguccuacugcaccggguaccgcgagggcuaccucaacagcaccaacgugaccaucgcgacguacugcaccggcuccauccccugcagcgucugccuguccgggcuggacagccucgacaccuaccccucccuggagaccauccagaucacgaucagcuccuucaagugggaccugaccgccuucggccucguggccgagugguuccuggccuacauccuguucacccgguucuucuacgugcucgggcuggccgcgaucaugcagcuguucuucagcuacuucgccguccacuucaucuccaacagcuggcucauguggcugaucaucaaccuggugcagauggcccccaucuccgccauggugcgcauguacaucuucuucgcgagcuucuacuacgucuggaagagcuacgugcacguggucgacggcugcaacuccagcaccugcaugaugugcuacaagcggaaccgcgccacgcggguggagugcaccaccaucgucaacggggugcgccgguccuucuacguguacgccaacggcggcaagggguucugcaagcugcacaacuggaacugcgucaacugcgacaccuucugcgccggcagcacguucaucuccgacgagguggcccgcgaccucagccugcaguucaagcggccgaucaaccccaccgaccaguccagcuacaucguggacuccgucaccgugaagaacgggagcauccaccuguacuucgacaaggcgggccagaagaccuacgagcgccacucccucagccacuucgugaaccuggacaaccugcgggccaacaacacgaaggggucccuccccaucaacgucaucguguucgacggcaagagcaagugcgaggaguccagcgccaaguccgccagcguguacuacucccagcugaugugccagcccauccugcuccuggaccaggcccuggucagcgacgugggcgacagcgcggagguggccgucaagauguucgacgccuacgugaacaccuucuccagcaccuucaacgugccgauggagaagcucaagacccuggucgccacggccgaggcggagcuggccaagaacgugucccucgacaacgugcugagcaccuucaucuccgccgcccgccagggguucgucgacagcgacguggagaccaaggacguggucgagugccugaagcucucccaccagagcgacaucgaggugaccggcgacuccugcaacaacuacaugcugacguacaacaagguggagaacaugaccccccgggaccugggggcgugcaucgacugcagcgcccgccacaucaacgcccaggucgccaagucccacaacaucgcccucaucuggaacgugaaggacuucaugagccuguccgagcagcugcggaagcagauccgcagcgcggccaagaagaacaaccuccccuucaagcugaccugcgccaccacgcgccagguggucaacguggugaccaccaagaucgcccugaagggcggguga

SEQ ID NO: 18091 - RNA, 5841 nt, Artificial Sequence
  SARS-CoV-2__MT632503.1__non-structural protein 3 (NSP3) CDS gc
auggcccccaccaaggugaccuucggcgacgacacggucaucgaggugcagggguacaagagcgugaacaucaccuucgagcuggacgagcgcaucgacaagguccucaacgagaagugcuccgccuacaccguggagcugggcaccgaggugaacgaguucgcgugcgucguggccgacgccgugaucaagacgcugcagccggucagcgagcuccugaccccccuggggaucgaccucgacgagugguccauggccaccuacuaccuguucgacgagagcggcgaguucaagcuggccucccacauguacugcagcuucuacccccccgacgaggacgaggaggagggggacugcgaggaggaggaguucgagccguccacccaguacgaguacggcacggaggacgacuaccagggcaagccccucgaguucggggcgaccagcgccgcccugcagcccgaggaggagcaggaggaggacuggcuggacgacgacucccagcagaccgugggccagcaggacgggagcgaggacaaccagaccacgaccauccagaccaucguggagguccagccccagcucgagauggagcugaccccgguggugcagacgaucgaggucaacuccuucagcggcuaccugaagcucaccgacaacguguacaucaagaacgccgacaucguggaggaggcgaagaaggucaagcccaccgugguggucaacgccgccaacguguaccugaagcacgggggcggcguggccggggcccugaacaaggcgaccaacaacgccaugcaggucgaguccgacgacuacaucgccacgaacggcccccucaagguggggggcagcugcguccuguccggccacaaccuggccaagcacugccuccacgugguggggcccaacgucaacaagggcgaggacauccagcugcugaagagcgccuacgagaacuucaaccagcacgaggugcuccuggcgccgcugcucuccgccgggaucuucggcgccgaccccauccacagccugcgggugugcgucgacaccgugcgcaccaacguguaccuggccgucuucgacaagaaccucuacgacaagcugguguccagcuuccuggagaugaagagcgagaagcagguggagcagaagaucgccgagauccccaaggaggaggucaagcccuucaucaccgaguccaagccgagcguggagcagcggaagcaggacgacaagaagaucaaggcgugcguggaggaggucacgaccacccucgaggagaccaaguuccugacggagaaccugcuccuguacaucgacaucaacgggaaccugcaccccgacuccgccacccucgugagcgacaucgacaucaccuuccugaagaaggacgcccccuacaucgugggcgacgucgugcaggagggcgugcugaccgccgucgugauccccacgaagaaggccgggggcaccaccgagaugcucgcgaaggcccugcgcaaggugccgaccgacaacuacaucacgaccuaccccgggcagggccugaacggguacaccgucgaggaggccaagaccgugcucaagaagugcaaguccgccuucuacauccugcccagcaucaucuccaacgagaagcaggagauccugggcaccgugagcuggaaccuccgggagaugcuggcgcacgccgaggagacgcgcaagcugaugcccgucugcguggagaccaaggccaucguguccaccauccagcggaaguacaagggcaucaagauccaggagggggucguggacuacggcgcccgcuucuacuucuacaccagcaagacgaccguggccucccugaucaacacccucaacgaccugaacgagacccuggucacgaugccgcucggguacgugacccacggccugaaccuggaggaggcggcccgguacaugcgcagccucaaggugcccgccaccgucuccgugagcucccccgacgccgugaccgccuacaacggguaccugacgagcuccagcaagacccccgaggagcacuucaucgagaccaucucccuggcgggcagcuacaaggacuggagcuacuccggccagagcacccagcucgggaucgaguuccugaagcggggcgacaaguccgucuacuacacgagcaacccgaccaccuuccaccuggacggggaggugaucaccuucgacaaccucaagacgcugcugucccuccgcgaggugcggaccaucaaggucuucaccaccguggacaacaucaaccugcacacgcagguggucgacaugagcaugaccuacggccagcaguucggccccaccuaccuggacggggccgacgugaccaagaucaagccccacaacucccacgagggcaagacguucuacgugcucccgaacgacgacacccugcgcgucgaggccuucgaguacuaccacaccaccgaccccagcuuccuggggcgguacauguccgcccucaaccacacgaagaaguggaaguacccccaggugaacggccugaccagcaucaagugggccgacaacaacugcuaccuggcgaccgcccuccugacccugcagcagaucgagcucaaguucaaccccccggcccugcaggacgccuacuaccgcgcgcgggccggggaggccgccaacuucugcgcccugauccucgcguacugcaacaagacggugggcgagcugggcgacguccgcgagaccauguccuaccuguuccagcacgccaaccucgacagcugcaagcgggugcugaacgucgugugcaagaccugcgggcagcagcagaccacccugaagggcguggaggccgucauguacauggggacgcucuccuacgagcaguucaagaagggcgugcagauccccugcaccugcgggaagcaggccaccaaguaccuggugcagcaggagagccccuucgucaugauguccgcccccccggcgcaguacgagcugaagcacggcaccuucacgugcgccagcgaguacaccggcaacuaccagugcgggcacuacaagcacaucaccuccaaggagacccucuacugcaucgacggcgcccugcugacgaagagcagcgaguacaaggggcccaucaccgacguguucuacaaggagaacuccuacaccaccacgaucaagcccgugaccuacaagcucgacggcgucgugugcaccgagaucgaccccaagcuggacaacuacuacaagaaggacaacagcuacuucaccgagcagccgaucgaccuggugcccaaccagcccuaccccaacgccuccuucgacaacuucaaguucgucugcgacaacaucaaguucgccgacgaccucaaccagcugacgggguacaagaagccggcgagccgcgagcugaaggugaccuucuuccccgaccucaacggcgacguggucgccaucgacuacaagcacuacacccccuccuucaagaagggcgccaagcugcugcacaagcccaucguguggcacgugaacaacgccaccaacaaggcgacguacaagccgaacaccuggugcauccggugccucuggagcaccaagcccgucgagaccuccaacagcuucgacgugcugaaguccgaggacgcccaggggauggacaaccuggccugcgaggaccucaagcccgugagcgaggaggucguggagaaccccacgauccagaaggacgugcuggagugcaacgucaagaccaccgagguggugggcgacaucauccugaagccggccaacaacucccucaagaucaccgaggaggucgggcacacggaccugauggccgcguacguggacaacagcucccugaccaucaagaagcccaacgagcucagccgcgugcugggccugaagacccucgccacccacgggcuggccgccgucaacuccgugcccugggacacgaucgccaacuacgcgaagccguuccugaacaagguggucagcaccaccaccaacaucgugacgcgcugccucaaccgggugugcaccaacuacaugcccuacuucuucacccugcugcuccagcugugcaccuucacccgcuccacgaacagccggaucaaggccuccaugcccaccaccaucgccaagaacaccgucaagagcgugggcaaguucugccuggaggccagcuucaacuaccucaagucccccaacuucagcaagcugaucaacaucaucaucugguuccugcuccuguccgugugccugggcagccucaucuacuccacggccgcgcuggggguccugaugagcaaccucggcaugccguccuacugcaccggguaccgcgagggcuaccugaacagcaccaacgugaccaucgccacguacugcaccggcuccauccccugcagcgugugccuguccgggcucgacagccuggacaccuaccccucccuggagaccauccagaucacgaucagcuccuucaagugggaccucaccgccuucggccuggucgccgagugguuccuggccuacauccucuucacccgguucuucuacgugcuggggcuggcggccaucaugcagcucuucuucagcuacuucgccgugcacuucaucuccaacagcuggcugauguggcugaucaucaaccugguccagauggcccccaucuccgcgauggugcgcauguacaucuucuucgccagcuucuacuacguguggaagagcuacguccacgugguggacggcugcaacuccagcaccugcaugaugugcuacaagcggaaccgcgccacgcgggucgagugcaccaccaucgugaacgggguccgccgguccuucuacguguacgccaacggcggcaagggguucugcaagcuccacaacuggaacugcgugaacugcgacaccuucugcgccggcagcacguucaucuccgacgaggucgcgcgcgaccugagccugcaguucaagcggccgaucaaccccaccgaccaguccagcuacaucguggacuccgugaccgucaagaacgggagcauccaccucuacuucgacaaggccggccagaagaccuacgagcgccacucccugagccacuucgugaaccuggacaaccuccgggccaacaacacgaaggggucccugcccaucaacgugaucgucuucgacggcaagagcaagugcgaggaguccagcgccaaguccgccagcguguacuacucccagcugaugugccagcccauccuccugcuggaccaggcgcucgugagcgacgucggcgacagcgccgagguggccgugaagauguucgacgccuacgucaacaccuucuccagcaccuucaacgugccgauggagaagcugaagacccugguggccacggcggaggccgagcucgccaagaacgucucccuggacaacgugcugagcaucuucaucuccgccgcgcgccagggguucguggacagcgacgucgagaccaaggacgugguggagugccucaagcugucccaccagagcgacaucgaggucaccggcgacuccugcaacaacuacaugcugaccuacaacaagguggagaacaugacgccccgggaccucggggccugcaucgacugcagcgcccgccacaucaacgcccagguggccaagucccacaacaucgcgcugaucuggaacgucaaggacuucaugagccuguccgagcagcuccggaagcagauccgcagcgccgccaagaagaacaaccugcccuucaagcugaccugcgccaccacccgccagguggugaacgucgugacgaccaagaucgcccucaagggcggguga

SEQ ID NO: 18092 - RNA, 5841 nt, Artificial Sequence
  SARS-CoV-2__MT632621.1__non-structural protein 3 (NSP3) CDS gc
auggcccccaccaaggugaccuucggcgacgacacggucaucgaggugcagggguacaagagcgugaacaucaccuucgagcuggacgagcgcaucgacaagguccucaacgagaagugcuccgccuacaccguggagcugggcaccgaggugaacgaguucgcgugcgucguggccgacgccgugaucaagacgcugcagccggucagcgagcuccugaccccccuggggaucgaccucgacgagugguccauggccaccuacuaccuguucgacgagagcggcgaguucaagcuggccucccacauguacugcagcuucuacccccccgacgaggacgaggaggagggggacugcgaggaggaggaguucgagccguccacccaguacgaguacggcacggaggacgacuaccagggcaagccccucgaguucggggcgaccagcgccgcccugcagcccgaggaggagcaggaggaggacuggcuggacgacgacucccagcagaccgugggccagcaggacgggagcgaggacaaccagaccacgaccauccagaccaucguggagguccagccccagcucgagauggagcugaccccgguggugcagacgaucgaggucaacuccuucagcggcuaccugaagcucaccgacaacguguacaucaagaacgccgacaucguggaggaggcgaagaaggucaagcccaccgugguggucaacgccgccaacguguaccugaagcacgggggcggcguggccggggcccugaccaaggcgacgaacaacgccaugcaggucgaguccgacgacuacaucgccaccaacggcccccucaagguggggggcagcugcguccuguccggccacaaccuggccaagcacugccuccacgugguggggcccaacgucaacaagggcgaggacauccagcugcugaagagcgccuacgagaacuucaaccagcacgaggugcuccuggcgccgcugcucuccgccgggaucuucggcgccgaccccauccacagccugcgggugugcgucgacaccgugcgcaccaacguguaccuggccgucuucgacaagaaccucuacgacaagcugguguccagcuuccuggagaugaagagcgagaagcagguggagcagaagaucgccgagauccccaaggaggaggucaagcccuucaucacggaguccaagccgagcguggagcagcggaagcaggacgacaagaagaucaaggcgugcguggaggaggucaccaccacccucgaggagacgaaguuccugaccgagaaccugcuccuguacaucgacaucaacgggaaccugcaccccgacuccgccacccucgugagcgacaucgacaucaccuuccugaagaaggacgcccccuacaucgugggcgacgucgugcaggagggcgugcugacggccgucgugauccccaccaagaaggccgggggcaccaccgagaugcucgcgaaggcccugcgcaaggugccgacggacaacuacaucaccaccuaccccgggcagggccugaacggguacaccgucgaggaggccaagaccgugcucaagaagugcaaguccgccuucuacauccugcccagcaucaucuccaacgagaagcaggagauccugggcacggugagcuggaaccuccgggagaugcuggcgcacgccgaggagacccgcaagcugaugcccgucugcguggagaccaaggccaucguguccaccauccagcggaaguacaagggcaucaagauccaggagggggucguggacuacggcgcccgcuucuacuucuacacgagcaagaccaccguggccucccugaucaacacccucaacgaccugaacgagacgcuggucaccaugccgcucggguacgugacccacggccugaaccuggaggaggcggcccgguacaugcgcagccucaaggugcccgccaccgucuccgugagcucccccgacgccgugacggccuacaacggguaccugaccagcuccagcaagacccccgaggagcacuucaucgagaccaucucccuggcgggcagcuacaaggacuggagcuacuccggccagagcacgcagcucgggaucgaguuccugaagcggggcgacaaguccgucuacuacaccagcaacccgaccaccuuccaccuggacggggaggugaucacguucgacaaccucaagacccugcugucccuccgcgaggugcggaccaucaaggucuucaccacgguggacaacaucaaccugcacacccagguggucgacaugagcaugaccuacggccagcaguucggccccaccuaccuggacggggccgacgugacgaagaucaagccccacaacucccacgagggcaagaccuucuacgugcucccgaacgacgacacccugcgcgucgaggccuucgaguacuaccacaccacggaccccagcuuccuggggcgguacauguccgcccucaaccacaccaagaaguggaaguacccccaggugaacggccugaccagcaucaagugggccgacaacaacugcuaccuggcgaccgcccuccugacgcugcagcagaucgagcucaaguucaaccccccggcccugcaggacgccuacuaccgcgcgcgggccggggaggccgccaacuucugcgcccugauccucgcguacugcaacaagaccgugggcgagcugggcgacguccgcgagaccauguccuaccuguuccagcacgccaaccucgacagcugcaagcgggugcugaacgucgugugcaagaccugcgggcagcagcagaccacgcugaagggcguggaggccgucauguacauggggacccucuccuacgagcaguucaagaagggcgugcagauccccugcaccugcgggaagcaggccaccaaguaccuggugcagcaggagagccccuucgucaugauguccgcccccccggcgcaguacgagcugaagcacggcacguucaccugcgccagcgaguacaccggcaacuaccagugcgggcacuacaagcacaucaccuccaaggagacgcucuacugcaucgacggcgcccugcugaccaagagcagcgaguacaaggggcccaucaccgacguguucuacaaggagaacuccuacaccacgaccaucaagcccgugaccuacaagcucgacggcgucgugugcaccgagaucgaccccaagcuggacaacuacuacaagaaggacaacagcuacuucacggagcagccgaucgaccuggugcccaaccagcccuaccccaacgccuccuucgacaacuucaaguucgucugcgacaacaucaaguucgccgacgaccucaaccagcugaccggguacaagaagccggcgagccgcgagcugaaggugaccuucuuccccgaccucaacggcgacguggucgccaucgacuacaagcacuacacccccuccuucaagaagggcgccaagcugcugcacaagcccaucguguggcacgugaacaacgccacgaacaaggcgaccuacaagccgaacaccuggugcauccggugccucuggagcaccaagcccgucgagacguccaacagcuucgacgugcugaaguccgaggacgcccaggggauggacaaccuggccugcgaggaccucaagcccgugagcgaggaggucguggagaaccccaccauccagaaggacgugcuggagugcaacgucaagaccaccgagguggugggcgacaucauccugaagccggccaacaacucccucaagaucacggaggaggucgggcacaccgaccugauggccgcguacguggacaacagcucccugaccaucaagaagcccaacgagcucagccgcgugcugggccugaagacccucgccacgcacgggcuggccgccgucaacuccgugcccugggacaccaucgccaacuacgcgaagccguuccugaacaagguggucagcaccaccacgaacaucgugacccgcugccucaaccgggugugcaccaacuacaugcccuacuucuucacccugcugcuccagcugugcaccuucacgcgcuccaccaacagccggaucaaggccuccaugcccaccaccaucgccaagaacacggucaagagcgugggcaaguucugccuggaggccagcuucaacuaccucaagucccccaacuucagcaagcugaucaacaucaucaucugguuccugcuccuguccgugugccugggcagccucaucuacuccaccgccgcgcuggggguccugaugagcaaccucggcaugccguccuacugcaccggguaccgcgagggcuaccugaacagcaccaacgugacgaucgccaccuacugcaccggcuccauccccugcagcgugugccuguccgggcucgacagccuggacaccuaccccucccuggagacgauccagaucaccaucagcuccuucaagugggaccucaccgccuucggccuggucgccgagugguuccuggccuacauccucuucacccgguucuucuacgugcuggggcuggcggccaucaugcagcucuucuucagcuacuucgccgugcacuucaucuccaacagcuggcugauguggcugaucaucaaccugguccagauggcccccaucuccgcgauggugcgcauguacaucuucuucgccagcuucuacuacguguggaagagcuacguccacgugguggacggcugcaacuccagcacgugcaugaugugcuacaagcggaaccgcgccacccgggucgagugcaccaccaucgugaacgggguccgccgguccuucuacguguacgccaacggcggcaagggguucugcaagcuccacaacuggaacugcgugaacugcgacacguucugcgccggcagcaccuucaucuccgacgaggucgcgcgcgaccugagccugcaguucaagcggccgaucaaccccaccgaccaguccagcuacaucguggacuccgugaccgucaagaacgggagcauccaccucuacuucgacaaggccggccagaagacguacgagcgccacucccugagccacuucgugaaccuggacaaccuccgggccaacaacaccaaggggucccugcccaucaacgugaucgucuucgacggcaagagcaagugcgaggaguccagcgccaaguccgccagcguguacuacucccagcugaugugccagcccauccuccugcuggaccaggcgcucgugagcgacgucggcgacagcgccgagguggccgugaagauguucgacgccuacgucaacaccuucuccagcaccuucaacgugccgauggagaagcugaagacgcugguggccaccgcggaggccgagcucgccaagaacgucucccuggacaacgugcugagcaccuucaucuccgccgcgcgccagggguucguggacagcgacgucgagaccaaggacgugguggagugccucaagcugucccaccagagcgacaucgaggucacgggcgacuccugcaacaacuacaugcugaccuacaacaagguggagaacaugaccccccgggaccucggggccugcaucgacugcagcgcccgccacaucaacgcccagguggccaagucccacaacaucgcgcugaucuggaacgucaaggacuucaugagccuguccgagcagcuccggaagcagauccgcagcgccgccaagaagaacaaccugcccuucaagcugaccugcgccacgacccgccagguggugaacgucgugaccaccaagaucgcccucaagggcggguga

SEQ ID NO: 18093 - RNA, 5841 nt, Artificial Sequence
  SARS-CoV-2__MT632626.1__non-structural protein 3 (NSP3) CDS gc
auggcccccaccaaggugaccuucggcgacgacacggucaucgaggugcagggguacaagagcgugaacaucaccuucgagcuggacgagcgcaucgacaagguccucaacgagaagugcuccgccuacaccguggagcugggcaccgaggugaacgaguucgcgugcgucguggccgacgccgugaucaagacgcugcagccggucagcgagcuccugaccccccuggggaucgaccucgacgagugguccauggccaccuacuaccuguucgacgagagcggcgaguucaagcuggccucccacauguacugcagcuucuacccccccgacgaggacgaggaggagggggacugcgaggaggaggaguucgagccguccacccaguacgaguacggcacggaggacgacuaccagggcaagccccucgaguucggggcgaccagcgccgcccugcagcccgaggaggagcaggaggaggacuggcuggacgacgacucccagcagaccgugggccagcaggacgggagcgaggacaaccagaccacgaccauccagaccaucguggagguccagccccagcucgagauggagcugaccccgguggugcagacgaucgaggucaacuccuucagcggcuaccugaagcucaccgacaacguguacaucaagaacgccgacaucguggaggaggcgaagaaggucaagcccaccgugguggucaacgccgccaacguguaccugaagcacgggggcggcguggccggggcccugaacaaggcgaccaacaacgccaugcaggucgaguccgacgacuacaucgccacgaacggcccccucaagguggggggcagcugcguccuguccggccacaaccuggccaagcacugccuccacgugguggggcccaacgucaacaagggcgaggacauccagcugcugaagagcgccuacgagaacuucaaccagcacgaggugcuccuggcgccgcugcucuccgccgggaucuucggcgccgaccccauccacagccugcgggugugcgucgacaccgugcgcaccaacguguaccuggccgucuucgacaagaaccucuacgacaagcugguguccagcuuccuggagaugaagagcgagaagcagguggagcagaagaucgccgagauccccaaggaggaggucaagcccuucaucaccgaguccaagccgagcguggagcagcggaagcaggacgacaagaagaucaaggcgugcguggaggaggucacgaccacccucgaggagaccaaguuccugacggagaaccugcuccuguacaucgacaucaacgggaaccugcaccccgacuccgccacccucgugagcgacaucgacgugaccuuccugaagaaggacgcccccuacaucgucggcgacguggugcaggagggcguccugaccgccguggugauccccacgaagaaggccgggggcaccaccgagaugcucgcgaaggcccugcgcaaggucccgaccgacaacuacaucacgaccuaccccgggcagggccugaacggguacaccguggaggaggccaagaccgugcucaagaagugcaaguccgccuucuacauccugcccagcaucaucuccaacgagaagcaggagauccugggcaccgucagcuggaaccuccgggagaugcuggcgcacgccgaggagacgcgcaagcugaugcccgugugcguggagaccaaggccaucgucuccaccauccagcggaaguacaagggcaucaagauccaggagggggugguggacuacggcgcccgcuucuacuucuacaccagcaagacgaccgucgccucccugaucaacacccucaacgaccugaacgagacccuggugacgaugccgcucggguacgugacccacggccugaaccuggaggaggcggcccgguacaugcgcagccucaagguccccgccaccguguccgugagcucccccgacgccgucaccgccuacaacggguaccugacgagcuccagcaagacccccgaggagcacuucaucgagaccaucucccuggcgggcagcuacaaggacuggagcuacuccggccagagcacccagcucgggaucgaguuccugaagcggggcgacaaguccguguacuacacgagcaacccgaccaccuuccaccuggacggggaggugaucaccuucgacaaccucaagacgcugcugucccuccgcgagguccggaccaucaagguguucaccaccguggacaacaucaaccugcacacgcaggucguggacaugagcaugaccuacggccagcaguucggccccaccuaccuggacggggccgacgugaccaagaucaagccccacaacucccacgagggcaagacguucuacguccucccgaacgacgacacccugcgcguggaggccuucgaguacuaccacaccaccgaccccagcuuccuggggcgguacauguccgcccucaaccacacgaagaaguggaaguacccccaggugaacggccugaccagcaucaagugggccgacaacaacugcuaccuggcgaccgcccuccugacccugcagcagaucgagcucaaguucaaccccccggcccugcaggacgccuacuaccgcgcgcgggccggggaggccgccaacuucugcgcccugauccucgcguacugcaacaagacggucggcgagcugggcgacgugcgcgagaccauguccuaccuguuccagcacgccaaccucgacagcugcaagcggguccugaacguggugugcaagaccugcgggcagcagcagaccacccugaagggcgucgaggccgugauguacauggggacgcucuccuacgagcaguucaagaagggcgugcagauccccugcaccugcgggaagcaggccaccaaguaccugguccagcaggagagccccuucgugaugauguccgcccccccggcgcaguacgagcugaagcacggcaccuucacgugcgccagcgaguacaccggcaacuaccagugcgggcacuacaagcacaucaccuccaaggagacccucuacugcaucgacggcgcccugcugacgaagagcagcgaguacaaggggcccaucaccgacguguucuacaaggagaacuccuacaccaccacgaucaagcccgucaccuacaagcucgacggcguggugugcaccgagaucgaccccaagcuggacaacuacuacaagaaggacaacagcuacuucaccgagcagccgaucgaccugguccccaaccagcccuaccccaacgccuccuucgacaacuucaaguucgugugcgacaacaucaaguucgccgacgaccucaaccagcugacgggguacaagaagccggcgagccgcgagcugaaggugaccuucuuccccgaccucaacggcgacgucguggccaucgacuacaagcacuacacccccuccuucaagaagggcgccaagcugcugcacaagcccaucguguggcacgucaacaacgccaccaacaaggcgacguacaagccgaacaccuggugcauccggugccucuggagcaccaagcccguggagaccuccaacagcuucgacgugcugaaguccgaggacgcccaggggauggacaaccuggccugcgaggaccucaagcccgucagcgaggaggugguggagaaccccacgauccagaaggacguccuggagugcaacgugaagaccaccgagguggucggcgacaucauccugaagccggccaacaacucccucaagaucaccgaggagguggggcacacggaccugauggccgcguacguggacaacagcucccugaccaucaagaagcccaacgagcucagccgcguccugggccugaagacccucgccacccacgggcuggccgccgugaacuccgugcccugggacacgaucgccaacuacgcgaagccguuccugaacaaggucgugagcaccaccaccaacaucgugacgcgcugccucaaccgggucugcaccaacuacaugcccuacuucuucacccugcugcuccagcugugcaccuucacccgcuccacgaacagccggaucaaggccuccaugcccaccaccaucgccaagaacaccgugaagagcgugggcaaguucugccuggaggccagcuucaacuaccucaagucccccaacuucagcaagcugaucaacaucaucaucugguuccugcuccuguccgucugccugggcagccucaucuacuccacggccgcgcugggggugcugaugagcaaccucggcaugccguccuacugcaccggguaccgcgagggcuaccugaacagcaccaacgugaccaucgccacguacugcaccggcuccauccccugcagcgucugccuguccgggcucgacagccuggacaccuaccccucccuggagaccauccagaucacgaucagcuccuucaagugggaccucaccgccuucggccugguggccgagugguuccuggccuacauccucuucacccgguucuucuacgugcuggggcuggcggccaucaugcagcucuucuucagcuacuucgccguccacuucaucuccaacagcuggcugauguggcugaucaucaaccuggugcagauggcccccaucuccgcgauggugcgcauguacaucuucuucgccagcuucuacuacgucuggaagagcuacgugcacguggucgacggcugcaacuccagcaccugcaugaugugcuacaagcggaaccgcgccacgcggguggagugcaccaccaucgucaacggggugcgccgguccuucuacguguacgccaacggcggcaagggguucugcaagcuccacaacuggaacugcgucaacugcgacaccuucugcgccggcagcacguucaucuccgacgagguggcgcgcgaccugagccugcaguucaagcggccgaucaaccccaccgaccaguccagcuacaucguggacuccgucaccgugaagaacgggagcauccaccucuacuucgacaaggccggccagaagaccuacgagcgccacucccugagccacuucgugaaccuggacaaccuccgggccaacaacacgaaggggucccugcccaucaacgucaucguguucgacggcaagagcaagugcgaggaguccagcgccaaguccgccagcguguacuacucccagcugaugugccagcccauccuccugcuggaccaggcgcucgucagcgacgugggcgacagcgccgagguggccgucaagauguucgacgccuacgugaacaccuucuccagcaccuucaacgugccgauggagaagcugaagacccuggucgccacggcggaggccgagcucgccaagaacgugucccuggacaacgugcugagcaccuucaucuccgccgcgcgccagggguucgucgacagcgacguggagaccaaggacguggucgagugccucaagcugucccaccagagcgacaucgaggugaccggcgacuccugcaacaacuacaugcugacguacaacaagguggagaacaugaccccccgggaccucggggccugcaucgacugcagcgcccgccacaucaacgcccaggucgccaagucccacaacaucgcgcugaucuggaacgugaaggacuucaugagccuguccgagcagcuccggaagcagauccgcagcgccgccaagaagaacaaccugcccuucaagcugaccugcgccaccacgcgccagguggucaacguggugaccaccaagaucgcccucaagggcggguga

SEQ ID NO: 18094 - RNA, 5841 nt, Artificial Sequence
  SARS-CoV-2__MT632766.1__non-structural protein 3 (NSP3) CDS gc
auggcccccaccaaggugaccuucggcgacgacacggucaucgaggugcagggguacaagagcgugaacaucaccuucgagcuggacgagcgcaucgacaagguccucaacgagaagugcuccgccuacaccguggagcugggcaccgaggugaacgaguucgcgugcgucguggccgacgccgugaucaagacgcugcagccggucagcgagcuccugaccccccuggggaucgaccucgacgagugguccauggccaccuacuaccuguucgacgagagcggcgaguucaagcuggccucccacauguacugcagcuucuacccccccgacgaggacgaggaggagggggacugcgaggaggaggaguucgagccguccacccaguacgaguacggcacggaggacgacuaccagggcaagccccucgaguucggggcgaccagcgccgcccugcagcccgaggaggagcaggaggaggacuggcuggacgacgacucccagcagaccgugggccagcaggacgggagcgaggacaaccagaccacgaccauccagaccaucguggagguccagccccagcucgagauggagcugaccccgguggugcagacgaucgaggucaacuccuucagcggcuaccugaagcucaccgacaacguguacaucaagaacgccgacaucguggaggaggcgaagaaggucaagcccaccgugguggucaacgccgccaacguguaccugaagcacgggggcggcguggccggggcccugaacaaggcgaccaacaacgccaugcaggucgaguccgacgacuacaucgccacgaacggcccccucaagguggggggcagcugcguccuguccggccacaaccuggccaagcacugccuccacgugguggggcccaacgucaacaagggcgaggacauccagcugcugaagagcgccuacgagaacuucaaccagcacgaggugcuccuggcgccgcugcucuccgccgggaucuucggcgccgaccccauccacagccugcgggugugcgucgacaccgugcgcaccaacguguaccuggccgucuucgacaagaaccucuacgacaagcugguguccagcuuccuggagaugaagagcgagaagcagguggagcagaagaucgccgagauccccaaggaggaggucaagcccuucaucaccgaguccaagccgagcguggagcagcggaagcaggacgacaagaagaucaaggcgugcguggaggaggucacgaccacccucgaggagaccaaguuccugacggagaaccugcuccuguacaucgacaucaacgggaaccugcaccccgacuccgccacccucgugagcgacaucgacaucaccuuccugaagaaggacgcccccuacaucgugggcgacgucgugcaggagggcgugcugaccgccgucgugauccccacgaagaaggccgggggcaccaccgagaugcucgcgaaggcccugcgcaaggugccgaccgacaacuacaucacgaccuaccccgggcagggccugaacggguacaccgucgaggaggccaagaccgugcucaagaagugcaaguccgccuucuacauccugcccagcaucaucuccaacgagaagcaggagauccugggcaccgugagcuggaaccuccgggagaugcuggcgcacgccgaggagacgcgcaagcugaugcccgucugcguggagaccaaggccaucguguccaccauccagcggaaguacaagggcaucaagauccaggagggggucguggacuacggcgcccgcuucuacuucuacaccagcaagacgaccguggccucccugaucaacacccucaacgaccugaacgagacccuggucacgaugccgcucggguacgugacccacggccugaaccuggaggaggcggcccgguacaugcgcagccucaaggugcccgccaccgucuccgugagcucccccgacgccgugaccgccuacaacggguaccugacgagcuccagcaagacccccgaggagcacuucaucgagaccaucucccuggcgggcagcuacaaggacuggagcuacuccggccagagcacccagcucgggaucgaguuccugaagcggggcgacaaguccgucuacuacacgagcaacccgaccaccuuccaccuggacggggaggugaucaccuucgacaaccucaagacgcugcugucccuccgcgaggugcggaccaucaaggucuucaccaccguggacaacaucaaccugcacacgcagguggucgacaugagcaugaccuacggccagcaguucggccccaccuaccuggacggggccgacgugaccaagaucaagccccacaacucccacgagggcaagacguucuacgugcucccgaacgacgacacccugcgcgucgaggccuucgaguacuaccacaccaccgaccccagcuuccuggggcgguacauguccgcccucaaccacacgaagaaguggaaguacccccaggugaacggccugaccagcaucaagugggccgacaacaacugcuaccuggcgaccgugcuccugacccugcagcagaucgagcucaaguucaaccccccggcccugcaggacgccuacuaccgcgcccgggcgggggaggccgccaacuucugcgcccugauccucgccuacugcaacaagacggucggcgagcugggcgacgugcgcgagaccauguccuaccuguuccagcacgcgaaccucgacagcugcaagcggguccugaacguggugugcaagaccugcgggcagcagcagaccacccugaagggcgucgaggccgugauguacauggggacgcucuccuacgagcaguucaagaagggcgugcagauccccugcaccugcgggaagcaggccaccaaguaccugguccagcaggagagccccuucgugaugauguccgcccccccggcccaguacgagcugaagcacggcaccuucacgugcgcgagcgaguacaccggcaacuaccagugcgggcacuacaagcacaucaccuccaaggagacccucuacugcaucgacggcgcccugcugacgaagagcagcgaguacaaggggcccaucaccgacguguucuacaaggagaacuccuacaccaccacgaucaagcccgucaccuacaagcucgacggcguggugugcaccgagaucgaccccaagcuggacaacuacuacaagaaggacaacagcuacuucaccgagcagccgaucgaccugguccccaaccagcccuaccccaacgccuccuucgacaacuucaaguucgugugcgacaacaucaaguucgccgacgaccucaaccagcugacgggguacaagaagccggccagccgcgagcugaaggugaccuucuuccccgaccucaacggcgacgucguggcgaucgacuacaagcacuacacccccuccuucaagaagggcgccaagcugcugcacaagcccaucguguggcacgucaacaacgccaccaacaaggccacguacaagccgaacaccuggugcauccggugccucuggagcaccaagcccguggagaccuccaacagcuucgacgugcugaaguccgaggacgcgcaggggauggacaaccuggccugcgaggaccucaagcccgucagcgaggaggugguggagaaccccacgauccagaaggacguccuggagugcaacgugaagaccaccgagguggucggcgacaucauccugaagccggccaacaacucccucaagaucaccgaggagguggggcacacggaccugauggccgccuacguggacaacagcucccugaccaucaagaagcccaacgagcucagccgcguccugggccugaagacccucgcgacccacgggcuggccgccgugaacuccgugcccugggacacgaucgccaacuacgcccgcccguuccugaacaaggucgugagcaccaccaccaacaucgugacgcggugccucaaccgcgucugcaccaacuacaugcccuacuucuucacccugcugcuccagcugugcaccuucacccgguccacgaacagccgcaucaaggcguccaugcccaccaccaucgccaagaacaccgugaagagcgugggcaaguucugccuggaggccagcuucaacuaccucaagucccccaacuucagcaagcugaucaacaucaucaucugguuccugcuccuguccgucugccugggcagccucaucuacuccacggccgcccugggggugcugaugagcaaccucggcaugccguccuacugcaccggguaccgggagggcuaccugaacagcaccaacgugaccaucgcgacguacugcaccggcuccauccccugcagcgucugccuguccgggcucgacagccuggacaccuaccccucccuggagaccauccagaucacgaucagcuccuucaagugggaccucaccgccuucggccugguggccgagugguuccuggccuacauccucuucacccgcuucuucuacgugcuggggcuggccgcgaucaugcagcucuucuucagcuacuucgccguccacuucaucuccaacagcuggcugauguggcugaucaucaaccuggugcagauggcccccaucuccgccauggugcggauguacaucuucuucgcgagcuucuacuacgucuggaagagcuacgugcacguggucgacggcugcaacuccagcaccugcaugaugugcuacaagcgcaaccgggccacgcgcguggagugcaccaccaucgucaacggggugcggcgcuccuucuacguguacgccaacggcggcaagggguucugcaagcuccacaacuggaacugcgucaacugcgacaccuucugcgccggcagcacguucaucuccgacgagguggcccgggaccugagccugcaguucaagcgcccgaucaaccccaccgaccaguccagcuacaucguggacuccgucaccgugaagaacgggagcauccaccucuacuucgacaaggcgggccagaagaccuacgagcggcacucccugagccacuucgugaaccuggacaaccuccgcgccaacaacacgaaggggucccugcccaucaacgucaucguguucgacggcaagagcaagugcgaggaguccagcgccaaguccgccagcguguacuacucccagcugaugugccagcccauccuccugcuggaccaggcccucgucagcgacgugggcgacagcgcggagguggccgucaagauguucgacgccuacgugaacaccuucuccagcaccuucaacgugccgauggagaagcugaagacccuggucgccacggccgaggcggagcucgccaagaacgugucccuggacaacgugcugagcaccuucaucuccgccgcccggcagggguucgucgacagcgacguggagaccaaggacguggucgagugccucaagcugucccaccagagcgacaucgaggugaccggcgacuccugcaacaacuacaugcugacguacaacaagguggagaacaugaccccccgcgaccucggggcgugcaucgacugcagcgcccggcacaucaacgcccaggucgccaagucccacaacaucgcccugaucuggaacgugaaggacuucaugagccuguccgagcagcuccgcaagcagauccgcagcgcggccaagaagaacaaccugcccuucaagcugaccugcgccaccacgcggcagguggucaacguggugaccaccaagaucgcccucaagggcggguga

SEQ ID NO: 18095 - RNA, 5841 nt, Artificial Sequence
  SARS-CoV-2__MT632776.1__non-structural protein 3 (NSP3) CDS gc
auggcccccaccaaggugaccuucggcgacgacacggucaucgaggugcagggguacaagagcgugaacaucaccuucgagcuggacgagcgcaucgacaagguccucaacgagaagugcuccgccuacaccguggagcugggcaccgaggugaacgaguucgcgugcgucguggccgacgccgugaucaagacgcugcagccggucagcgagcuccugaccccccuggggaucgaccucgacgagugguccauggccaccuacuaccuguucgacgagagcggcgaguucaagcuggccucccacauguacugcagcuucuacccccccgacgaggacgaggaggagggggacugcgaggaggaggaguucgagccguccacccaguacgaguacggcacggaggacgacuaccagggcaagccccucgaguucggggcgaccagcgccgcccugcagcuggaggaggagcaggaggaggacuggcucgacgacgacucccagcagaccgugggccagcaggacgggagcgaggacaaccagaccacgaccauccagaccaucguggagguccagccccagcuggagauggagcugacccccguggugcagacgaucgaggucaacuccuucagcggcuaccucaagcugaccgacaacguguacaucaagaacgccgacguggucgaggaggcgaagaaggugaagccgaccguggucgugaacgccgccaacguguaccugaagcacgggggcggcgucgccggggcccucaacaaggcgaccaacaacgccaugcagguggaguccgacgacuacaucgccacgaacggcccccugaaggucgggggcagcugcgugcuguccggccacaaccucgccaagcacugccugcacguggucgggcccaacgugaacaagggcgaggacauccagcugcucaagagcgccuacgagaacuucaaccagcacgaggugcugcuggcgccccuccuguccgccgggaucuucggcgccgacccgauccacagccugcgggucugcguggacaccgugcgcaccaacgucuaccucgccguguucgacaagaaccuguacgacaagcugguguccagcuuccucgagaugaagagcgagaagcaggucgagcagaagaucgccgagauccccaaggaggaggugaagcccuucaucaccgaguccaagcccagcguggagcagcggaagcaggacgacaagaagaucaaggcgugcgucgaggaggugacgaccacccuggaggagaccaaguuccugacggagaaccuccugcuguacaucgacaucaacgggaaccuccacccggacuccgccacccuggugagcgacaucgacaucaccuuccugaagaaggacgcccccuacaucgucggcgacguggugcaggagggcguccucaccgccguggugauccccacgaagaaggccgggggcaccaccgagaugcuggcgaaggcccugcgcaagguccccaccgacaacuacaucacgaccuacccggggcagggccucaacggguacaccguggaggaggccaagaccgugcugaagaagugcaaguccgccuucuacauccugcccagcaucaucuccaacgagaagcaggagauccucggcaccgucagcuggaaccugcgggagaugcuggcgcacgccgaggagacgcgcaagcugaugcccgugugcguggagaccaaggccaucgucuccaccauccagcggaaguacaagggcaucaagauccaggagggggugguggacuacggcgcccgcuucuacuucuacaccagcaagacgaccgucgccucccucaucaacacccugaacgaccugaacgagacccucgugacgaugccccugggguacgugacccacggccugaaccucgaggaggcggcccgguacaugcgcagccugaaggucccggccaccguguccgugagcucccccgacgccgucaccgccuacaacggguaccugacgagcuccagcaagacccccgaggagcacuucaucgagaccaucucccucgcgggcagcuacaaggacuggagcuacuccggccagagcacccagcuggggaucgaguuccugaagcggggcgacaaguccguguacuacacgagcaaccccaccaccuuccaccucgacggggaggugaucaccuucgacaaccugaagacgcugcucucccugcgcgagguccggaccaucaagguguucaccaccguggacaacaucaaccugcacacgcaggucguggacaugagcaugaccuacggccagcaguucggcccgaccuaccucgacggggccgacgugaccaagaucaagccccacaacucccacgagggcaagacguucuacguccugcccaacgacgacacccugcgcguggaggccuucgaguacuaccacaccaccgacccgagcuuccucgggcgguacauguccgcccugaaccacacgaagaaguggaaguacccccaggugaacggccugaccagcaucaagugggccgacaacaacugcuaccucgcgaccgcccugcugacccuccagcagaucgagcugaaguucaacccccccgcccugcaggacgccuacuaccgcgcgcgggccggggaggccgccaacuucugcgcccucauccuggcguacugcaacaagacggucggcgagcugggcgacgugcgcgagaccauguccuaccucuuccagcacgccaaccuggacagcugcaagcggguccugaacguggugugcaagaccugcgggcagcagcagaccacccucaagggcgucgaggccgugauguacauggggacgcuguccuacgagcaguucaagaagggcgugcagaucccgugcaccugcgggaagcaggccaccaaguaccugguccagcaggagagccccuucgugaugauguccgccccccccgcgcaguacgagcucaagcacggcaccuucacgugcgccagcgaguacaccggcaacuaccagugcgggcacuacaagcacaucaccuccaaggagacccuguacugcaucgacggcgcccugcucacgaagagcagcgaguacaaggggccgaucaccgacguguucuacaaggagaacuccuacaccaccacgaucaagcccgucaccuacaagcuggacggcguggugugcaccgagaucgaccccaagcuggacaacuacuacaagaaggacaacagcuacuucaccgagcagcccaucgaccucgucccgaaccagcccuaccccaacgccuccuucgacaacuucaaguucgugugcgacaacaucaaguucgccgacgaccugaaccagcugacgggguacaagaagcccgcgagccgcgagcucaaggugaccuucuucccggaccugaacggcgacgucguggccaucgacuacaagcacuacacccccuccuucaagaagggcgccaagcugcuccacaagcccaucguguggcacgucaacaacgccaccaacaaggcgacguacaagcccaacaccuggugcauccggugccuguggagcaccaagccgguggagaccuccaacagcuucgacgugcugaaguccgaggacgcccaggggauggacaaccucgccugcgaggaccugaagcccgucagcgaggaggugguggagaaccccacgauccagaaggacguccuggagugcaacgugaagaccaccgagguggucggcgacaucauccucaagcccgccaacaacucccugaagaucaccgaggagguggggcacacggaccugauggccgcguacguggacaacagcucccucaccaucaagaagccgaacgagcugagccgcguccugggccucaagacccuggccacccacgggcuggccgccgugaacuccgugcccugggacacgaucgccaacuacgcgaagcccuuccucaacaaggucgugagcaccaccaccaacaucgugacgcgcugccugaaccgggucugcaccaacuacaugccguacuucuucacccugcuccugcagcugugcaccuucacccgcuccacgaacagccggaucaaggccuccaugcccaccaccaucgccaagaacaccgugaagagcgugggcaaguucugccucgaggccagcuucaacuaccugaagucccccaacuucagcaagcugaucaacaucaucaucugguuccuccugcuguccgucugccucggcagccugaucuacuccacggccgcgcugggggugcucaugagcaaccugggcaugcccuccuacugcaccggguaccgcgagggcuaccugaacagcaccaacgugaccaucgccacguacugcaccggcuccaucccgugcagcgucugccucuccgggcuggacagccuggacaccuaccccucccucgagaccauccagaucacgaucagcuccuucaagugggaccugaccgccuucggccugguggccgagugguuccucgccuacauccuguucacccgguucuucuacgugcuggggcucgcggccaucaugcagcuguucuucagcuacuucgccguccacuucaucuccaacagcuggcugauguggcugaucaucaaccucgugcagauggcccccaucuccgcgauggugcgcauguacaucuucuucgccagcuucuacuacgucuggaagagcuacgugcacguggucgacggcugcaacuccagcaccugcaugaugugcuacaagcggaaccgcgccacgcggguggagugcaccaccaucgucaacggggugcgccgguccuucuacguguacgccaacggcggcaagggguucugcaagcugcacaacuggaacugcgucaacugcgacaccuucugcgccggcagcacguucaucuccgacgagguggcgcgcgaccugagccuccaguucaagcggcccaucaacccgaccgaccaguccagcuacaucguggacuccgucaccgugaagaacgggagcauccaccuguacuucgacaaggccggccagaagaccuacgagcgccacucccugagccacuucgugaaccucgacaaccugcgggccaacaacacgaaggggucccugcccaucaacgucaucguguucgacggcaagagcaagugcgaggaguccagcgccaaguccgccagcguguacuacucccagcucaugugccagcccauccugcugcucgaccaggcgcuggucagcgacgugggcgacagcgccgagguggccgucaagauguucgacgccuacgugaacaccuucuccagcaccuucaacgugcccauggagaagcugaagacccucgucgccacggcggaggccgagcuggccaagaacgugucccuggacaacgugcucagcaccuucaucuccgccgcgcgccagggguucgucgacagcgacguggagaccaaggacguggucgagugccugaagcugucccaccagagcgacaucgaggugaccggcgacuccugcaacaacuacaugcucacguacaacaagguggagaacaugaccccgcgggaccugggggccugcaucgacugcagcgcccgccacaucaacgcccaggucgccaagucccacaacaucgcgcugaucuggaacgugaaggacuucaugagccucuccgagcagcugcggaagcagauccgcagcgccgccaagaagaacaaccugcccuucaagcucaccugcgccaccacgcgccagguggucaacguggugaccaccaagaucgcccugaagggcggguga

SEQ ID NO: 18096 - RNA, 5841 nt, Artificial Sequence
  SARS-CoV-2__MT632780.1__non-structural protein 3 (NSP3) CDS gc
auggcccccaccaaggugaccuucggcgacgacacggucaucgaggugcagggguacaagagcgugaacaucaccuucgagcuggacgagcgcaucgacaagguccucaacgagaagugcuccgccuacaccguggagcugggcaccgaggugaacgaguucgcgugcgucguggccgacgccgugaucaagacgcugcagccggucagcgagcuccugaccccccuggggaucgaccucgacgagugguccauggccaccuacuaccuguucgacgagagcggcgaguucaagcuggccucccacauguacugcagcuucuacccccccgacgaggacgaggaggagggggacugcgaggaggaggaguucgagccguccacccaguacgaguacggcacggaggacgacuaccagggcaagccccucgaguucggggcgaccagcgccgcccugcagcccgaggaggagcaggaggaggacuggcuggacgacgacucccagcagaccgugggccagcaggacgggagcgaggacaaccagaccacgaccauccagaccaucguggagguccagccccagcucgagauggagcugaccccgguggugcagacgaucgaggucaacuccuucagcggcuaccugaagcucaccgacaacguguacaucaagaacgccgacaucguggaggaggcgaagaaggucaagcccaccgugguggucaacgccgccaacguguaccugaagcacgggggcggcguggccggggcccugaacaaggcgaccaacaacgccaugcaggucgaguccgacgacuacaucgccacgaacggcccccucaagguggggggcagcugcguccuguccggccacaaccuggccaagcacugccuccacgugguggggcccaacgucaacaagggcgaggacauccagcugcugaagagcgccuacgagaacuucaaccagcacgaggugcuccuggcgccgcugcucuccgccgggaucuucggcgccgaccccauccacagccugcgggugugcgucgacaccgugcgcaccaacguguaccuggccgucuucgacaagaaccucuacgacaagcugguguccagcuuccuggagaugaagagcgagaagcagguggagcagaagaucgccgagauccccaaggaggaggucaagcccuucaucaccgaguccaagccgagcguggagcagcggaagcaggacgacaagaagaucaaggcgugcguggaggaggucacgaccacccucgaggagaccaaguuccugacggagaaccugcuccuguacaucgacaucaacgggaaccugcaccccgacuccgccacccucgugagcgacaucgacaucaccuuccugaagaaggacgcccccuacaucgugggcgacgucgugcaggagggcgugcugaccgccgucgugauccccacgaagaaggccgggggcaccaccgagaugcucgcgaaggcccugcgcaaggugccgaccgacaacuacaucacgaccuaccccgggcagggccugaacggguacaccgucgaggaggccaagaccgugcucaagaagugcaaguccgccuucuacauccugcccagcaucaucuccaacgagaagcaggagauccugggcaccgugagcuggaaccuccgggagaugcuggcgcacgccgaggagacgcgcaagcugaugcccgucugcguggagaccaaggccaucguguccaccauccagcggaaguacaagggcaucaagauccaggagggggucguggacuacggcgcccgcuucuacuucuacaccagcaagacgaccguggccucccugaucaacacccucaacgaccugaacgagacccuggucacgaugccgcucggguacgugacccacggccugaaccuggaggaggcggcccgguacaugcgcagccucaaggugcccgccaccgucuccgugagcucccccgacgccgugaccgccuacaacggguaccugacgagcuccagcaagacccccgaggagcacuucaucgagaccaucucccuggcgggcagcuacaaggacuggagcuacuccggccagagcacccagcucgggaucgaguuccugaagcggggcgacaaguccgucuacuacacgagcaacccgaccaccuuccaccuggacggggaggugaucaccuucgacaaccucaagacgcugcugucccuccgcgaggugcggaccaucaaggucuucaccaccguggacaacaucaaccugcacacgcagguggucgacaugagcaugaccuacggccagcaguucggccccaccuaccuggacggggccgacgugaccaagaucaagccccacaacucccacgagggcaagacguucuacgugcucccgaacgacgacacccugcgcgucgaggccuucgaguacuaccacaccaccgaccccagcuuccuggggcgguacauguccgcccucaaccacacgaagaaguggaaguacccccaggugaacggccugaccagcaucaagugggccgacaacaacugcuaccuggcgaccgcccuccugacccugcagcagaucgagcucaaguucaaccccccggcccugcaggacgccuacuaccgcgcgcgggccggggaggccgccaacuucugcgcccugauccucgcguacugcaacaagacggugggcgagcugggcgacguccgcgagaccauguccuaccuguuccagcacgccaaccucgacagcugcaagcgggugcugaacgucgugugcaagaccugcgggcagcagcagaccacccugaagggcguggaggccgucauguacauggggacgcucuccuacgagcaguucaagaagggcgugcagauccccugcaccugcgggaagcaggccaccaaguaccuggugcagcaggagagccccuucgucaugauguccgcccccccggcgcaguacgagcugaagcacggcaccuucacgugcgccagcgaguacaccggcaacuaccagugcgggcacuacaagcacaucaccuccaaggagacccucuacugcaucgacggcgcccugcugacgaagagcagcgaguacaaggggcccaucaccgacguguucuacaaggagaacuccuacaccaccacgaucaagcccgugaccuacaagcucgacggcgucgugugcaccgagaucgaccccaagcuggacaacuacuacaagaaggacaacagcuacuucaccgagcagccgaucgaccuggugcccaaccagcccuaccccaacgccuccuucgacaacuucaaguucgucugcgacaacaucaaguucgccgacgaccucaaccagcugacgggguacaagaagccggcgagccgcgagcugaaggugaccuucuuccccgaccucaacggcgacguggucgccaucgacuacaagcacuacacccccuccuucaagaagggcgccaagcugcugcacaagcccaucguguggcacgugaacaacgccaccaacaaggcgacguacaagccgaacaccuggugcauccggugccucuggagcaccaagcccgucgagaccuccaacagcuucgacgugcugaaguccgaggacgcccaggggauggacaaccuggccugcgaggaccucaagcccgugagcgaggaggucguggagaaccccacgauccagaaggacgugcuggagugcaacgucaagaccaccgagguggugggcgacaucauccugaagccggccaacaacucccucaagaucaccgaggaggucgggcacacggaccugauggccgcguacguggacaacagcucccugaccaucaagaagcccaacgagcucagccgcgugcugggccugaagacccucgccacccacgggcuggccgccgucaacuccgugcccugggacacgaucgccaacuacgcgaagccguuccugaacaagguggucagcaccaccaccaacaucgugacgcgcugccucaaccgggugugcaccaacuacaugcccuacuucuucacccugcugcuccagcugugcaccuucacccgcuccacgaacagccggaucaaggccuccaugcccaccaccaucgccaagaacaccgucaagagcgugggcaaguucugccuggaggccagcuucaacuaccucaagucccccaacuucagcaagcugaucaacaucaucaucugguuccugcuccuguccgugugccugggcagccucaucuacuccacggccgcgcuggggguccugaugagcaaccucggcaugccguccuacugcaccggguaccgcgagggcuaccugaacagcaccaacgugaccaucgccacguacugcaccggcuccauccccugcagcgugugccuguccgggcucgacagccuggacaccuaccccucccuggagaccauccagaucacgaucagcuccuucaagugggaccucaccgccuucggccuggucgccgagugguuccuggccuacauccucuucacccgguucuucuacgugcuggggcuggcggccaucaugcagcucuucuucagcuacuucgccgugcacuucaucuccaacagcuggcugauguggcugaucaucaaccugguccagauggcccccaucuccgcgauggugcgcauguacaucuucuucgccagcuucuacuacguguggaagagcuacguccacgugguggacggcugcaacuccagcaccugcaugaugugcuacaagcggaaccgcgccacgcgggucgagugcaccaccaucgugaacgggguccgcaaguccuucuacguguacgccaacggcggcaagggguucugcaagcuccacaacuggaacugcgugaacugcgacaccuucugcgccggcagcacguucaucuccgacgaggucgcgcgggaccugagccugcaguucaagcgcccgaucaaccccaccgaccaguccagcuacaucguggacuccgugaccgucaagaacgggagcauccaccucuacuucgacaaggccggccagaagaccuacgagcggcacucccugagccacuucgugaaccuggacaaccuccgcgccaacaacacgaaggggucccugcccaucaacgugaucgucuucgacggcaagagcaagugcgaggaguccagcgccaaguccgccagcguguacuacucccagcugaugugccagcccauccuccugcuggaccaggcgcucgugagcgacgucggcgacagcgccgagguggccgugaagauguucgacgccuacgucaacaccuucuccagcaccuucaacgugccgauggagaagcugaagacccugguggccacggcggaggccgagcucgccaagaacgucucccuggacaacgugcugagcaccuucaucuccgccgcgcggcagggguucguggacagcgacgucgagaccaaggacgugguggagugccucaagcugucccaccagagcgacaucgaggucaccggcgacuccugcaacaacuacaugcugacguacaacaagguggagaacaugaccccccgcgaccucggggccugcaucgacugcagcgcccggcacaucaacgcccagguggccaagucccacaacaucgcgcugaucuggaacgucaaggacuucaugagccuguccgagcagcuccgcaagcagauccggagcgccgccaagaagaacaaccugcccuucaagcugaccugcgccaccacgcgccagguggugaacgucgugaccaccaagaucgcccucaagggcggguga

SEQ ID NO: 18097 - RNA, 5841 nt, Artificial Sequence
  SARS-CoV-2__MT632793.1__non-structural protein 3 (NSP3) CDS gc
auggcccccaccaaggugaccuucggcgacgacacggucaucgaggugcagggguacaagagcgugaacaucaccuucgagcuggacgagcgcaucgacaagguccucaacgagaagugcuccgccuacaccguggagcugggcaccgaggugaacgaguucgcgugcgucguggccgacgccgugaucaagacgcugcagccggucagcgagcuccugaccccccuggggaucgaccucgacgagugguccauggccaccuacuaccuguucgacgagagcggcgaguucaagcuggccucccacauguacugcagcuucuacccccccgacgaggacgaggaggagggggacugcgaggaggaggaguucgagccguccacccaguacgaguacggcacggaggacgacuaccagggcaagccccucgaguucggggcgaccagcgccgcccugcagcccgaggaggagcaggaggaggacuggcuggacgacgacucccagcagaccgugggccagcaggacgggagcgaggacaaccagaccacgaccauccagaccaucguggagguccagccccagcucgagauggagcugaccccgguggugcagacgaucgaggucaacuccuucagcggcuaccugaagcucaccgacaacguguacaucaagaacgccgacaucguggaggaggcgaagaaggucaagcccaccgugguggucaacgccgccaacguguaccugaagcacgggggcggcguggccggggcccugaacaaggcgaccaacaacgccaugcaggucgaguccgacgacuacaucgccacgaacggcccccucaagguggggggcagcugcguccuguccggccacaaccuggccaagcacugccuccacgugguggggcccaacgucaacaagggcgaggacauccagcugcugaagagcgccuacgagaacuucaaccagcacgaggugcuccuggcgccgcugcucuccgccgggaucuucggcgccgaccccauccacagccugcgggugugcgucgacaccgugcgcaccaacguguaccuggccgucuucgacaagaaccucuacgacaagcugguguccagcuuccuggagaugaagagcgagaagcagguggagcagaagaucgccgagauccccaaggaggaggucaagcccuucaucaccgaguccaagccgagcguggagcagcggaagcaggacgacaagaagaucaaggcgugcguggaggaggucacgaccacccucgaggagaccaaguuccugacggagaaccugcuccuguacaucgacaucaacgggaaccugcaccccgacuccgccacccucgugagcgacaucgacaucaccuuccugaagaaggacgcccccuacaucgugggcgacgucgugcaggagggcgugcugaccgccgucgugauccccacgaagaaggccgggggcaccaccgagaugcucgcgaaggcccugcgcaaggugccgaccgacaacuacaucacgaccuaccccgggcagggccugaacggguacaccgucgaggaggccaagaccgugcucaagaagugcaaguccgccuucuacauccugcccagcaucaucuccaacgagaagcaggagauccugggcaccgugagcuggaaccuccgggagaugcuggcgcacgccgaggagacgcgcaagcugaugcccgucugcguggagaccaaggccaucguguccaccauccagcggaaguacaagggcaucaagauccaggagggggucguggacuacggcgcccgcuucuacuucuacaccagcaagacgaccguggccucccugaucaacacccucaacgaccugaacgagacccuggucacgaugccgcucggguacgugacccacggccugaaccuggaggaggcggcccgguacaugcgcagccucaaggugcccgccaccgucuccgugagcucccccgacgccgugaccgccuacaacggguaccugacgagcuccagcaagacccccgaggagcacuucaucgagaccaucucccuggcgggcagcuacaaggacuggagcuacuccggccagagcacccagcucgggaucgaguuccugaagcggggcgacaaguccgucuacuacacgagcaacccgaccaccuuccaccuggacggggaggugaucaccuucgacaaccucaagacgcugcugucccuccgcgaggugcggaccaucaaggucuucaccaccguggacaacaucaaccugcacacgcagguggucgacaugagcaugaccuacggccagcaguucggccccaccuaccuggacggggccgacgugaccaagaucaagccccacaacucccacgagggcaagacguucuacgugcucccgaacgacgacacccugcgcgucgaggccuucgaguacuaccacaccaccgaccccagcuuccuggggcgguacauguccgcccucaaccacacgaagaaguggaaguacccccaggugaacggccugaccagcaucaagugggccgacaacaacugcuaccuggcgaccgcccuccugacccugcagcagaucgagcucaaguucaaccccccggcccugcaggacgccuacuaccgcgcgcgggccggggaggccgccaacuucugcgcccugauccucgcguacugcaacaagacggugggcgagcugggcgacguccgcgagaccauguccuaccuguuccagcacgccaaccucgacagcugcaagcgggugcugaacgucgugugcaagaccugcgggcagcagcagaccacccugaagggcguggaggccgucauguacauggggacgcucuccuacgagcaguucaagaagggcgugcagauccccugcaccugcgggaagcaggccaccaaguaccuggugcagcaggagagccccuucgucaugauguccgcccccccggcgcaguacgagcugaagcacggcaccuucacgugcgccagcgaguacaccggcaacuaccagugcgggcacuacaagcacaucaucuccaaggagacccucuacugcaucgacggcgcccugcugaccaagagcagcgaguacaaggggcccaucacggacguguucuacaaggagaacuccuacaccaccaccaucaagcccgugacguacaagcucgacggcgucgugugcaccgagaucgaccccaagcuggacaacuacuacaagaaggacaacagcuacuucaccgagcagccgaucgaccuggugcccaaccagcccuaccccaacgccuccuucgacaacuucaaguucgucugcgacaacaucaaguucgccgacgaccucaaccagcugaccggguacaagaagccggcgagccgcgagcugaaggugacguucuuccccgaccucaacggcgacguggucgccaucgacuacaagcacuacacccccuccuucaagaagggcgccaagcugcugcacaagcccaucguguggcacgugaacaacgccaccaacaaggcgaccuacaagccgaacacguggugcauccggugccucuggagcaccaagcccgucgagaccuccaacagcuucgacgugcugaaguccgaggacgcccaggggauggacaaccuggccugcgaggaccucaagcccgugagcgaggaggucguggagaaccccaccauccagaaggacgugcuggagugcaacgucaagacgaccgagguggugggcgacaucauccugaagccggccaacaacucccucaagaucaccgaggaggucgggcacaccgaccugauggccgcguacguggacaacagcucccugacgaucaagaagcccaacgagcucagccgcgugcugggccugaagacccucgccacccacgggcuggccgccgucaacuccgugcccugggacaccaucgccaacuacgcgaagccguuccugaacaagguggucagcacgaccaccaacaucgugacccgcugccucaaccgggugugcacgaacuacaugcccuacuucuucacccugcugcuccagcugugcaccuucacccgcuccaccaacagccggaucaaggccuccaugcccacgaccaucgccaagaacaccgucaagagcgugggcaaguucugccuggaggccagcuucaacuaccucaagucccccaacuucagcaagcugaucaacaucaucaucugguuccugcuccuguccgugugccugggcagccucaucuacuccaccgccgcgcuggggguccugaugagcaaccucggcaugccguccuacugcacgggguaccgcgagggcuaccugaacagcaccaacgugaccaucgccaccuacugcacgggcuccauccccugcagcgugugccuguccgggcucgacagccuggacaccuaccccucccuggagaccauccagaucaccaucagcuccuucaagugggaccucacggccuucggccuggucgccgagugguuccuggccuacauccucuucacccgguucuucuacgugcuggggcuggcggccaucaugcagcucuucuucagcuacuucgccgugcacuucaucuccaacagcuggcugauguggcugaucaucaaccugguccagauggcccccaucuccgcgauggugcgcauguacaucuucuucgccagcuucuacuacguguggaagagcuacguccacgugguggacggcugcaacuccagcaccugcaugaugugcuacaagcggaaccgcgccacccgggucgagugcacgaccaucgugaacgggguccgccgguccuucuacguguacgccaacggcggcaagggguucugcaagcuccacaacuggaacugcgugaacugcgacaccuucugcgccggcagcaccuucaucuccgacgaggucgcgcgcgaccugagccugcaguucaagcggccgaucaaccccacggaccaguccagcuacaucguggacuccgugaccgucaagaacgggagcauccaccucuacuucgacaaggccggccagaagaccuacgagcgccacucccugagccacuucgugaaccuggacaaccuccgggccaacaacaccaaggggucccugcccaucaacgugaucgucuucgacggcaagagcaagugcgaggaguccagcgccaaguccgccagcguguacuacucccagcugaugugccagcccauccuccugcuggaccaggcgcucgugagcgacgucggcgacagcgccgagguggccgugaagauguucgacgccuacgucaacacguucuccagcaccuucgacgugccgauggagaagcugaagacccugguggccaccgcggaggccgagcucgccaagaacgucucccuggacaacgugcugagcacguucaucuccgccgcgcgccagggguucguggacagcgacgucgagaccaaggacgugguggagugccucaagcugucccaccagagcgacaucgaggucaccggcgacuccugcaacaacuacaugcugaccuacaacaagguggagaacaugacgccccgggaccucggggccugcaucgacugcagcgcccgccacaucaacgcccagguggccaagucccacaacaucgcgcugaucuggaacgucaaggacuucaugagccuguccgagcagcuccggaagcagauccgcagcgccgccaagaagaacaaccugcccuucaagcugaccugcgccaccacccgccagguggugaacgucgugacgaccaagaucgcccucaagggcggguga

SEQ ID NO: 18098 - RNA, 5841 nt, Artificial Sequence
  SARS-CoV-2__MT632820.1__non-structural protein 3 (NSP3) CDS gc
auggcccccaccaaggugaccuucggcgacgacacggucaucgaggugcagggguacaagagcgugaacaucaccuucgagcuggacgagcgcaucgacaagguccucaacgagaagugcuccgccuacaccguggagcugggcaccgaggugaacgaguucgcgugcgucguggccgacgccgugaucaagacgcugcagccggucagcgagcuccugaccccccuggggaucgaccucgacgagugguccauggccaccuacuaccuguucgacgagagcggcgaguucaagcuggccucccacauguacugcagcuucuacccccccgacgaggacgaggaggagggggacugcgaggaggaggaguucgagccguccacccaguacgaguacggcacggaggacgacuaccagggcaagccccucgaguucggggcgaccagcgccgcccugcagcccgaggaggagcaggaggaggacuggcuggacgacgacucccagcagaccgugggccagcaggacgggagcgaggacaaccagaccacgaccauccagaccaucguggagguccagccccagcucgagauggagcugaccccgguggugcagacgaucgaggucaacuccuucagcggcuaccugaagcucaccgacaacguguacaucaagaacgccgacaucguggaggaggcgaagaaggucaagcccaccgugguggucaacgccgccaacguguaccugaagcacgggggcggcguggccggggcccugaacaaggcgaccaacaacgccaugcaggucgaguccgacgacuacaucgccacgaacggcccccucaagguggggggcagcugcguccuguccggccacaaccuggccaagcacugccuccacgugguggggcccaacgucaacaagggcgaggacauccagcugcugaagagcgccuacgagaacuucaaccagcacgaggugcuccuggcgccgcugcucuccgccgggaucuucggcgccgaccccauccacagccugcgggugugcgucgacaccgugcgcaccaacguguaccuggccgucuucgacaagaaccucuacgacaagcugguguccagcuuccuggagaugaagagcgagaagcagguggagcagaagaucgccgagauccccaaggaggaggucaagcccuucaucaccgaguccaagccgagcguggagcagcggaagcaggacgacaagaagaucaaggcgugcguggaggaggucacgaccacccucgaggagaccaaguuccugacggagaaccugcuccuguacaucgacaucaacgggaaccugcaccccgacuccgccacccucgugagcgacaucgacaucaccuuccugaagaaggacgcccccuacaucgugggcgacgucgugcaggagggcgugcugaccgccgucgugauccccacgaagaaggccgggggcaccaccgagaugcucgcgaaggcccugcgcaaggugccgaccgacaacuacaucacgaccuaccccgggcagggccugaacggguacaccgucgaggaggccaagaccgugcucaagaagugcaaguccgccuucuacauccugcccagcaucaucuccaacgagaagcaggagauccugggcaccgugagcuggaaccuccgggagaugcuggcgcacgccgaggagacgcgcaagcugaugcccgucugcguggagaccaaggccaucguguccaccauccagcggaaguacaagggcaucaagauccaggagggggucguggacuacggcgcccgcuucuacuucuacaccagcaagacgaccguggccucccugaucaacacccucaacgaccugaacgagacccuggucacgaugccgcucggguacgugacccacggccugaaccuggaggaggcggcccgguacaugcgcagccucaaggugcccgccaccgucuccgugagcucccccgacgccgugaccgccuacaacggguaccugacgagcuccagcaagacccccgaggagcacuucaucgagaccaucucccuggcgggcagcuacaaggacuggagcuacuccggccagagcacccagcucgggaucgaguuccugaagcggggcgacaaguccgucuacuacacgagcaacccgaccaccuuccaccuggacggggaggugaucaccuucgacaaccucaagacgcugcugucccuccgcgaggugcggaccaucaaggucuucaccaccguggacaacaucaaccugcacacgcagguggucgacaugagcaugaccuacggccagcaguucggccccaccuaccuggacggggccgacgugaccaagaucaagccccacaacucccacgagggcaagacguucuacgugcucccgaacgacgacacccugcgcgucgaggccuucgaguacuaccacaccaccgaccccagcuuccuggggcgguacauguccgcccucaaccacacgaagaaguggaaguacccccaggugaacggccugaccagcaucaagugggccgacaacaacugcuaccuggcgaccgcccuccugacccugcagcagaucgagcucaaguucaaccccccggcccugcaggacgccuacuaccgcgcgcgggccggggaggccgccaacuucugcgcccugauccucgcguacugcaacaagacggugggcgagcugggcgacguccgcgagaccauguccuaccuguuccagcacgccaaccucgacagcugcaagcgggugcugaacgucgugugcaagaccugcgggcagcagcagaccacccugaagggcguggaggccgucauguacauggggacgcucuccuacgagcaguucaagaagggcgugcagauccccugcaccugcgggaagcaggccaccaaguaccuggugcagcaggagagccccuucgucaugauguccgcccccccggcgcaguacgagcugaagcacggcaccuucacgugcgccagcgaguacaccggcaacuaccagugcgggcacuacaagcacaucaccuccaaggagacccucuacugcaucgacggcgcccugcugacgaagagcagcgaguacaaggggcccaucaccgacguguucuacaaggagaacuccuacaccaccacgaucaagcccgugaccuacaagcucgacggcgucgugugcaccgagaucgaccccaagcuggacaacuacuacaagaaggacaacagcuacuucaccgagcagccgaucgaccuggugcccaaccagcccuaccccaacgccuccuucgacaacuucaaguucgucugcgacaacaucaaguucgccgacgaccucaaccagcugacgggguacaagaagccggcgagccgcgagcugaaggugaccuucuuccccgaccucaacggcgacguggucgccaucgacuacaagcacuacacccccuccuucaagaagggcgccaagcugcugcacaagcccaucguguggcacgugaacaacgccaccaacaaggcgacguacaagccgaacaccuggugcauccggugccucuggagcaccaagcccgucgagaccuccaacagcuucgacgugcugaaguccgaggacgcccaggggauggacaaccuggccugcgaggaccucaagcccgugagcgaggaggucguggagaaccccacgauccagaaggacgugcuggagugcaacgucaagaccaccgagguggugggcgacaucauccugaagccggccaacaacucccucaagaucaccgagaaggucgggcacacggaccugauggccgcguacguggacaacagcucccugaccaucaagaagcccaacgagcucagccgcgugcugggccugaagacccucgccacccacgggcuggccgccgucaacuccgugcccugggacacgaucgccaacuacgcgaagccguuccugaacaagguggucagcaccaccaccaacaucgugacgcgcugccucaaccgggugugcaccaacuacaugcccuacuucuucacccugcugcuccagcugugcaccuucacccgcuccacgaacagccggaucaaggccuccaugcccaccaccaucgccaagaacaccgucaagagcgugggcaaguucugccuggaggccagcuucaacuaccucaagucccccaacuucagcaagcugaucaacaucaucaucugguuccugcuccuguccgugugccugggcagccucaucuacuccacggccgcgcuggggguccugaugagcaaccucggcaugccguccuacugcaccggguaccgcgagggcuaccugaacagcaccaacgugaccaucgccacguacugcaccggcuccauccccugcagcgugugccuguccgggcucgacagccuggacaccuaccccucccuggagaccauccagaucacgaucagcuccuucaagugggaccucaccgccuucggccuggucgccgagugguuccuggccuacauccucuucacccgguucuucuacgugcuggggcuggcggccaucaugcagcucuucuucagcuacuucgccgugcacuucaucuccaacagcuggcugauguggcugaucaucaaccugguccagauggcccccaucuccgcgauggugcgcauguacaucuucuucgccagcuucuacuacguguggaagagcuacguccacgugguggacggcugcaacuccagcaccugcaugaugugcuacaagcggaaccgcgccacgcgggucgagugcaccaccaucgugaacgggguccgccgguccuucuacguguacgccaacggcggcaagggguucugcaagcuccacaacuggaacugcgugaacugcgacaccuucugcgccggcagcacguucaucuccgacgaggucgcgcgcgaccugagccugcaguucaagcggccgaucaaccccaccgaccaguccagcuacaucguggacuccgugaccgucaagaacgggagcauccaccucuacuucgacaaggccggccagaagaccuacgagcgccacucccugagccacuucgugaaccuggacaaccuccgggccaacaacacgaaggggucccugcccaucaacgugaucgucuucgacggcaagagcaagugcgaggaguccagcgccaaguccgccagcguguacuacucccagcugaugugccagcccauccuccugcuggaccaggcgcucgugagcgacgucggcgacagcgccgagguggccgugaagauguucgacgccuacgucaacaccuucuccagcaccuucaacgugccgauggagaagcugaagacccugguggccacggcggaggccgagcucgccaagaacgucucccuggacaacgugcugagcaccuucaucuccgccgcgcgccagggguucguggacagcgacgucgagaccaaggacgugguggagugccucaagcugucccaccagagcgacaucgaggucaccggcgacuccugcaacaacuacaugcugacguacaacaagguggagaacaugaccccccgggaccucggggccugcaucgacugcagcgcccgccacaucaacgcccagguggccaagucccacaacaucgcgcugaucuggaacgucaaggacuucaugagccuguccgagcagcuccggaagcagauccgcagcgccgccaagaagaacaaccugcccuucaagcugaccugcgccaccacgcgccagguggugaacgucgugaccaccaagaucgcccucaagggcggguga

SEQ ID NO: 18099 - RNA, 5841 nt, Artificial Sequence
  SARS-CoV-2__MT632822.1__non-structural protein 3 (NSP3) CDS gc
auggcccccaccaaggugaccuucggcgacgacacggucaucgaggugcagggguacaagagcgugaacaucaccuucgagcuggacgagcgcaucgacaagguccucaacgagaagugcuccgccuacaccguggagcugggcaccgaggugaacgaguucgcgugcgucguggccgacgccgugaucaagacgcugcagccggucagcgagcuccugaccccccuggggaucgaccucgacgagugguccauggccaccuacuaccuguucgacgagagcggcgaguucaagcuggccucccacauguacugcagcuucuacccccccgacgaggacgaggaggagggggacugcgaggaggaggaguucgagccguccacccaguacgaguacggcacggaggacgacuaccagggcaagccccucgaguucggggcgaccagcgccgcccugcagcccgaggaggagcaggaggaggacuggcuggacgacgacucccagcagaccgugggccagcaggacgggagcgaggacaaccagaccacgaccauccagaccaucguggagguccagccccagcucgagauggagcugaccccgguggugcagacgaucgaggucaacuccuucagcggcuaccugaagcucaccgacaacguguacaucaagaacgccgacaucguggaggaggcgaagaaggucaagcccaccgugguggucaacgccgccaacguguaccugaagcacgggggcggcguggccggggcccugaacaaggcgaccaacaacgccaugcaggucgaguccgacgacuacaucgccacgaacggcccccucaagguggggggcagcugcguccuguccggccacaaccuggccaagcacugccuccacgugguggggcccaacgucaacaagggcgaggacauccagcugcugaagagcgccuacgagaacuucaaccagcacgaggugcuccuggcgccgcugcucuccgccgggaucuucggcgccgaccccauccacagccugcgggugugcgucgacaccgugcgcaccaacguguaccuggccgucuucgacaagaaccucuacgacaagcugguguccagcuuccuggagaugaagagcgagaagcagguggagcagaagaucgccgagauccccaaggaggaggucaagcccuucaucaccgaguccaagccgagcguggagcagcggaagcaggacgacaagaagaucaaggcgugcguggaggaggucacgaccacccucgaggagaccaaguuccugacggagaaccugcuccuguacaucgacaucaacgggaaccugcaccccgacuccgccacccucgugagcgacaucgacaucaccuuccugaagaaggacgcccccuacaucgugggcgacgucgugcaggagggcgugcugaccgccgucgugauccccacgaagaaggccgggggcaccaccgagaugcucgcgaaggcccugcgcaaggugccgaccgacaacuacaucacgaccuaccccgggcagggccugaacggguacaccgucgaggaggccaagaccgugcucaagaagugcaaguccgccuucuacauccugcccagcaucaucuccaacgagaagcaggagauccugggcaccgugagcuggaaccuccgggagaugcuggcgcacgccgaggagacgcgcaagcugaugcccgucugcguggagaccaaggccaucguguccaccauccagcggaaguacaagggcaucaagauccaggagggggucguggacuacggcgcccgcuucuacuucuacaccagcaagacgaccguggccucccugaucaacacccucaacgaccugaacgagacccuggucacgaugccgcucggguacgugacccacggccugaaccuggaggaggcggcccgguacaugcgcagccucaaggugcccgccaccgucuccgugagcucccccgacgccgugaccgccuacaacggguaccugacgagcuccagcaagacccccgaggagcacuucaucgagaccaucucccuggcgagcagcuacaaggacugguccuacagcggccaguccacccagcucggcaucgaguuccugaagcggggggacaagagcgucuacuacacguccaacccgaccaccuuccaccuggacggcgaggugaucaccuucgacaaccucaagacgcugcugagccuccgcgaggugcggaccaucaaggucuucaccaccguggacaacaucaaccugcacacgcagguggucgacauguccaugaccuacgggcagcaguucggccccaccuaccuggacggcgccgacgugaccaagaucaagccccacaacagccacgaggggaagacguucuacgugcucccgaacgacgacacccugcgcgucgaggccuucgaguacuaccacaccaccgaccccuccuuccugggccgguacaugagcgcccucaaccacacgaagaaguggaaguacccccaggugaacgggcugaccuccaucaagugggccgacaacaacugcuaccuggcgaccgcccuccugacccugcagcagaucgagcucaaguucaaccccccggcccugcaggacgccuacuaccgcgcgcgggccggcgaggccgccaacuucugcgcccugauccucgcguacugcaacaagacggugggggagcugggcgacguccgcgagaccaugagcuaccuguuccagcacgccaaccucgacuccugcaagcgggugcugaacgucgugugcaagaccugcggccagcagcagaccacccugaaggggguggaggccgucauguacaugggcacgcucagcuacgagcaguucaagaagggggugcagauccccugcaccugcggcaagcaggccaccaaguaccuggugcagcaggagucccccuucgucaugaugagcgcccccccggcgcaguacgagcugaagcacgggaccuucacgugcgccuccgaguacaccggcaacuaccagugcggccacuacaagcacaucaccagcaaggagacccucuacugcaucgacggggcccugcugacgaagagcuccgaguacaagggccccaucaccgacguguucuacaaggagaacagcuacaccaccacgaucaagcccgugaccuacaagcucgacggggucgugugcaccgagaucgaccccaagcuggacaacuacuacaagaaggacaacuccuacuucaccgagcagccgaucgaccuggugcccaaccagcccuaccccaacgccagcuucgacaacuucaaguucgucugcgacaacaucaaguucgccgacgaccucaaccagcugacgggcuacaagaagccggcgucccgcgagcugaaggugaccuucuuccccgaccucaacggggacguggucgccaucgacuacaagcacuacacccccagcuucaagaagggcgccaagcugcugcacaagcccaucguguggcacgugaacaacgccaccaacaaggcgacguacaagccgaacaccuggugcauccggugccucugguccaccaagcccgucgagaccagcaacuccuucgacgugcugaagagcgaggacgcccagggcauggacaaccuggccugcgaggaccucaagcccguguccgaggaggucguggagaaccccacgauccagaaggacgugcuggagugcaacgucaagaccaccgagguggugggggacaucauccugaagccggccaacaacagccucaagaucaccgaggaggucggccacacggaccugauggccgcguacguggacaacuccagccugaccaucaagaagcccaacgagcucucccgcgugcuggggcugaagacccucgccacccacggccuggccgccgucaacagcgugcccugggacacgaucgccaacuacgcgaagccguuccugaacaagguggucuccaccaccaccaacaucgugacgcgcugccucaaccgggugugcaccaacuacaugcccuacuucuucacccugcugcuccagcugugcaccuucacccgcagcacgaacucccggaucaaggccagcaugcccaccaccaucgccaagaacaccgucaagagcguggggaaguucugccuggaggccuccuucaacuaccucaagagccccaacuucuccaagcugaucaacaucaucaucugguuccugcuccugagcgugugccugggcucccucaucuacagcacggccgcgcugggcguccugauguccaaccucgggaugccgagcuacugcaccggcuaccgcgagggguaccugaacuccaccaacgugaccaucgccacguacugcaccggcagcauccccugcuccgugugccugagcggccucgacucccuggacaccuaccccagccuggagaccauccagaucacgaucuccagcuucaagugggaccucaccgccuucgggcuggucgccgagugguuccuggccuacauccucuucacccgguucuucuacgugcugggccuggcggccaucaugcagcucuucuucuccuacuucgccgugcacuucaucagcaacuccuggcugauguggcugaucaucaaccugguccagauggcccccaucagcgcgauggugcgcauguacaucuucuucgccagcuucuacuacguguggaaguccuacguccacgugguggacgggugcaacagcuccaccugcaugaugugcuacaagcggaaccgcgccacgcgggucgagugcaccaccaucgugaacggcguccgccggagcuucuacguguacgccaacgggggcaagggcuucugcaagcuccacaacuggaacugcgugaacugcgacaccuucugcgccggguccacguucaucagcgacgaggucgcgcgcgaccugucccugcaguucaagcggccgaucaaccccaccgaccagagcuccuacaucguggacagcgugaccgucaagaacggcuccauccaccucuacuucgacaaggccgggcagaagaccuacgagcgccacagccugucccacuucgugaaccuggacaaccuccgggccaacaacacgaagggcagccugcccaucaacgugaucgucuucgacgggaaguccaagugcgaggagagcuccgccaagagcgccuccguguacuacagccagcugaugugccagcccauccuccugcuggaccaggcgcucgugagcgacgucggcgacuccgccgagguggccgugaagauguucgacgccuacgucaacaccuucagcuccaccuucaacgugccgauggagaagcugaagacccugguggccacggcggaggccgagcucgccaagaacgucagccuggacaacgugcuguccaccuucaucagcgccgcgcgccagggcuucguggacuccgacgucgagaccaaggacgugguggagugccucaagcugagccaccaguccgacaucgaggucaccggggacagcugcaacaacuacaugcugacguacaacaagguggagaacaugaccccccgggaccucggcgccugcaucgacugcuccgcccgccacaucaacgcccagguggccaagagccacaacaucgcgcugaucuggaacgucaaggacuucaugucccugagcgagcagcuccggaagcagauccgcuccgccgccaagaagaacaaccugcccuucaagcugaccugcgccaccacgcgccagguggugaacgucgugaccaccaagaucgcccucaaggggggcuga

SEQ ID NO: 18100 - RNA, 5841 nt, Artificial Sequence
  SARS-CoV-2__MT632834.1__non-structural protein 3 (NSP3) CDS gc
auggcccccaccaaggugaccuucggcgacgacacggucaucgaggugcagggguacaagagcgugaacaucaccuucgagcuggacgagcgcaucgacaagguccucaacgagaagugcuccgccuacaccguggagcugggcaccgaggugaacgaguucgcgugcgucguggccgacgccgugaucaagacgcugcagccggucagcgagcuccugaccccccuggggaucgaccucgacgagugguccauggccaccuacuaccuguucgacgagagcggcgaguucaagcuggccucccacauguacugcagcuucuacccccccgacgaggacgaggaggagggggacugcgaggaggaggaguucgagccguccacccaguacgaguacggcacggaggacgacuaccagggcaagccccucgaguucggggcgaccagcgccgcccugcagcccgaggaggagcaggaggaggacuggcuggacgacgacucccagcagaccgugggccagcaggacgggagcgaggacaaccagaccacgaccauccagaccaucguggagguccagccccagcucgagauggagcugaccccgguggugcagacgaucgaggucaacuccuucagcggcuaccugaagcucaccgacaacguguacaucaagaacgccgacaucguggaggaggcgaagaaggucaagcccaccgugguggucaacgccgccaacguguaccugaagcacgggggcggcguggccggggcccugaacaaggcgaccaacaacgccaugcaggucgaguccgacgacuacaucgccacgaacggcccccucaagguggggggcagcugcguccuguccggccacaaccuggccaagcacugccuccacgugguggggcccaacgucaacaagggcgaggacauccagcugcugaagagcgccuacgagaacuucaaccagcacgaggugcuccuggcgccgcugcucuccgccgggaucuucggcgccgaccccauccacagccugcgggugugcgucgacaccgugcgcaccaacguguaccuggccgucuucgacaagaaccucuacgacaagcugguguccagcuuccuggagaugaagagcgagaagcagguggagcagaagaucgccgagauccccaaggaggaggucaagcccuucaucaccgaguccaagccgagcguggagcagcggaagcaggacgacaagaagaucaaggcgugcguggaggaggucacgaccacccucgaggagaccaaguuccugacggagaaccugcuccuguacaucgacaucaacgggaaccugcaccccgacuccgccacccucgugagcgacaucgacaucaccuuccugaagaaggacgcccccuacaucgugggcgacgucgugcaggagggcgugcugaccgccgucgugauccccacgaagaaggccgggggcaccaccgagaugcucgcgaaggcccugcgcaaggugccgaccgacaacuacaucacgaccuaccccgggcagggccugaacggguacaccgucgaggaggccaagaccgugcucaagaagugcaaguccgccuucuacauccugcccagcaucaucuccaacgagaagcaggagauccugggcaccgugagcuggaaccuccgggagaugcuggcgcacgccgaggagacgcgcaagcugaugcccgucugcguggagaccaaggccaucguguccaccauccagcggaaguacaagggcaucaagauccaggagggggucguggacuacggcgcccgcuucuacuucuacaccagcaagacgaccguggccucccugaucaacacccucaacgaccugaacgagacccuggucacgaugccgcucggguacgugacccacggccugaaccuggaggaggcggcccgguacaugcgcagccucaaggugcccgccaccgucuccgugagcucccccgacgccgugaccgccuacaacggguaccugacgagcuccagcaagacccccgaggagcacuucaucgagaccaucucccuggcgggcagcuacaaggacuggagcuacuccggccagagcacccagcucgggaucgaguuccugaagcggggcgacaaguccgucuacuacacgagcaacccgaccaccuuccaccuggacggggaggugaucaccuucgacaaccucaagacgcugcugucccuccgcgaggugcggaccaucaaggucuucaccaccguggacaacaucaaccugcacacgcagguggucgacaugagcaugaccuacggccagcaguucggccccaccuaccuggacggggccgacgugaccaagaucaagccccacaacucccacgagggcaagacguucuacgugcucccgaacgacgacacccugcgcgucgaggccuucgaguacuaccacaccaccgaccccagcuuccuggggcgguacauguccgcccucaaccacacgaagaaguggaaguacccccaggugaacggccugaccagcaucaagugggccgacaacaacugcuaccuggcgaccgcccuccugacccugcagcagaucgagcucaaguucaaccccccggcccugcaggacgccuacuaccgcgcgcgggccggggaggccgccaacuucugcgcccugauccucgcguacugcaacaagacggugggcgagcugggcgacguccgcgagaccauguccuaccuguuccagcacgccaaccucgacagcugcaagcgggugcugaacgucgugugcaagaccugcgggcagcagcagaccacccugaagggcguggaggccgucauguacauggggacgcucuccuacgagcaguucaagaagggcgugcagauccccugcaccugcgggaagcaggccaccaaguaccuggugcagcaggagagccccuucgucaugauguccgcccccccggcgcaguacgagcugaagcacggcaccuucacgugcgccagcgaguacaccggcaacuaccagugcgggcacuacaagcacaucaccuccaaggagacccucuacugcaucgacggcgcccugcugacgaagagcagcgaguacaaggggcccaucaccgacguguucuacaaggagaacuccuacaccaccacgaucaagcccgugaccuacaagcucgacggcgucgugugcaccgagaucgaccccaagcuggacaacuacuacaagaaggacaacagcuacuucaccgagcagccgaucgaccuggugcccaaccagcccuaccccaacgccuccuucgacaacuucaaguucgucugcgacaacaucaaguucgccgacgaccucaaccagcugacgggguacaagaagccggcgagccgcgagcugaaggugaccuucuuccccgaccucaacggcgacguggucgccaucgacuacaagcacuacacccccuccuucaagaagggcgccaagcugcugcacaagcccaucguguggcacgugaacaacgccaccaacaaggcgacguacaagccgaacaccuggugcauccggugccucuggagcaccaagcccgucgagaccuccaacagcuucgacgugcugaaguccgaggacgcccaggggauggacaaccuggccugcgaggaccucaagcccgugagcgaggaggucguggagaaccccacgauccagaaggacgugcuggagugcaacgucaagaccaccgagguggugggcgacaucauccugaagccggccaacaacucccucaagaucaccgaggaggucgggcacacggaccugauggccgcguacguggacaacagcucccugaccaucaagaagcccaacgagcucagccgcgugcugggccugaagacccucgccacccacgggcuggccgccgucaacuccgugcccugggacacgaucgccaacuacgcgaagccguuccugaacaagguggucagcaccaccaccaacaucgugacgcgcugccucaaccgggugugcaccaacuacaugcccuacuucuucacccugcugcuccagcugugcaccuucacccgcuccacgaacagccggaucaaggccuccaugcccaccaccaucgccaagaacaccgucaagagcgugggcaaguucugccuggaggccagcuucaacuaccucaagucccccaacuucagcaagcugaucaacaucaucaucugguuccugcuccuguccgugugccugggcagccucaucuacuccacggccgcgcuggggguccugaugagcaaccucggcaugccguccuacugcaccggguaccgcgagggcuaccugaacagcaccaacgugaccaucgccacguacugcaccggcuccauccccugcagcgugugccuguccgggcucgacagccuggacaccuaccccucccuggagaccauccagaucacgaucagcuccuucaagugggaccucaccgccuucggccuggucgccgagugguuccuggccuacauccucuucacccgguucuucuacgugcuggggcuggcggccaucaugcagcucuucuucagcuacuucgccgugcacuucaucuccaacagcuggcugauguggcugaucaucaaccugguccagauggcccccaucuccgcgauggugcgcauguacaucuucuucgcccucuucuacuacguguggaagagcuacguccacgugguggacggcugcaacagcuccaccugcaugaugugcuacaagcggaaccgcgccacgcgggucgagugcaccaccaucgugaacgggguccgccggagcuucuacguguacgccaacggcggcaagggguucugcaagcugcacaacuggaacugcgugaacugcgacaccuucugcgccggcuccacguucaucagcgacgaggucgcgcgcgaccugucccuccaguucaagcggccgaucaaccccaccgaccagagcuccuacaucguggacagcgugaccgucaagaacggguccauccaccuguacuucgacaaggccggccagaagaccuacgagcgccacagccugucccacuucgugaaccucgacaaccugcgggccaacaacacgaaggggagccugcccaucaacgugaucgucuucgacggcaaguccaagugcgaggagagcuccgccaagagcgccuccguguacuacagccagcucaugugccagcccauccugcugcucgaccaggcgcugguguccgacgucggcgacagcgccgagguggccgugaagauguucgacgccuacgucaacaccuucagcuccaccuucaacgugccgauggagaagcugaagacccucguggccacggcggaggccgagcuggccaagaacgucagccuggacaacgugcucuccaccuucaucagcgccgcgcgccagggguucguggacuccgacgucgagaccaaggacgugguggagugccugaagcugagccaccaguccgacaucgaggucaccggcgacagcugcaacaacuacaugcucacguacaacaagguggagaacaugaccccccgggaccugggggccugcaucgacugcuccgcccgccacaucaacgcccagguggccaagagccacaacaucgcgcugaucuggaacgucaaggacuucaugucccucagcgagcagcugcggaagcagauccgcuccgccgccaagaagaacaaccugcccuucaagcucaccugcgccaccacgcgccagguggugaacgucgugaccaccaagaucgcccugaagggcggguga

SEQ ID NO: 18101 - RNA, 5841 nt, Artificial Sequence
  SARS-CoV-2__MT632840.1__non-structural protein 3 (NSP3) CDS gc
auggcccccaccaaggugaccuucggcgacgacacggucaucgaggugcagggguacaagagcgugaacaucaccuucgagcuggacgagcgcaucgacaagguccucaacgagaagugcuccgccuacaccguggagcugggcaccgaggugaacgaguucgcgugcgucguggccgacgccgugaucaagacgcugcagccggucagcgagcuccugaccccccuggggaucgaccucgacgagugguccauggccaccuacuaccuguucgacgagagcggcgaguucaagcuggccucccacauguacugcagcuucuacccccccgacgaggacgaggaggagggggacugcgaggaggaggaguucgagccguccacccaguacgaguacggcacggaggacgacuaccagggcaagccccucgaguucggggcgaccagcgccgcccugcagcccgaggaggagcaggaggaggacuggcuggacgacgacucccagcagaccgugggccagcaggacgggagcgaggacaaccagaccacgaccauccagaccaucguggagguccagccccagcucgagauggagcugaccccgguggugcagacgaucgaggucaacuccuucagcggcuaccugaagcucaccgacaacguguacaucaagaacgccgacaucguggaggaggcgaagaaggucaagcccaccgugguggucaacgccgccaacguguaccugaagcacgggggcggcguggccggggcccugaacaaggcgaccaacaacgccaugcaggucgaguccgacgacuacaucgccacgaacggcccccucaagguggggggcagcugcguccuguccggccacaaccuggccaagcacugccuccacgugguggggcccaacgucaacaagugcgaggacauccagcugcugaagagcgccuacgagaacuucaaccagcacgaggugcuccuggcgccgcugcucuccgccggcaucuucggggccgaccccauccacagccugcgggugugcgucgacaccgugcgcaccaacguguaccuggccgucuucgacaagaaccucuacgacaagcugguguccagcuuccuggagaugaagagcgagaagcagguggagcagaagaucgccgagauccccaaggaggaggucaagcccuucaucaccgaguccaagccgagcguggagcagcggaagcaggacgacaagaagaucaaggcgugcguggaggaggucacgaccacccucgaggagaccaaguuccugacggagaaccugcuccuguacaucgacaucaacggcaaccugcaccccgacuccgccacccucgugagcgacaucgacaucaccuuccugaagaaggacgcccccuacaucgugggggacgucgugcaggagggcgugcugaccgccgucgugauccccacgaagaaggccggcgggaccaccgagaugcucgcgaaggcccugcgcaaggugccgaccgacaacuacaucacgaccuaccccggccaggggcugaacggcuacaccgucgaggaggccaagaccgugcucaagaagugcaaguccgccuucuacauccugcccagcaucaucuccaacgagaagcaggagauccuggggaccgugagcuggaaccuccgggagaugcuggcgcacgccgaggagacgcgcaagcugaugcccgucugcguggagaccaaggccaucguguccaccauccagcggaaguacaagggcaucaagauccaggagggcgucguggacuacggggcccgcuucuacuucuacaccagcaagacgaccguggccucccugaucaacacccucaacgaccugaacgagacccuggucacgaugccgcucggcuacgugacccacgggcugaaccuggaggaggcggcccgguacaugcgcagccucaaggugcccgccaccgucuccgugagcucccccgacgccgugaccgccuacaacggcuaccugacgagcuccagcaagacccccgaggagcacuucaucgagaccaucucccuggcggggagcuacaaggacuggagcuacuccggccagagcacccagcucggcaucgaguuccugaagcggggggacaaguccgucuacuacacgagcaacccgaccaccuuccaccuggacggcgaggugaucaccuucgacaaccucaagacgcugcugucccuccgcgaggugcggaccaucaaggucuucaccaccguggacaacaucaaccugcacacgcagguggucgacaugagcaugaccuacgggcagcaguucggccccaccuaccuggacggcgccgacgugaccaagaucaagccccacaacucccacgaggggaagacguucuacgugcucccgaacgacgacacccugcgcgucgaggccuucgaguacuaccacaccaccgaccccagcuuccugggccgguacauguccgcccucaaccacacgaagaaguggaaguacccccaggugaacgggcugaccagcaucaagugggccgacaacaacugcuaccuggcgaccgcccuccugacccugcagcagaucgagcucaaguucaaccccccggcccugcaggacgccuacuaccgcgcgcgggccggcgaggccgccaacuucugcgcccugauccucgcguacugcaacaagacggugggggagcugggcgacguccgcgagaccauguccuaccuguuccagcacgccaaccucgacagcugcaagcgggugcugaacgucgugugcaagaccugcggccagcagcagaccacccugaaggggguggaggccgucauguacaugggcacgcucuccuacgagcaguucaagaagggggugcagauccccugcaccugcggcaagcaggccaccaaguaccuggugcagcaggagagccccuucgucaugauguccgcccccccggcgcaguacgagcugaagcacgggaccuucacgugcgccagcgaguacaccggcaacuaccagugcggccacuacaagcacaucaccuccaaggagacccucuacugcaucgacggggcccugcugacgaagagcagcgaguacaagggccccaucaccgacguguucuacaaggagaacuccuacaccaccacgaucaagcccgugaccuacaagcucgacggggucgugugcaccgagaucgaccccaagcuggacaacuacuacaagaaggacaacagcuacuucaccgagcagccgaucgaccuggugcccaaccagcccuaccccaacgccuccuucgacaacuucaaguucgucugcgacaacaucaaguucgccgacgaccucaaccagcugacgggcuacaagaagccggcgagccgcgagcugaaggugaccuucuuccccgaccucaacggggacguggucgccaucgacuacaagcacuacacccccuccuucaagaagggcgccaagcugcugcacaagcccaucguguggcacgugaacaacgccaccaacaaggcgacguacaagccgaacaccuggugcauccggugccucuggagcaccaagcccgucgagaccuccaacagcuucgacgugcugaaguccgaggacgcccagggcauggacaaccuggccugcgaggaccucaagcccgugagcgaggaggucguggagaaccccacgauccagaaggacgugcuggagugcaacgucaagaccaccgagguggugggggacaucauccugaagccggccaacaacucccucaagaucaccgaggaggucggccacacggaccugauggccgcguacguggacaacagcucccugaccaucaagaagcccaacgagcucagccgcgugcuggggcugaagacccucgccacccacggccuggccgccgucaacuccgugcccugggacacgaucgccaacuacgcgcgcccguuccugaacaagguggucagcaccaccaccaacaucgugacgcggugccucaaccgcgugugcaccaacuacaugcccuacuucuucacccugcugcuccagcugugcaccuucacccgguccacgaacagccgcaucaaggccuccaugcccaccaccaucgccaagaacaccgucaagagcguggggaaguucugccuggaggccagcuucaacuaccucaagucccccaacuucagcaagcugaucaacaucaucaucugguuccugcuccuguccgugugccugggcagccucaucuacuccacggccgcgcugggcguccugaugagcaaccucgggaugccguccuacugcaccggcuaccgggagggguaccugaacagcaccaacgugaccaucgccacguacugcaccggcuccauccccugcagcgugugccuguccggccucgacagccuggacaccuaccccucccuggagaccauccagaucacgaucagcuccuucaagugggaccucaccgccuucgggcuggucgccgagugguuccuggccuacauccucuucacccgcuucuucuacgugcugggccuggcggccaucaugcagcucuucuucagcuacuucgccgugcacuucaucuccaacagcuggcugauguggcugaucaucaaccugguccagauggcccccaucuccgcgauggugcggauguacaucuucuucgccagcuucuacuacguguggaagagcuacguccacgugguggacgggugcaacuccagcaccugcaugaugugcuacaagcgcaaccgggccacgcgcgucgagugcaccaccaucgugaacggcguccggcgcuccuucuacguguacgccaacgggggcaagggcuucugcaagcuccacaacuggaacugcgugaacugcgacaccuucugcgccgggagcacguucaucuccgacgaggucgcgcgggaccugagccugcaguucaagcgcccgaucaaccccaccgaccaguccagcuacaucguggacuccgugaccgucaagaacggcagcauccaccucuacuucgacaaggccgggcagaagaccuacgagcggcacucccugagccacuucgugaaccuggacaaccuccgcgccaacaacacgaagggcucccugcccaucaacgugaucgucuucgacgggaagagcaagugcgaggaguccagcgccaaguccgccagcguguacuacucccagcugaugugccagcccauccuccugcuggaccaggcgcucgugagcgacgucggcgacagcgccgagguggccgugaagauguucgacgccuacgucaacaccuucuccagcaccuucaacgugccgauggagaagcugaagacccugguggccacggcggaggccgagcucgccaagaacgucucccuggacaacgugcugagcaccuucaucuccgccgcgcggcagggcuucguggacagcgacgucgagaccaaggacgugguggagugccucaagcugucccaccagagcgacaucgaggucaccggggacuccugcaacaacuacaugcugacguacaacaagguggagaacaugaccccccgcgaccucggcgccugcaucgacugcagcgcccggcacaucaacgcccagguggccaagucccacaacaucgcgcugaucuggaacgucaaggacuucaugagccuguccgagcagcuccgcaagcagauccgcagcgccgccaagaagaacaaccugcccuucaagcugaccugcgccaccacgcggcagguggugaacgucgugaccaccaagaucgcccucaaggggggcuga

SEQ ID NO: 18102 - RNA, 5841 nt, Artificial Sequence
  SARS-CoV-2__MT632866.1__non-structural protein 3 (NSP3) CDS gc
auggcccccaccaaggugaccuucggcgacgacacggucaucgaggugcagggguacaagagcgugaacaucaccuucgagcuggacgagcgcaucgacaagguccucaacgagaagugcuccgccuacaccguggagcugggcaccgaggugaacgaguucgcgugcgucguggccgacgccgugaucaagacgcugcagccggucagcgagcuccugaccccccuggggaucgaccucgacgagugguccauggccaccuacuaccuguucgacgagagcggcgaguucaagcuggccucccacauguacugcagcuucuacccccccgacgaggacgaggaggagggggacugcgaggaggaggaguucgagccguccacccaguacgaguacggcacggaggacgacuaccagggcaagccccucgaguucggggcgaccagcgccgcccugcagcccgaggaggagcaggaggaggacuggcuggacgacgacucccagcagaccgugggccagcaggacgggagcgaggacaaccagaccacgaccauccagaccaucguggagguccagccccagcucgagauggagcugaccccgguggugcagacgaucgaggucaacuccuucagcggcuaccugaagcucaccgacaacguguacaucaagaacgccgacaucguggaggaggcgaagaaggucaagcccaccgugguggucaacgccgccaacguguaccugaagcacgggggcggcguggccggggcccugaacaaggcgaccaacaacgccaugcaggucgaguccgacgacuacaucgccacgaacggcccccucaagguggggggcagcugcguccuguccggccacaaccuggccaagcacugccuccacgugguggggcccaacgucaacaagggcgaggacauccagcugcugaagagcgccuacgagaacuucaaccagcacgaggugcuccuggcgccgcugcucuccgccgggaucuucggcgccgaccccauccacagccugcgggugugcgucgacaccgugcgcaccaacguguaccuggccgucuucgacaagaaccucuacgacaagcugguguccagcuuccuggagaugaagagcgagaagcagguggagcagaagaucgccgagauccccaaggaggaggucaagcccuucaucaccgaguccaagccgagcguggagcagcggaagcaggacgacaagaagaucaaggcgugcguggaggaggucacgaccacccucgaggagaccaaguuccugacggagaaccugcuccuguacaucgacaucaacgggaaccugcaccccgacuccgccacccucgugagcgacaucgacaucaccuuccugaagaaggacgcccccuacaucgugggcgacgucgugcaggagggcgugcugaccgccgucgugauccccacgaagaaggccgggggcaccaccgagaugcucgcgaaggcccugcgcaaggugccgaccgacaacuacaucacgaccuaccccgggcagggccugaacggguacaccgucgaggaggccaagaccgugcucaagaagugcaaguccgccuucuacauccugcccagcaucaucuccaacgagaagcaggagauccugggcaccgugagcuggaaccuccgggagaugcuggcgcacgccgaggagacgcgcaagcugaugcccgucugcguggagaccaaggccaucguguccaccauccagcggaaguacaagggcaucaagauccaggagggggucguggacuacggcgcccgcuucuacuucuacaccagcaagacgaccguggccucccugaucaacacccucaacgaccugaacgagacccuggucacgaugccgcucggguacgugacccacggccugaaccuggaggaggcggcccgguacaugcgcagccucaaggugcccgccaccgucuccgugagcucccccgacgccgugaccgccuacaacggguaccugacgagcuccagcaagacccccgaggagcacuucaucgagaccaucucccuggcgggcagcuacaaggacuggagcuacuccggccagagcacccagcucgggaucgaguuccugaagcggggcgacaaguccgucuacuacacgagcaacccgaccaccuuccaccuggacggggaggugaucaccuucgacaaccucaagacgcugcugucccuccgcgaggugcggaccaucaaggucuucaccaccguggacaacaucaaccugcacacgcagguggucgacaugagcaugaccuacggccagcaguucggccccaccuaccuggacggggccgacgugaccaagaucaagccccacaacucccacgagggcaagacguucuacgugcucccgaacgacgacacccugcgcgucgaggccuucgaguacuaccacaccaccgaccccagcuuccuggggcgguacauguccgcccucaaccacacgaagaaguggaaguacccccaggugaacggccugaccagcaucaagugggccgacaacaacugcuaccuggcgaccgcccuccugacccugcagcagaucgagcucaaguucaaccccccggcccugcaggacgccuacuaccgcgcgcgggccggggaggccgccaacuucugcgcccugauccucgcguacugcaacaagacggugggcgagcugggcgacguccgcgagaccauguccuaccuguuccagcacgccaaccucgacagcugcaagcgggugcugaacgucgugugcaagaccugcgggcagcagcagaccacccugaagggcguggaggccgucauguacauggggacgcucuccuacgagcaguucaagaagggcgugcagauccccugcaccugcgggaagcaggccaccaaguaccuggugcagcaggagagccccuucgucaugauguccgcccccccggcgcaguacgagcugaagcacggcaccuucacgugcgccagcgaguacaccggcaacuaccagugcgggcacuacaagcacaucaccuccaaggagacccucuacugcaucgacggcgcccugcugacgaagagcagcgaguacaaggggcccaucaccgacguguucuacaaggagaacuccuacaccaccacgaucaagcccgugaccuacaagcucgacggcgucgugugcaccgagaucgaccccaagcuggacaacuacuacaagaaggacaacagcuacuucaccgagcagccgaucgaccuggugcccaaccagcccuaccccaacgccuccuucgacaacuucaaguucgucugcgacaacaucaaguucgccgacgaccucaaccagcugacgggguacaagaagccggcgagccgcgagcugaaggugaccuucuuccccgaccucaacggcgacguggucgccaucgacuacaagcacuacacccccuccuucaagaagggcgccaagcugcugcacaagcccaucguguggcacgugaacaacgccaccaacaaggcgacguacaagccgaacaccuggugcauccggugccucuggagcaccaagcccgucgagaccuccaacagcuucgacgugcugaaguccgaggacgcccaggggauggacaaccuggccugcgaggaccucaagcccgugagcgaggaggucguggagaaccccacgauccagaaggacgugcuggagugcaacgucaagaccaccgagguggugggcgacaucauccugaagccggccaacaacucccucaagaucaccgaggaggucgggcacacggaccugauggccgcguacguggacaacagcucccugaccaucaagaagcccaacgagcucagccgcgugcugggccugaagacccucgccacccacgggcuggccgccgucaacuccgugcccugggacacgaucgccaacuacgcgaagccguuccugaacaagguggucagcaccaccaccaacaucgugacgcgcugccucaaccgggugugcaccaacuacaugcccuacuucuucacccugcugcuccagcugugcaccuucacccgcuccacgaacagccggaucaaggccuccaugcccaccaccaucgccaagaacaccgucaagagcgugggcaaguucugccuggaggccagcuucaacuaccucaagucccccaacuucagcaagcugaucaacaucaucaucugguuccugcuccuguccgugugccugggcagccucaucuacuccacggccgcgcuggggguccugaugagcaaccucggcaugccguccuacugcaccggguaccgcgagggcuaccugaacagcaccaacgugaccaucgccacguacugcaccggcuccauccccugcagcgugugccuguccgggcucgacagccuggacaccuaccccucccuggagaccauccagaucacgaucagcuccuucaagugggaccucaccgccuucggccuggucgccgagugguuccuggccuacauccucuucacccgguucuucuacgugcuggggcuggcggccaucaugcagcucuucuucagcuacuucgccgugcacuucaucuccaacagcuggcugauguggcugaucaucaaccugguccagauggcccccaucuccgcgauggugcgcauguacaucuucuucgccagcuucuacuacguguggaagagcuacguccacgugguggacggcugcaacuccagcaccugcaugaugugcuacaagcggaaccgcgccacgcgggucgagugcaccaccaucgugaacgggguccgccgguccuucuacguguacgccaacggcggcaagggguucugcaagcuccacaacuggaacugcgugaacugcgacaccuucugcgccggcagcacguucaucuccgacgaggucgcgcgcgaccugagccugcaguucaagcggccgaucaaccccaccgaccaguccagcuacaucguggacuccgugaccgucaagaacgggagcauccaccucuacuucgacaaggccggccagaagaccuacgagcgccacucccugagccacuucgugaaccuggacaaccuccgggccaacaacacgaaggggucccugcccaucaacgugaucgucuucgacggcaagagcaagugcgaggaguccagcgccaaguccgccagcguguacuacucccagcugaugugccagcccauccuccugcuggaccaggcgcucgugagcgacgucggcgacagcgccgagguggccgugaagauguucgacgccuacgucaacaccuucuccagcaccuucaacgugccgauggagaagcugaagacccugguggccacggcggaggccgagcucgccaagaacgucucccuggggaacgugcugagcaccuucaucuccgccgcgcgccagggcuucguggacagcgacgucgagaccaaggacgugguggagugccucaagcugucccaccagagcgacaucgaggucaccggggacuccugcaacaacuacaugcugacguacaacaagguggagaacaugaccccccgggaccucggcgccugcaucgacugcagcgcccgccacaucaacgcccagguggccaagucccacaacaucgcgcugaucuggaacgucaaggacuucaugagccuguccgagcagcuccggaagcagauccgcagcgccgccaagaagaacaaccugcccuucaagcugaccugcgccaccacgcgccagguggugaacgucgugaccaccaagaucgcccucaaggggggcuga

SEQ ID NO: 18103 - RNA, 5841 nt, Artificial Sequence
  SARS-CoV-2__MT632921.1__non-structural protein 3 (NSP3) CDS gc
auggcccccaccaaggugaccuucggcgacgacacggucaucgaggugcagggguacaagagcgugaacaucaccuucgagcuggacgagcgcaucgacaagguccucaacgagaagugcuccgccuacaccguggagcugggcaccgaggugaacgaguucgcgugcgucguggccgacgccgugaucaagacgcugcagccggucagcgagcuccugaccccccuggggaucgaccucgacgagugguccauggccaccuacuaccuguucgacgagagcggcgaguucaagcuggccucccacauguacugcagcuucuacccccccgacgaggacgaggaggagggggacugcgaggaggaggaguucgagccguccacccaguacgaguacggcacggaggacgacuaccagggcaagccccucgaguucggggcgaccagcgccgcccugcagcccgaggaggagcaggaggaggacuggcuggacgacgacucccagcagaccgugggccagcaggacgggagcgaggacaaccagaccacgaccauccagaccaucguggagguccagccccagcucgagauggagcugaccccgguggugcagacgaucgaggucaacuccuucagcggcuaccugaagcucaccgacaacguguacaucaagaacgccgacaucguggaggaggcgaagaaggucaagcccaccgugguggucaacgccgccaacguguaccugaagcacgggggcggcguggccggggcccugaacaaggcgaccaacaacgccaugcaggucgaguccgacgacuacaucgccacgaacggcccccucaagguggggggcagcugcguccuguccggccacaaccuggccaagcacugccuccacgugguggggcccaacgucaacaagggcgaggacauccagcugcugaagagcgccuacgagaacuucaaccagcacgaggugcuccuggcgccgcugcucuccgccgggaucuucggcgccgacagcauccacucccugcgggugugcgucgacaccgugcgcaccaacguguaccuggccgucuucgacaagaaccucuacgacaagcuggugagcagcuuccuggagaugaaguccgagaagcagguggagcagaagaucgccgagauccccaaggaggaggucaagcccuucaucaccgagagcaagcccuccguggagcagcggaagcaggacgacaagaagaucaaggcgugcguggaggaggucacgaccacccucgaggagaccaaguuccugacggagaaccugcuccuguacaucgacaucaacgggaaccugcacccggacagcgccacccucguguccgacaucgacaucaccuuccugaagaaggacgcccccuacaucgugggcgacgucgugcaggagggcgugcugaccgccgucgugauccccacgaagaaggccgggggcaccaccgagaugcucgcgaaggcccugcgcaaggugcccaccgacaacuacaucacgaccuacccggggcagggccugaacggguacaccgucgaggaggccaagaccgugcucaagaagugcaagagcgccuucuacauccugcccuccaucaucagcaacgagaagcaggagauccugggcaccguguccuggaaccuccgggagaugcuggcgcacgccgaggagacgcgcaagcugaugcccgucugcguggagaccaaggccaucgugagcaccauccagcggaaguacaagggcaucaagauccaggagggggucguggacuacggcgcccgcuucuacuucuacaccuccaagacgaccguggccagccugaucaacacccucaacgaccugaacgagacccuggucacgaugccccucggguacgugacccacggccugaaccuggaggaggcggcccgguacaugcgcucccucaaggugccggccaccgucagcguguccagccccgacgccgugaccgccuacaacggguaccugacguccagcuccaagacccccgaggagcacuucaucgagaccaucagccuggcgggcagcuacaaggacugguccuacagcggccaguccacccagcucgggaucgaguuccugaagcggggcgacaagagcgucuacuacacguccaaccccaccaccuuccaccuggacggggaggugaucaccuucgacaaccucaagacgcugcugagccuccgcgaggugcggaccaucaaggucuucaccaccguggacaacaucaaccugcacacgcagguggucgacauguccaugaccuacggccagcaguucggcccgaccuaccuggacggggccgacgugaccaagaucaagccccacaacagccacgagggcaagacguucuacgugcuccccaacgacgacacccugcgcgucgaggccuucgaguacuaccacaccaccgacccguccuuccuggggcgguacaugagcgcccucaaccacacgaagaaguggaaguacccccaggugaacggccugaccuccaucaagugggccgacaacaacugcuaccuggcgaccgcccuccugacccugcagcagaucgagcucaaguucaacccccccgcccugcaggacgccuacuaccgcgcgcgggccggggaggccgccaacuucugcgcccugauccucgcguacugcaacaagacggugggcgagcugggcgacguccgcgagaccaugagcuaccuguuccagcacgccaaccucgacuccugcaagcgggugcugaacgucgugugcaagaccugcgggcagcagcagaccacccugaagggcguggaggccgucauguacauggggacgcucagcuacgagcaguucaagaagggcgugcagaucccgugcaccugcgggaagcaggccaccaaguaccuggugcagcaggagucccccuucgucaugaugagcgccccccccgcgcaguacgagcugaagcacggcaccuucacgugcgccuccgaguacaccggcaacuaccagugcgggcacuacaagcacaucaccagcaaggagacccucuacugcaucgacggcgcccugcugacgaagagcuccgaguacaaggggccgaucaccgacguguucuacaaggagaacagcuacaccaccacgaucaagcccgugaccuacaagcucgacggcgucgugugcaccgagaucgaccccaagcuggacaacuacuacaagaaggacaacuccuacuucaccgagcagcccaucgaccuggugccgaaccagcccuaccccaacgccagcuucgacaacuucaaguucgucugcgacaacaucaaguucgccgacgaccucaaccagcugacgggguacaagaagcccgcgucccgcgagcugaaggugaccuucuucccggaccucaacggcgacguggucgccaucgacuacaagcacuacacccccagcuucaagaagggcgccaagcugcugcacaagcccaucguguggcacgugaacaacgccaccaacaaggcgacguacaagcccaacaccuggugcauccggugccucugguccaccaagccggucgagaccagcaacuccuucgacgugcugaagagcgaggacgcccaggggauggacaaccuggccugcgaggaccucaagcccguguccgaggaggucguggagaaccccacgauccagaaggacgugcuggagugcaacgucaagaccaccgagguggugggcgacaucauccugaagcccgccaacaacagccucaagaucaccgaggaggucgggcacacggaccugauggccgcguacguggacaacuccagccugaccaucaagaagccgaacgagcucucccgcgugcugggccugaagacccucgccacccacgggcuggccgccgucaacagcgugcccugggacacgaucgccaacuacgcgaagcccuuccugaacaagguggucuccaccaccaccaacaucgugacgcgcugccucaaccgggugugcaccaacuacaugccguacuucuucacccugcugcuccagcugugcaccuucacccgcagcacgaacucccggaucaaggccagcaugcccaccaccaucgccaagaacaccgucaagagcgugggcaaguucugccuggaggccuccuucaacuaccucaagagccccaacuucuccaagcugaucaacaucaucaucugguuccugcuccugagcgugugccugggcucccucaucuacagcacggccgcgcuggggguccugauguccaaccucggcaugcccagcuacugcaccggguaccgcgagggcuaccugaacuccaccaacgugaccaucgccacguacugcaccggcagcaucccgugcuccgugugccugagcgggcucgacucccuggacaccuaccccagccuggagaccauccagaucacgaucuccagcuucaagugggaccucaccgccuucggccuggucgccgagugguuccuggccuacauccucuucacccgguucuucuacgugcuggggcuggcggccaucaugcagcucuucuucuccuacuucgccgugcacuucaucagcaacuccuggcugauguggcugaucaucaaccugguccagauggcccccaucagcgcgauggugcgcauguacaucuucuucgccagcuucuacuacguguggaaguccuacguccacgugguggacggcugcaacagcuccaccugcaugaugugcuacaagcggaaccgcgccacgcgggucgagugcaccaccaucgugaacgggguccgccggagcuucuacguguacgccaacggcggcaagggguucugcaagcuccacaacuggaacugcgugaacugcgacaccuucugcgccggcuccacguucaucagcgacgaggucgcgcgcgaccugucccugcaguucaagcggcccaucaacccgaccgaccagagcuccuacaucguggacagcgugaccgucaagaacggguccauccaccucuacuucgacaaggccggccagaagaccuacgagcgccacagccugucccacuucgugaaccuggacaaccuccgggccaacaacacgaaggggagccugcccaucaacgugaucgucuucgacggcaaguccaagugcgaggagagcuccgccaagagcgccuccguguacuacagccagcugaugugccagcccauccuccugcuggaccaggcgcucgugagcgacgucggcgacuccgccgagguggccgugaagauguucgacgccuacgucaacaccuucagcuccaccuucaacgugcccauggagaagcugaagacccugguggccacggcggaggccgagcucgccaagaacgucagccuggacaacgugcuguccaccuucaucagcgccgcgcgccagggguucguggacuccgacgucgagaccaaggacgugguggagugccucaagcugagccaccaguccgacaucgaggucaccggcgacagcugcaacaacuacaugcugacguacaacaagguggagaacaugaccccgcgggaccucggggccugcaucgacugcuccgcccgccacaucaacgcccagguggccaagagccacaacaucgcgcugaucuggaacgucaaggacuucaugucccugagcgagcagcuccggaagcagauccgcuccgccgccaagaagaacaaccugcccuucaagcugaccugcgccaccacgcgccagguggugaacgucgugaccaccaagaucgcccucaagggcggguga

SEQ ID NO: 18104 - RNA, 5841 nt, Artificial Sequence
  SARS-CoV-2__MT632930.1__non-structural protein 3 (NSP3) CDS gc
auggcccccaccaaggugaccuucggcgacgacacggucaucgaggugcagggguacaagagcgugaacaucaccuucgagcuggacgagcgcaucgacaagguccucaacgagaagugcuccgccuacaccguggagcugggcaccgaggugaacgaguucgcgugcgucguggccgacgccgugaucaagacgcugcagccggucagcgagcuccugaccccccuggggaucgaccucgacgagugguccauggccaccuacuaccuguucgacgagagcggcgaguucaagcuggccucccacauguacugcagcuucuacccccccgacgaggacgaggaggagggggacugcgaggaggaggaguucgagccguccacccaguacgaguacggcacggaggacgacuaccagggcaagccccucgaguucggggcgaccagcgccgcccugcagcccgaggaggagcaggaggaggacuggcuggacgacgacucccagcagaccgugggccagcaggacgggagcgaggacaaccagaccacgaccauccagaccaucguggagguccagccccagcucgagauggagcugaccccgguggugcagacgaucgaggucaacuccuucagcggcuaccugaagcucaccgacaacguguacaucaagaacgccgacaucguggaggaggcgaagaaggucaagcccaccgugguggucaacgccgccaacguguaccugaagcacgggggcggcguggccggggcccugaacaaggcgaccaacaacgccaugcaggucgaguccgacgacuacaucgccacgaacggcccccucaagguggggggcagcugcguccuguccggccacaaccuggccaagcacugccuccacgugguggggcccaacgucaacaagggcgaggacauccagcugcugaagagcgccuacgagaacuucaaccagcacgaggugcuccuggcgccgcugcucuccgccgggaucuucggcgccgaccccauccacagccugcgggugugcgucgacaccgugcgcaccaacguguaccuggccgucuucgacaagaaccucuacgacaagcugguguccagcuuccuggagaugaagagcgagaagcagguggagcagaagaucgccgagauccccaaggaggaggucaagcccuucaucaccgaguccaagccgagcguggagcagcggaagcaggacgacaagaagaucaaggcgugcguggaggaggucacgaccacccucgaggagaccaaguuccugacggagaaccugcuccuguacaucgacaucaacgggaaccugcaccccgacuccgccacccucgugagcgacaucgacaucaccuuccugaagaaggacgcccccuacaucgugggcgacgucgugcaggagggcgugcugaccgccgucgugauccccacgaagaaggccgggggcaccaccgagaugcucgcgaaggcccugcgcaaggugccgaccgacaacuacaucacgaccuaccccgggcagggccugaacggguacaccgucgaggaggccaagaccgugcucaagaagugcaaguccgccuucuacauccugcccagcaucaucuccaacgagaagcaggagauccugggcaccgugagcuggaaccuccgggagaugcuggcgcacgccgaggagacgcgcaagcugaugcccgucugcguggagaccaaggccaucguguccaccauccagcggaaguacaagggcaucaagauccaggagggggucguggacuacggcgcccgcuucuacuucuacaccagcaagacgaccguggccucccugaucaacacccucaacgaccugaacgagacccuggucacgaugccgcucggguacgugacccacggccugaaccuggaggaggcggcccgguacaugcgcagccucaaggugcccgccaccgucuccgugagcucccccgacgccgugaccgccuacaacggguaccugacgagcuccagcaagacccccgaggagcacuucaucgagaccaucucccuggcgggcagcuacaaggacuggagcuacuccggccagagcacccagcucgggaucgaguuccugaagcggggcgacaaguccgucuacuacacgagcaacccgaccaccuuccaccuggacggggaggugaucaccuucgacaaccucaagacgcugcugucccuccgcgaggugcggaccaucaaggucuucaccaccguggacaacaucaaccugcacacgcagguggucgacaugagcaugaccuacggccagcaguucggccccaccuaccuggacggggccgacgugaccaagaucaagccccacaacucccacgagggcaagacguucuacgugcucccgaacgacgacacccugcgcgucgaggccuucgaguacuaccacaccaccgaccccagcuuccuggggcgguacauguccgcccucaaccacacgaagaaguggaaguacccccaggugaacggccugaccagcaucaagugggccgacaacaacugcuaccuggcgaccgcccuccugacccugcagcagaucgagcucaaguucaaccccccggcccugcaggacgccuacuaccgcgcgcgggccggggaggccgccaacuucugcgcccugauccucgcguacugcaacaagacggugggcgagcugggcgacguccgcgagaccauguccuaccuguuccagcacgccaaccucgacagcugcaagcgggugcugaacgucgugugcaagaccugcgggcagcagcagaccacccugaagggcguggaggccgucauguacauggggacgcucuccuacgagcaguucaagaagggcgugcagauccccugcaccugcgggaagcaggccaccaaguaccuggugcagcaggagagccccuucgucaugauguccgcccccccggcgcaguacgagcugaagcacggcaccuucacgugcgccagcgaguacaccggcaacuaccagugcgggcacuacaagcacaucaccuccaaggagacccucuacugcaucgacggcgcccugcugacgaagagcagcgaguacaaggggcccaucaccgacguguucuacaaggagaacuccuacaccaccacgaucaagcccgugaccuacaagcucgacggcgucgugugcaccgagaucgaccccaagcuggacaacuacuacaagaaggacaacagcuacuucaccgagcagccgaucgaccuggugcccaaccagcccuaccccaacgccuccuucgacaacuucaaguucgucugcgacaacaucaaguucgccgacgaccucaaccagcugacgggguacaagaagccggcgagccgcgagcugaaggugaccuucuuccccgaccucaacggcgacguggucgccaucgacuacaagcacuacacccccuccuucaagaagggcgccaagcugcugcacaagcccaucguguggcacgugaacaacgccaccaacaaggcgacguacaagccgaacaccuggugcauccggugccucuggagcaccaagcccgucgagaccuccaacagcuucgacgugcugaaguccgaggacgcccaggggauggacaaccuggccugcgaggaccucaagcccgugagcgaggaggucguggagaaccccacgauccagaaggacgugcuggagugcaacgucaagaccaccgagguggugggcgacaucauccugaagccggccaacaacucccucaagaucaccgaggaggucgggcacacggaccugauggccgcguacguggacaacagcucccugaccaucaagaagcccaacgagcucagccgcgugcugggccugaagacccucgccacccacgggcuggccgccgucaacuccgugcccugggacacgaucgccaacuacgcgaagccguuccugaacaagguggucagcaccaccaccaacaucgugacgcgcugccucaaccgggugugcaccaacuacaugcccuacuucuucacccugcugcuccagcugugcaccuucacccgcuccacgaacagccggaucaaggccuccaugcccaccaccaucgccaagaacaccgucaagagcgugggcaaguucugccuggaggccagcuucaacuaccucaagucccccaacuucagcaagcugaucaacaucaucaucugguuccugcuccuguccgugugccugggcagccucaucuacuccacggccgcgcuggggguccugaugagcaaccucggcaugccguccuacugcaccggguaccgcgagggcuaccugaacagcaccaacgugaccaucgccacguacugcaccggcuccauccccugcagcgugugccuguccgggcucgacagccuggacaccuaccccucccuggagaccauccagaucacgaucagcuccuucaagugggaccucaccgccuucggccuggucgccgagugguuccuggccuacauccucuucacccgguucuucuacgugcuggggcuggcggccaucaugcagcucuucuucagcuacuucgccgugcacuucaucuccaacagcuggcugauguggcugaucaucaaccugguccagauggcccccaucuccgcgauggugcgcauguacaucuucuucgccagcuucuacuacguguggaagagcuacguccacgugguggacggcugcaacuccagcaccugcaugaugugcuacaagcggaaccgcgccacgcgggucgagugcaccaccaucgugaacgggguccgccgguccuucuacguguacgccaacggcggcaagggguucugcaagcuccacaacuggaacugcgugaacugcgacaccuucugcgccggcagcacguucaucuccgacgaggucgcgcgcgaccugagccugcaguucaagcggccgaucaaccccaccgaccaguccagcuacaucguggacuccgugaccgucaagaacgggagcauccaccucuacuucgacaaggccggccagaagaccuacgagcgccacucccccagccacuucgugaaccuggacaaccugcgggccaacaacacgaaggggucccuccccaucaacgugaucgucuucgacggcaagagcaagugcgaggaguccagcgccaaguccgccagcguguacuacucccagcugaugugccagccgauccugcuccuggaccaggcgcuggugagcgacgucggcgacagcgccgagguggccgugaagauguucgacgccuacgucaacaccuucuccagcaccuucaacgugcccauggagaagcucaagacccugguggccacggcggaggccgagcuggccaagaacgucucccucgacaacgugcugagcaccuucaucuccgccgcgcgccagggguucguggacagcgacgucgagaccaaggacgugguggagugccugaagcucucccaccagagcgacaucgaggucaccggcgacuccugcaacaacuacaugcugacguacaacaagguggagaacaugaccccccgggaccugggggccugcaucgacugcagcgcccgccacaucaacgcccagguggccaagucccacaacaucgcgcucaucuggaacgucaaggacuucaugagccuguccgagcagcugcggaagcagauccgcagcgccgccaagaagaacaaccuccccuucaagcugaccugcgccaccacgcgccagguggugaacgucgugaccaccaagaucgcccugaagggcggguga

SEQ ID NO: 18105 - RNA, 5841 nt, Artificial Sequence
  SARS-CoV-2__MT632954.1__non-structural protein 3 (NSP3) CDS gc
auggcccccaccaaggugaccuucggcgacgacacggucaucgaggugcagggguacaagagcgugaacaucaccuucgagcuggacgagcgcaucgacaagguccucaacgagaagugcuccgccuacaccguggagcugggcaccgaggugaacgaguucgcgugcgucguggccgacgccgugaucaagacgcugcagccggucagcgagcuccugaccccccuggggaucgaccucgacgagugguccauggccaccuacuaccuguucgacgagagcggcgaguucaagcuggccucccacauguacugcagcuucuacccccccgacgaggacgaggaggagggggacugcgaggaggaggaguucgagccguccacccaguacgaguacggcacggaggacgacuaccagggcaagccccucgaguucggggcgaccagcgccgcccugcagcccgaggaggagcaggaggaggacuggcuggacgacgacucccagcagaccgugggccagcaggacgggagcgaggacaaccagaccacgaccauccagaccaucguggagguccagccccagcucgagauggagcugaccccgguggugcagacgaucgaggucaacuccuucagcggcuaccugaagcucaccgacaacguguacaucaagaacgccgacaucguggaggaggcgaagaaggucaagcccaccgugguggucaacgccgccaacguguaccugaagcacgggggcggcguggccggggcccugaacaaggcgaccaacaacgccaugcaggucgaguccgacgacuacaucgccacgaacggcccccucaagguggggggcagcugcguccuguccggccacaaccuggccaagcacugccuccacgugguggggcccaacgucaacaagggcgaggacauccagcugcugaagagcgccuacgagaacuucaaccagcacgaggugcuccuggcgccgcugcucuccgccgggaucuucggcgccgaccccauccacagccugcgggugugcgucgacaccgugcgcaccaacguguaccuggccgucuucgacaagaaccucuacgacaagcugguguccagcuuccuggagaugaagagcgagaagcagguggagcagaagaucgccgagauccccaaggaggaggucaagcccuucaucaccgaguccaagccgagcguggagcagcggaagcaggacgacaagaagaucaaggcgugcguggaggaggucacgaccacccucgaggagaccaaguuccugacggagaaccugcuccuguacguggacaucaacgggaaccugcaccccgacuccgccacccucgugagcgacaucgacaucaccuuccugaagaaggacgcccccuacaucgucggcgacguggugcaggagggcguccugaccgccguggugauccccacgaagaaggccgggggcaccaccgagaugcucgcgaaggcccugcgcaaggucccgaccgacaacuacaucacgaccuaccccgggcagggccugaacggguacaccguggaggaggccaagaccgugcucaagaagugcaaguccgccuucuacauccugcccagcaucaucuccaacgagaagcaggagauccugggcaccgucagcuggaaccuccgggagaugcuggcgcacgccgaggagacgcgcaagcugaugcccgugugcguggagaccaaggccaucgucuccaccauccagcggaaguacaagggcaucaagauccaggagggggugguggacuacggcgcccgcuucuacuucuacaccagcaagacgaccgucgccucccugaucaacacccucaacgaccugaacgagacccuggugacgaugccgcucggguacgugacccacggccugaaccuggaggaggcggcccgguacaugcgcagccucaagguccccgccaccguguccgugagcucccccgacgccgucaccgccuacaacggguaccugacgagcuccagcaagacccccgaggagcacuucaucgagaccaucucccuggcgggcagcuacaaggacuggagcuacuccggccagagcacccagcucgggaucgaguuccugaagcggggcgacaaguccguguacuacacgagcaacccgaccaccuuccaccuggacggggaggugaucaccuucgacaaccucaagacgcugcugucccuccgcgagguccggaccaucaagguguucaccaccguggacaacaucaaccugcacacgcaggucguggacaugagcaugaccuacggccagcaguucggccccaccuaccuggacggggccgacgugaccaagaucaagccccacaacucccacgagggcaagacguucuacguccucccgaacgacgacacccugcgcguggaggccuucgaguacuaccacaccaccgaccccagcuuccuggggcgguacauguccgcccucaaccacacgaagaaguggaaguacccccaggugaacggccugaccagcaucaagugggccgacaacaacugcuaccuggcgaccgcccuccugacccugcagcagaucgagcucaaguucaaccccccggcccugcaggacgccuacuaccgcgcgcgggccggggaggccgccaacuucugcgcccugauccucgcguacugcaacaagacggucggcgagcugggcgacgugcgcgagaccauguccuaccuguuccagcacgccaaccucgacagcugcaagcggguccugaacguggugugcaagaccugcgggcagcagcagaccacccugaagggcgucgaggccgugauguacauggggacgcucuccuacgagcaguucaagaagggcgugcagauccccugcaccugcgggaagcaggccaccaaguaccugguccagcaggagagccccuucgugaugauguccgcccccccggcgcaguacgagcugaagcacggcaccuucacgugcgccagcgaguacaccggcaacuaccagugcgggcacuacaagcacaucaccuccaaggagacccucuacugcaucgacggcgcccugcugacgaagagcagcgaguacaaggggcccaucaccgacguguucuacaaggagaacuccuacaccaccacgaucaagcccgucaccuacaagcucgacggcguggugugcaccgagaucgaccccaagcuggacaacuacuacaagaaggacaacagcuacuucaccgagcagccgaucgaccugguccccaaccagcccuaccccaacgccuccuucgacaacuucaaguucgugugcgacaacaucaaguucgccgacgaccucaaccagcugacgggguacaagaagccggcgagccgcgagcugaaggugaccuucuuccccgaccucaacggcgacgucguggccaucgacuacaagcacuacacccccuccuucaagaagggcgccaagcugcugcacaagcccaucguguggcacgucaacaacgccaccaacaaggcgacguacaagccgaacaccuggugcauccggugccucuggagcaccaagcccguggagaccuccaacagcuucgacgugcugaaguccgaggacgcccaggggauggacaaccuggccugcgaggaccucaagcccgucagcgaggaggugguggagaaccccacgauccagaaggacguccuggagugcaacgugaagaccaccgagguggucggcgacaucauccugaagccggccaacaacucccucaagaucaccgaggagguggggcacacggaccugauggccgcguacguggacaacagcucccugaccaucaagaagcccaacgagcucagccgcguccugggccugaagacccucgccacccacgggcuggccgccgugaacuccgugcccugggacacgaucgccaacuacgcgaagccguuccugaacaaggucgugagcaccaccaccaacaucgugacgcgcugccucaaccgggucugcaccaacuacaugcccuacuucuucacccugcugcuccagcugugcaccuucacccgcuccacgaacagccggaucaaggccuccaugcccaccaccaucgccaagaacaccgugaagagcgugggcaaguucugccuggaggccagcuucaacuaccucaagucccccaacuucagcaagcugaucaacaucaucaucugguuccugcuccuguccgucugccugggcagccucaucuacuccacggccgcgcugggggugcugaugagcaaccucggcaugccguccuacugcaccggguaccgcgagggcuaccugaacagcaccaacgugaccaucgccacguacugcaccggcuccauccccugcagcgucugccuguccgggcucgacagccuggacaccuaccccucccuggagaccauccagaucacgaucagcuccuucaagugggaccucaccgccuucggccugguggccgagugguuccuggccuacauccucuucacccgguucuucuacgugcuggggcuggcggccaucaugcagcucuucuucagcuacuucgccguccacuucaucuccaacagcuggcugauguggcugaucaucaaccuggugcagauggcccccaucuccgcgauggugcgcauguacaucuucuucgccagcuucuacuacgucuggaagagcuacgugcacguggucgacggcugcaacuccagcaccugcaugaugugcuacaagcggaaccgcgccacgcggguggagugcaccaccaucgucaacggggugcgccgguccuucuacguguacgccaacggcggcaagggguucugcaagcuccacaacuggaacugcgucaacugcgacaccuucugcgccggcagcacguucaucuccgacgagguggcgcgcgaccugagccugcaguucaagcggccgaucaaccccaccgaccaguccagcuacaucguggacuccgucaccgugaagaacgggagcauccaccucuacuucgacaaggccggccagaagaccuacgagcgccacucccugagccacuucgugaaccuggacaaccuccgggccaacaacacgaaggggucccugcccaucaacgucaucguguucgacggcaagagcaagugcgaggaguccagcgccaaguccgccagcguguacuacucccagcugaugugccagcccauccuccugcuggaccaggcgcucgucagcgacgugggcgacagcgccgagguggccgucaagauguucgacgccuacgugaacaccuucuccagcaccuucaacgugccgauggagaagcugaagacccuggucgccacggcggaggccgagcucgccaagaacgugucccuggacaacgugcugagcaccuucaucuccgccgcgcgccagggguucgucgacagcgacguggagaccaaggacguggucgagugccucaagcugucccaccagagcgacaucgaggugaccggcgacuccugcaacaacuacaugcugacguacaacaagguggagaacaugaccccccgggaccucggggccugcaucgacugcagcgcccgccacaucaacgcccaggucgccaagucccacaacaucgcgcugaucuggaacgugaaggacuucaugagccuguccgagcagcuccggaagcagauccgcagcgccgccaagaagaacaaccugcccuucaagcugaccugcgccaccacgcgccagguggucaacguggugaccaccaagaucgcccucaagggcggguga

SEQ ID NO: 18106 - RNA, 5841 nt, Artificial Sequence
  SARS-CoV-2__MT614457.1__non-structural protein 3 (NSP3) CDS gc
auggcccccaccaaggugaccuucggcgacgacacggucaucgaggugcagggguacaagagcgugaacaucaccuucgagcuggacgagcgcaucgacaagguccucaacgagaagugcuccgccuacaccguggagcugggcaccgaggugaacgaguucgcgugcgucguggccgacgccgugaucaagacgcugcagccggucagcgagcuccugaccccccuggggaucgaccucgacgagugguccauggccaccuacuaccuguucgacgagagcggcgaguucaagcuggccucccacauguacugcagcuucuacccccccgacgaggacgaggaggagggggacugcgaggaggaggaguucgagccguccacccaguacgaguacggcacggaggacgacuaccagggcaagccccucgaguucggggcgaccagcgccgcccugcagcccgaggaggagcaggaggaggacuggcuggacgacgacucccagcagaccgugggccagcaggacgggagcgaggacaaccagaccacgaccauccagaccaucguggagguccagccccagcucgagauggagcugaccccgguggugcagacgaucgaggucaacuccuucagcggcuaccugaagcucaccgacaacguguacaucaagaacgccgacaucguggaggaggcgaagaaggucaagcccaccgugguggucaacgccgccaacguguaccugaagcacgggggcggcguggccggggcccugaacaaggcgaccaacaacgccaugcaggucgaguccgacgacuacaucgccacgaacggcccccucaagguggggggcagcugcguccuguccggccacaaccuggccaagcacugccuccacgugguggggcccaacgucgacaagggcgaggacauccagcugcugaagagcgccuacgagaacuucaaccagcacgaggugcuccuggcgccgcugcucuccgccgggaucuucggcgccgaccccauccacagccugcgggugugcgucgacaccgugcgcaccaacguguaccuggccgucuucgacaagaaccucuacgacaagcugguguccagcuuccuggagaugaagagcgagaagcagguggagcagaagaucgccgagauccccaaggaggaggucaagcccuucaucaccgaguccaagccgagcguggagcagcggaagcaggacgacaagaagaucaaggcgugcguggaggaggucacgaccacccucgaggagaccaaguuccugacggagaaccugcuccuguacaucgacaucaacgggaaccugcaccccgacuccgccacccucgugagcgacaucgacaucaccuuccugaagaaggacgcccccuacaucgugggcgacgucgugcaggagggcgugcugaccgccgucgugauccccacgaagaaggccgggggcaccaccgagaugcucgcgaaggcccugcgcaaggugccgaccgacaacuacaucacgaccuaccccgggcagggccugaacggguacaccgucgaggaggccaagaccgugcucaagaagugcaaguccgccuucuacauccugcccagcaucaucuccaacgagaagcaggagauccugggcaccgugagcuggaaccuccgggagaugcuggcgcacgccgaggagacgcgcaagcugaugcccgucugcguggagaccaaggccaucguguccaccauccagcggaaguacaagggcaucaagauccaggagggggucguggacuacggcgcccgcuucuacuucuacaccagcaagacgaccguggccucccugaucaacacccucaacgaccugaacgagacccuggucacgaugccgcucggguacgugacccacggccugaaccuggaggaggcggcccgguacaugcgcagccucaaggugcccgccaccgucuccgugagcucccccgacgccgugaccgccuacaacggguaccugacgagcuccagcaagacccccgaggagcacuucaucgagaccaucucccuggcgggcagcuacaaggacuggagcuacuccggccagagcacccagcucgggaucgaguuccugaagcggggcgacaaguccgucuacuacacgagcaacccgaccaccuuccaccuggacggggaggugaucaccuucgacaaccucaagacgcugcugucccuccgcgaggugcggaccaucaaggucuucaccaccguggacaacaucaaccugcacacgcagguggucgacaugagcaugaccuacggccagcaguucggccccaccuaccuggacggggccgacgugaccaagaucaagccccacaacucccacgagggcaagacguucuacgugcucccgaacgacgacacccugcgcgucgaggccuucgaguacuaccacaccaccgaccccagcuuccuggggcgguacauguccgcccucaaccacacgaagaaguggaaguacccccaggugaacggccugaccagcaucaagugggccgacaacaacugcuaccuggcgaccgcccuccugacccugcagcagaucgagcucaaguucaaccccccggcccugcaggacgccuacuaccgcgcgcgggccggggaggccgccaacuucugcgcccugauccucgcguacugcaacaagacggugggcgagcugggcgacguccgcgagaccauguccuaccuguuccagcacgccaaccucgacagcugcaagcgggugcugaacgucgugugcaagaccugcgggcagcagcagaccacccugaagggcguggaggccgucauguacauggggacgcucuccuacgagcaguucaagaagggcgugcagauccccugcaccugcgggaagcaggccaccaaguaccuggugcagcaggagagccccuucgucaugauguccgcccccccggcgcaguacgagcugaagcacggcaccuucacgugcgccagcgaguacaccggcaacuaccagugcgggcacuacaagcacaucaccuccaaggagacccucuacugcaucgacggcgcccugcugacgaagagcagcgaguacaaggggcccaucaccgacguguucuacaaggagaacuccuacaccaccacgaucaagcccgugaccuacaagcucgacggcgucgugugcaccgagaucgaccccaagcuggacaacuacuacaagaaggacaacagcuacuucaccgagcagccgaucgaccuggugcccaaccagcccuaccccaacgccuccuucgacaacuucaaguucgucugcgacaacaucaaguucgccgacgaccucaaccagcugacgggguacaagaagccggcgagccgcgagcugaaggugaccuucuuccccgaccucaacggcgacguggucgccaucgacuacaagcacuacacccccuccuucaagaagggcgccaagcugcugcacaagcccaucguguggcacgugaacaacgccaccaacaaggcgacguacaagccgaacaccuggugcauccggugccucuggagcaccaagcccgucgagaccuccaacagcuucgacgugcugaaguccgaggacgcccaggggauggacaaccuggccugcgaggaccucaagcccgugagcgaggaggucguggagaaccccacgauccagaaggacgugcuggagugcaacgucaagaccaccgagguggugggcgacaucauccugaagccggccaacaacucccucaagaucaccgaggaggucgggcacacggaccugauggccgcguacguggacaacagcucccugaccaucaagaagcccaacgagcucagccgcgugcugggccugaagacccucgccacccacgggcuggccgccgucaacuccgugcccugggacacgaucgccaacuacgcgaagccguuccugaacaagguggucagcaccaccaccaacaucgugacgcgcugccucaaccgggugugcaccaacuacaugcccuacuucuucacccugcugcuccagcugugcaccuucacccgcuccacgaacagccggaucaaggccuccaugcccaccaccaucgccaagaacaccgucaagagcgugggcaaguucugccuggaggccagcuucaacuaccucaagucccccaacuucagcaagcugaucaacaucaucaucugguuccugcuccuguccgugugccugggcagccucaucuacuccacggccgcgcuggggguccugaugagcaaccucggcaugccguccuacugcaccggguaccgcgagggcuaccugaacagcaccaacgugaccaucgccacguacugcaccggcuccauccccugcagcgugugccuguccgggcucgacagccuggacaccuaccccucccuggagaccauccagaucacgaucagcuccuucaagugggaccucaccgccuucggccuggucgccgagugguuccuggccuacauccucuucacccgguucuucuacgugcuggggcuggcggccaucaugcagcucuucuucagcuacuucgccgugcacuucaucuccaacagcuggcugauguggcugaucaucaaccugguccagauggcccccaucuccgcgauggugcgcauguacaucuucuucgccagcuucuacuacguguggaagagcuacguccacgugguggacggcugcaacuccagcaccugcaugaugugcuacaagcggaaccgcgccacgcgggucgagugcaccaccaucgugaacgggguccgccgguccuucuacguguacgccaacggcggcaagggguucugcaagcuccacaacuggaacugcgugaacugcgacaccuucugcgccggcagcacguucaucuccgacgaggucgcgcgcgaccugagccugcaguucaagcggccgaucaaccccaccgaccaguccagcuacaucguggacuccgugaccgucaagaacgggagcauccaccucuacuucgacaaggccggccagaagaccuacgagcgccacucccugagccacuucgugaaccuggacaaccuccgggccaacaacacgaaggggucccugcccaucaacgugaucgucuucgacggcaagagcaagugcgaggaguccagcgccaaguccgccagcguguacuacucccagcugaugugccagcccauccuccugcuggaccaggcgcucgugagcgacgucggcgacagcgccgagguggccgugaagauguucgacgccuacgucaacaccuucuccagcaccuucaacgugccgauggagaagcugaagacccugguggccacggcggaggccgagcucgccaagaacgucucccuggacaacgugcugagcaccuucaucuccgccgcgcgccagggguucguggacagcgacgucgagaccaaggacgugguggagugccucaagcugucccaccagagcgacaucgaggucaccggcgacuccugcaacaacuacaugcugacguacaacaagguggagaacaugaccccccgggaccucggggccugcaucgacugcagcgcccgccacaucaacgcccagguggccaagucccacaacaucgcgcugaucuggaacgucaaggacuucaugagccuguccgagcagcuccggaagcagauccgcagcgccgccaagaagaacaaccugcccuucaagcugaccugcgccaccacgcgccagguggugaacgucgugaccaccaagaucgcccucaagggcggguga

SEQ ID NO: 18107 - RNA, 5841 nt, Artificial Sequence
  SARS-CoV-2__MT614462.1__non-structural protein 3 (NSP3) CDS gc
auggcccccaccaaggugaccuucggcgacgacacggucaucgaggugcagggguacaagagcgugaacaucaccuucgagcuggacgagcgcaucgacaagguccucaacgagaagugcuccgccuacaccguggagcugggcaccgaggugaacgaguucgcgugcgucguggccgacgccgugaucaagacgcugcagccggucagcgagcuccugaccccccuggggaucgaccucgacgagugguccauggccaccuacuaccuguucgacgagagcggcgaguucaagcuggccucccacauguacugcagcuucuacccccccgacgaggacgaggaggagggggacugcgaggaggaggaguucgagccguccacccaguacgaguacggcacggaggacgacuaccagggcaagccccucgaguucggggcgaccagcgccgcccugcagcccgaggaggagcaggaggaggacuggcuggacgacgacucccagcagaccgugggccagcaggacgggagcgaggacaaccagaccacgaccauccagaccaucguggagguccagccccagcucgagauggagcugaccccgguggugcagacgaucgaggucaacuccuucagcggcuaccugaagcucaccgacaacguguacaucaagaacgccgacaucguggaggaggcgaagaaggucaagcccaccgugguggucaacgccgccaacguguaccugaagcacgggggcggcguggccggggcccugaacaaggcgaccaacaacgccaugcaggucgaguccgacgacuacaucgccacgaacggcccccucaagguggggggcagcugcguccuguccggccacaaccuggccaagcacugccuccacgugguggggcccaacgucaacaagggcgaggacauccagcugcugaagagcgccuacgagaacuucaaccagcacgaggugcuccuggcgccgcugcucuccgccgggaucuucggcgccgaccccauccacagccugcgggugugcgucgacaccgugcgcaccaacguguaccuggccgucuucgacaagaaccucuacgacaagcugguguccagcuuccuggagaugaagagcgagaagcagguggagcagaagaucgccgagauccccaaggaggaggucaagcccuucaucaccgaguccaagccgagcguggagcagcggaagcaggacgacaagaagaucaaggcgugcguggaggaggucacgaccacccucgaggagaccaaguuccugacggagaaccugcuccuguacaucgacaucaacgggaaccugcaccccgacuccgccacccucgugagcgacaucgacaucaccuuccugaagaaggacgcccccuacaucgugggcgacgucgugcaggagggcgugcugaccgccgucgugauccccacgaagaaggccgggggcaccaccgagaugcucgcgaaggcccugcgcaaggugccgaccgacaacuacaucacgaccuaccccgggcagggccugaacggguacaccgucgaggaggccaagaccgugcucaagaagugcaaguccgccuucuacauccugcccagcaucaucuccaacgagaagcaggagauccugggcaccgugagcuggaaccuccgggagaugcuggcgcacgccgaggagacgcgcaagcugaugcccgucugcguggagaccaaggccaucguguccaccauccagcggaaguacaagggcaucaagauccaggagggggucguggacuacggcgcccgcuucuacuucuacaccagcaagacgaccguggccucccugaucaacacccucaacgaccugaacgagacccuggucacgaugccgcucggguacgugacccacggccugaaccuggaggaggcggcccgguacaugcgcagccucaaggugcccgccaccgucuccgugagcucccccgacgccgugaccgccuacaacggguaccugacgagcuccagcaagacccccgaggagcacuucaucgagaccaucucccuggcgggcagcuacaaggacuggagcuacuccggccagagcacccagcucgggaucgaguuccugaagcggggcgacaaguccgucuacuacacgagcaacccgaccaccuuccaccuggacggggaggugaucaccuucgacaaccucaagacgcugcugucccuccgcgaggugcggaccaucaaggucuucaccaccguggacaacaucaaccugcacacgcagguggucgacaugagcaugaccuacggccagcaguucggccccaccuaccuggacggggccgacgugaccaagaucaagccccacaacucccacgagggcaagacguucuacgugcucccgaacgacgacacccugcgcgucgaggccuucgaguacuaccacaccaccgaccccagcuuccuggggcgguacauguccgcccucaaccacacgaagaaguggaaguacccccaggugaacggccugaccagcaucaagugggccgacaacaacugcuaccuggcgaccgcccuccugacccugcagcagaucgagcucaaguucaaccccccggcccugcaggacgccuacuaccgcgcgcgggccggggaggccgccaacuucugcgcccugauccucgcguacugcaacaagacggugggcgagcugggcgacguccgcgagaccauguccuaccuguuccagcacgccaaccucgacagcugcaagcgggugcugaacgucgugugcaagaccugcgggcagcagcagaccacccugaagggcguggaggccgucauguacauggggacgcucuccuacgagcaguucaagaagggcgugcagauccccugcaccugcgggaagcaggccaccaaguaccuggugcagcaggagagccccuucgucaugauguccgcccccccggcgcaguacgagcugaagcacggcaccuucacgugcgccagcgaguacaccggcaacuaccagugcgggcacuacaagcacaucaccuccaaggagacccucuacugcaucgacggcgcccugcugacgaagagcagcgaguacaaggggcccaucaccgacguguucuacaaggagaacuccuacaccaccacgaucaagcccgugaccuacaagcucgacggcgucgugugcaccgagaucgaccccaagcuggacaacuacuacaagaaggacaacagcuacuucaccgagcagccgaucgaccuggugcccaaccagcccuaccccaacgccuccuucgacaacuucaaguucgucugcgacaacaucaaguucgccgacgaccucaaccagcugacgggguacaagaagccggcgagccgcgagcugaaggugaccuucuuccccgaccucaacggcgacguggucgccaucgacuacaagcacuacacccccuccuucaagaagggcgccaagcugcugcacaagcccaucguguggcacgugaacaacgccaccaacaaggcgacguacaagccgaacaccuggugcauccggugccucuggagcaagaagcccgucgagaccuccaacagcuucgacgugcugaaguccgaggacgcccaggggauggacaaccuggccugcgaggaccucaagcccgugagcgaggaggucguggagaaccccaccauccagaaggacgugcuggagugcaacgucaagacgaccgagguggugggcgacaucauccugaagccggccaacaacucccucaagaucaccgaggaggucgggcacaccgaccugauggccgcguacguggacaacagcucccugacgaucaagaagcccaacgagcucagccgcgugcugggccugaagacccucgccacccacgggcuggccgccgucaacuccgugcccugggacaccaucgccaacuacgcgaagccguuccugaacaagguggucagcacgaccaccaacaucgugacccgcugccucaaccgggugugcacgaacuacaugcccuacuucuucacccugcugcuccagcugugcaccuucacccgcuccaccaacagccggaucaaggccuccaugcccacgaccaucgccaagaacaccgucaagagcgugggcaaguucugccuggaggccagcuucaacuaccucaagucccccaacuucagcaagcugaucaacaucaucaucugguuccugcuccuguccgugugccugggcagccucaucuacuccaccgccgcgcuggggguccugaugagcaaccucggcaugccguccuacugcacgggguaccgcgagggcuaccugaacagcaccaacgugaccaucgccaccuacugcacgggcuccauccccugcagcgugugccuguccgggcucgacagccuggacaccuaccccucccuggagaccauccagaucaccaucagcuccuucaagugggaccucacggccuucggccuggucgccgagugguuccuggccuacauccucuucacccgguucuucuacgugcuggggcuggcggccaucaugcagcucuucuucagcuacuucgccgugcacuucaucuccaacagcuggcugauguggcugaucaucaaccugguccagauggcccccaucuccgcgauggugcgcauguacaucuucuucgccagcuucuacuacguguggaagagcuacguccacgugguggacggcugcaacuccagcaccugcaugaugugcuacaagcggaaccgcgccacccgggucgagugcacgaccaucgugaacgggguccgccgguccuucuacguguacgccaacggcggcaagggguucugcaagcuccacaacuggaacugcgugaacugcgacaccuucugcgccggcagcaccuucaucuccgacgaggucgcgcgcgaccugagccugcaguucaagcggccgaucaaccccacggaccaguccagcuacaucguggacuccgugaccgucaagaacgggagcauccaccucuacuucgacaaggccggccagaagaccuacgagcgccacucccugagccacuucgugaaccuggacaaccuccgggccaacaacaccaaggggucccugcccaucaacgugaucgucuucgacggcaagagcaagugcgaggaguccagcgccaaguccgccagcguguacuacucccagcugaugugccagcccauccuccugcuggaccaggcgcucgugagcgacgucggcgacagcgccgagguggccgugaagauguucgacgccuacgucaacacguucuccagcaccuucaacgugccgauggagaagcugaagacccugguggccaccgcggaggccgagcucgccaagaacgucuuccuggacaacgugcuguccacguucaucagcgccgcgcgccagggguucguggacuccgacgucgagaccaaggacgugguggagugccucaagcugagccaccaguccgacaucgaggucaccggcgacagcugcaacaacuacaugcugaccuacaacaagguggagaacaugacgccccgggaccucggggccugcaucgacugcuccgcccgccacaucaacgcccagguggccaagagccacaacaucgcgcugaucuggaacgucaaggacuucaugucccugagcgagcagcuccggaagcagauccgcuccgccgccaagaagaacaaccugcccuucaagcugaccugcgccaccacccgccagguggugaacgucgugacgaccaagaucgcccucaagggcggguga

SEQ ID NO: 18108 - RNA, 5841 nt, Artificial Sequence
  SARS-CoV-2__MT614466.1__non-structural protein 3 (NSP3) CDS gc
auggcccccaccaaggugaccuucggcgacgacacggucaucgaggugcagggguacaagagcgugaacaucaccuucgagcuggacgagcgcaucgacaagguccucaacgagaagugcuccgccuacaccguggagcugggcaccgaggugaacgaguucgcgugcgucguggccgacgccgugaucaagacgcugcagccggucagcgagcuccugaccccccuggggaucgaccucgacgagugguccauggccaccuacuaccuguucgacgagagcggcgaguucaagcuggccucccacauguacugcagcuucuacccccccgacgaggacgaggaggagggggacugcgaggaggaggaguucgagccguccacccaguacgaguacggcacggaggacgacuaccagggcaagccccucgaguucggggcgaccagcgccgcccugcagcccgaggaggagcaggaggaggacuggcuggacgacgacucccagcagaccgugggccagcaggacgggagcgaggacaaccagaccacgaccauccagaccaucguggagguccagccccagcucgagauggagcugaccccgguggugcagacgaucgaggucaacuccuucagcggcuaccugaagcucaccgacaacguguacaucaagaacgccgacaucguggaggaggcgaagaaggucaagcccaccgugguggucaacgccgccaacguguaccugaagcacgggggcggcguggccggggcccugaacaaggcgaccaacaacgccaugcaggucgaguccgacgacuacaucgccacgaacggcccccucaagguggggggcagcugcguccuguccggccacaaccuggccaagcacugccuccacgugguggggcccaacgucaacaagggcgaggacauccagcugcugaagagcgccuacgagaacuucaaccagcacgaggugcuccuggcgccgcugcucuccgccgggaucuucggcgccgaccccauccacagccugcgggugugcgucgacaccgugcgcaccaacguguaccuggccgucuucgacaagaaccucuacgacaagcugguguccagcuuccuggagaugaagagcgagaagcagguggagcagaagaucgccgagauccccaaggaggaggucaagcccuucaucaccgaguccaagccgagcguggagcagcggaagcaggacgacaagaagaucaaggcgugcguggaggaggucacgaccacccucgaggagaccaaguuccugacggagaaccugcuccuguacaucgacaucaacgggaaccugcaccccgacuccgccacccucgugagcgacaucgacaucaccuuccugaagaaggacgcccccuacaucgugggcgacgucgugcaggagggcgugcugaccgccgucgugauccccacgaagaaggccgggggcaccaccgagaugcucgcgaaggcccugcgcaaggugccgaccgacaacuacaucacgaccuaccccgggcagggccugaacggguacaccgucgaggaggccaagaccgugcucaagaagugcaaguccgccuucuacauccugcccagcaucaucuccaacgagaagcaggagauccugggcaccgugagcuggaaccuccgggagaugcuggcgcacgccgaggagacgcgcaagcugaugcccgucugcguggagaccaaggccaucguguccaccauccagcggaaguacaagggcaucaagauccaggagggggucguggacuacggcgcccgcuucuacuucuacaccagcaagacgaccguggccucccugaucaacacccucaacgaccugaacgagacccuggucacgaugccgcucggguacgugacccacggccugaaccuggaggaggcggcccgguacaugcgcagccucaaggugcccgccaccgucuccgugagcucccccgacgccgugaccgccuacaacggguaccugacgagcuccagcaagacccccgaggagcacuucaucgagaccaucucccuggcgggcagcuacaaggacuggagcuacuccggccagagcacccagcucgggaucgaguuccugaagcggggcgacaaguccgucuacuacacgagcaacccgaccaccuuccaccuggacggggaggugaucaccuucgacaaccucaagacgcugcugucccuccgcgaggugcggaccaucaaggucuucaccaccguggacaacaucaaccugcacacgcagguggucgacaugagcaugaccuacggccagcaguucggccccaccuaccuggacggggccgacgugaccaagaucaagccccacaacucccacgagggcaagacguucuacgugcucccgaacgacgacacccugcgcgucgaggccuucgaguacuaccacaccaccgaccccagcuuccuggggcgguacauguccgcccucaaccacacgaagaaguggaaguacccccaggugaacggccugaccagcaucaagugggccgacaacaacugcuaccuggcgaccgcccuccugacccugcagcagaucgagcucaaguucaaccccccggcccugcaggacgccuacuaccgcgcgcgggccggggaggccgccaacuucugcgcccugauccucgcguacugcaacaagacggugggcgagcugggcgacguccgcgagaccauguccuaccuguuccagcacgccaaccucgacagcugcaagcgggugcugaacgucgugugcaagaccugcgggcagcagcagaccacccugaagggcguggaggccgucauguacauggggacgcucuccuacgagcaguucaagaagggcgugcagauccccugcaccugcgggaagcaggccaccaaguaccuggugcagcaggagagccccuucgucaugauguccgcccccccggcgcaguacgagcugaagcacggcaccuucacgugcgccagcgaguacaccggcaacuaccagugcgggcacuacaagcacaucaccuccaaggagacccucuacugcaucgacggcgcccugcugacgaagagcagcgaguacaaggggcccaucaccgacguguucuacaaggagaacuccuacaccaccacgaucaagcccgugaccuacaagcucgacggcgucgugugcaccgagaucgaccccaagcuggacaacuacuacaagaaggacaacagcuacuucaccgagcagccgaucgaccuggugcccaaccagcccuaccccaacgccuccuucgacaacuucaaguucgucugcgacaacaucaaguucgccgacgaccucaaccagcugacgggguacaagaagccggcgagccgcgagcugaaggugaccuucuuccccgaccucaacggcgacguggucgccaucgacuacaagcacuacacccccuccuucaagaagggcgccaagcugcugcacaagcccaucguguggcacgugaacaacgccaccaacaaggcgacguacaagccgaacaccuggugcauccggugccucuggagcaccaagcccgucgagaccuccaacagcuucgacgugcugaaguccgaggacgcccaggggauggacaaccuggccugcgaggaccucaagcccgugagcgaggaggucguggagaaccccacgauccagaaggacgugcuggagugcaacgucaagaccaccgagguggugggcgacaucauccugaagccggccaacaacucccucaagaucaccgaggaggucgggcacacggaccugauggccgcguacguggacaacagcucccugaccaucaagaagcccaacgagcucagccgcgugcugggccugaagacccucgccacccacgggcuggccgccgucaacuccgugcccugggacacgaucgccaacuacgcgaagccguuccugaacaagguggucagcaccaccaccaacaucgugacgcgcugccucaaccgggugugcaccaacuacaugcccuacuucuucacccugcugcuccagcugugcaccuucacccgcuccacgaacagccggaucaaggccuccaugcccaccaccaucgccaagaacaccgucaagagcgugggcaaguucugccuggaggccagcuucaacuaccucaagucccccaacuucagcaagcugaucaacgugaucaucugguuccugcuccuguccgucugccugggcagccucaucuacuccacggccgcgcugggggugcugaugagcaaccucggcaugccguccuacugcaccggguaccgcgagggcuaccugaacagcaccaacgugaccaucgccacguacugcaccggcuccauccccugcagcgucugccuguccgggcucgacagccuggacaccuaccccucccuggagaccauccagaucacgaucagcuccuucaagugggaccucaccgccuucggccugguggccgagugguuccuggccuacauccucuucacccgguucuucuacgugcuggggcuggcggccaucaugcagcucuucuucagcuacuucgccguccacuucaucuccaacagcuggcugauguggcugaucaucaaccuggugcagauggcccccaucuccgcgauggugcgcauguacaucuucuucgccagcuucuacuacgucuggaagagcuacgugcacguggucgacggcugcaacuccagcaccugcaugaugugcuacaagcggaaccgcgccacgcggguggagugcaccaccaucgucaacggggugcgccgguccuucuacguguacgccaacggcggcaagggguucugcaagcuccacaacuggaacugcgucaacugcgacaccuucugcgccggcagcacguucaucuccgacgagguggcgcgcgaccugagccugcaguucaagcggccgaucaaccccaccgaccaguccagcuacaucguggacuccgucaccgugaagaacgggagcauccaccucuacuucgacaaggccggccagaagaccuacgagcgccacucccugagccacuucgugaaccuggacaaccuccgggccaacaacacgaaggggucccugcccaucaacgucaucguguucgacggcaagagcaagugcgaggaguccagcgccaaguccgccagcguguacuacucccagcugaugugccagcccauccuccugcuggaccaggcgcucgucagcgacgugggcgacagcgccgagguggccgucaagauguucgacgccuacgugaacaccuucuccagcaccuucaacgugccgauggagaagcugaagacccuggucgccacggcggaggccgagcucgccaagaacgugucccuggacaacgugcugagcaccuucaucuccgccgcgcgccagggguucgucgacagcgacguggagaccaaggacguggucgagugccucaagcugucccaccagagcgacaucgaggugaccggcgacuccugcaacaacuacaugcugacguacaacaagguggagaacaugaccccccgggaccucggggccugcaucgacugcagcgcccgccacaucaacgcccaggucgccaagucccacaacaucgcgcugaucuggaacgugaaggacuucaugagccuguccgagcagcuccggaagcagauccgcagcgccgccaagaagaacaaccugcccuucaagcugaccugcgccaccacgcgccagguggucaacguggugaccaccaagaucgcccucaagggcggguga

SEQ ID NO: 18109 - RNA, 5841 nt, Artificial Sequence
  SARS-CoV-2__MT614546.1__non-structural protein 3 (NSP3) CDS gc
auggcccccaccaaggugaccuucggcgacgacacggucaucgaggugcagggguacaagagcgugaacaucaccuucgagcuggacgagcgcaucgacaagguccucaacgagaagugcuccgccuacaccguggagcugggcaccgaggugaacgaguucgcgugcgucguggccgacgccgugaucaagacgcugcagccggucagcgagcuccugaccccccuggggaucgaccucgacgagugguccauggccaccuacuaccuguucgacgagagcggcgaguucaagcuggccucccacauguacugcagcuucuacccccccgacgaggacgaggaggagggggacugcgaggaggaggaguucgagccguccacccaguacgaguacggcacggaggacgacuaccagggcaagccccucgaguucggggcgaccagcgccgcccugcagcccgaggaggagcaggaggaggacuggcuggacgacgacucccagcagaccgugggccagcaggacgggagcgaggacaaccagaccacgaccauccagaccaucguggagguccagccccagcucgagauggagcugaccccgguggugcagacgaucgaggucaacuccuucagcggcuaccugaagcucaccgacaacguguacaucaagaacgccgacaucguggaggaggcgaagaaggucaagcccaccgugguggucaacgccgccaacguguaccugaagcacgggggcggcguggccggggcccugaacaaggcgaccaacaacgccaugcaggucgaguccgacgacuacaucgccacgaacggcccccucaagguggggggcagcugcguccuguccggccacaaccuggccaagcacugccuccacgugguggggcccaacgucaacaagggcgaggacauccagcugcugaagagcgccuacgagaacuucaaccagcacgaggugcuccuggcgccgcugcucuccgccgggaucuucggcgccgaccccauccacagccugcgggugugcgucgacaccgugcgcaccaacguguaccuggccgucuucgacaagaaccucuacgacaagcugguguccagcuuccuggagaugaagagcgagaagcagguggagcagaagaucgccgagauccccaaggaggaggucaagcccuucaucaccgaguccaagccgagcguggagcagcggaagcaggacgacaagaagaucaaggcgugcguggaggaggucacgaccacccucgaggagaccaaguuccugacggagaaccugcuccuguacaucgacaucaacgggaaccugcaccccgacuccgccacccucgugagcgacaucgacaucaccuuccugaagaaggacgcccccuacaucgugggcgacgucgugcaggagggcgugcugaccgccgucgugauccccacgaagaaggccgggggcaccaccgagaugcucgcgaaggcccugcgcaaggugccgaccgacaacuacaucacgaccuaccccgggcagggccugaacggguacaccgucgaggaggccaagaccgugcucaagaagugcaaguccgccuucuacauccugcccagcaucaucuccaacgagaagcaggagauccugggcaccgugagcuggaaccuccgggagaugcuggcgcacgccgaggagacgcgcaagcugaugcccgucugcguggagaccaaggccaucguguccaccauccagcggaaguacaagggcaucaagauccaggagggggucguggacuacggcgcccgcuucuacuucuacaccagcaagacgaccguggccucccugaucaacacccucaacgaccugaacgagacccuggucacgaugccgcucggguacgugacccacggccugaaccuggaggaggcggcccgguacaugcgcagccucaaggugcccgccaccgucuccgugagcucccccgacgccgugaccgccuacaacggguaccugacgagcuccagcaagacccccgaggagcacuucaucgagaccaucucccuggcgggcagcuacaaggacuggagcuacuccggccagagcacccagcucgggaucgaguuccugaagcggggcgacaaguccgucuacuacacgagcaacccgaccaccuuccaccuggacggggaggugaucaccuucgacaaccucaagacgcugcugucccuccgcgaggugcggaccaucaaggucuucaccaccguggacaacaucaaccugcacacgcagguggucgacaugagcaugaccuacggccagcaguucggccccaccuaccuggacggggccgacgugaccaagaucaagccccacaacucccacgagggcaagacguucuacgugcucccgaacgacgacacccugcuggucgaggccuucgaguacuaccacaccaccgaccccagcuuccucgggcgcuacauguccgcccugaaccacacgaagaaguggaaguacccccaggugaacggccugaccagcaucaagugggccgacaacaacugcuaccucgcgaccgcccugcugacccuccagcagaucgagcugaaguucaaccccccggcccugcaggacgccuacuaccgggcgcgcgccggggaggccgccaacuucugcgcccucauccuggcguacugcaacaagacggugggcgagcugggcgacguccgggagaccauguccuaccucuuccagcacgccaaccuggacagcugcaagcgcgugcugaacgucgugugcaagaccugcgggcagcagcagaccacccucaagggcguggaggccgucauguacauggggacgcuguccuacgagcaguucaagaagggcgugcagauccccugcaccugcgggaagcaggccaccaaguaccuggugcagcaggagagccccuucgucaugauguccgcccccccggcgcaguacgagcucaagcacggcaccuucacgugcgccagcgaguacaccggcaacuaccagugcgggcacuacaagcacaucaccuccaaggagacccuguacugcaucgacggcgcccugcucacgaagagcagcgaguacaaggggcccaucaccgacguguucuacaaggagaacuccuacaccaccacgaucaagcccgugaccuacaagcuggacggcgucgugugcaccgagaucgaccccaagcuggacaacuacuacaagaaggacaacagcuacuucaccgagcagccgaucgaccucgugcccaaccagcccuaccccaacgccuccuucgacaacuucaaguucgucugcgacaacaucaaguucgccgacgaccugaaccagcugacgggguacaagaagccggcgagccgggagcucaaggugaccuucuuccccgaccugaacggcgacguggucgccaucgacuacaagcacuacacccccuccuucaagaagggcgccaagcugcuccacaagcccaucguguggcacgugaacaacgccaccaacaaggcgacguacaagccgaacaccuggugcauccgcugccuguggagcaccaagcccgucgagaccuccaacagcuucgacgugcugaaguccgaggacgcccaggggauggacaaccucgccugcgaggaccugaagcccgugagcgaggaggucguggagaaccccacgauccagaaggacgugcuggagugcaacgucaagaccaccgagguggugggcgacaucauccucaagccggccaacaacucccugaagaucaccgaggaggucgggcacacggaccugauggccgcguacguggacaacagcucccucaccaucaagaagcccaacgagcugagccgggugcugggccucaagacccuggccacccacgggcuggccgccgucaacuccgugcccugggacacgaucgccaacuacgcgaagccguuccucaacaagguggucagcaccaccaccaacaucgugacgcgcugccugaaccgcgugugcaccaacuacaugcccuacuucuucacccugcuccugcagcugugcaccuucacccgguccacgaacagccgcaucaaggccuccaugcccaccaccaucgccaagaacaccgucaagagcgugggcaaguucugccucgaggccagcuucaacuaccugaagucccccaacuucagcaagcugaucaacaucaucaucugguuccuccugcuguccgugugccucggcagccugaucuacuccacggccgcgcuggggguccucaugagcaaccugggcaugccguccuacugcaccggguaccgggagggcuaccugaacagcaccaacgugaccaucgccacguacugcaccggcuccauccccugcagcgugugccucuccgggcuggacagccuggacaccuaccccucccucgagaccauccagaucacgaucagcuccuucaagugggaccugaccgccuucggccuggucgccgagugguuccucgccuacauccuguucacccgcuucuucuacgugcuggggcucgcggccaucaugcagcuguucuucagcuacuucgccgugcacuucaucuccaacagcuggcugauguggcugaucaucaaccucguccagauggcccccaucuccgcgauggugcggauguacaucuucuucgccagcuucuacuacguguggaagagcuacguccacgugguggacggcugcaacuccagcaccugcaugaugugcuacaagcgcaaccgggccacgcgcgucgagugcaccaccaucgugaacgggguccggcgcuccuucuacguguacgccaacggcggcaagggguucugcaagcugcacaacuggaacugcgugaacugcgacaccuucugcgccggcagcacguucaucuccgacgaggucgcgcgggaccugagccuccaguucaagcgcccgaucaaccccaccgaccaguccagcuacaucguggacuccgugaccgucaagaacgggagcauccaccuguacuucgacaaggccggccagaagaccuacgagcggcacucccugagccacuucgugaaccucgacaaccugcgcgccaacaacacgaaggggucccugcccaucaacgugaucgucuucgacggcaagagcaagugcgaggaguccagcgccaaguccgccagcguguacuacucccagcucaugugccagcccauccugcugcucgaccaggcgcuggugagcgacgucggcgacagcgccgagguggccgugaagauguucgacgccuacgucaacaccuucuccagcaccuucaacgugccgauggagaagcugaagacccucguggccacggcggaggccgagcuggccaagaacgucucccuggacaacgugcucagcaccuucaucuccgccgcgcggcagggguucguggacagcgacgucgagaccaaggacgugguggagugccugaagcugucccaccagagcgacaucgaggucaccggcgacuccugcaacaacuacaugcucacguacaacaagguggagaacaugaccccccgcgaccugggggccugcaucgacugcagcgcccggcacaucaacgcccagguggccaagucccacaacaucgcgcugaucuggaacgucaaggacuucaugagccucuccgagcagcugcgcaagcagauccggagcgccgccaagaagaacaaccugcccuucaagcucaccugcgccaccacgcgccagguggugaacgucgugaccaccaagaucgcccugaagggcggguga

SEQ ID NO: 18110 - RNA, 5841 nt, Artificial Sequence
  SARS-CoV-2__MT614552.1__non-structural protein 3 (NSP3) CDS gc
auggcccccaccaaggugaccuucggcgacgacacggucaucgaggugcagggguacaagagcgugaacaucaccuucgagcuggacgagcgcaucgacaagguccucaacgagaagugcuccgccuacaccguggagcugggcaccgaggugaacgaguucgcgugcgucguggccgacgccgugaucaagacgcugcagccggucagcgagcuccugaccccccuggggaucgaccucgacgagugguccauggccaccuacuaccuguucgacgagagcggcgaguucaagcuggccucccacauguacugcagcuucuacccccccgacgaggacgaggaggagggggacugcgaggaggaggaguucgagccguccacccaguacgaguacggcacggaggacgacuaccagggcaagccccucgaguucggggcgaccagcgccgcccugcagcccgaggaggagcaggaggaggacuggcuggacgacgacucccagcagaccgugggccagcaggacgggagcgaggacaaccagaccacgaccauccagaccaucguggagguccagccccagcucgagauggagcugaccccgguggugcagacgaucgaggucaacuccuucagcggcuaccugaagcucaccgacaacguguacaucaagaacgccgacaucguggaggaggcgaagaaggucaagcccaccgugguggucaacgccgccaacguguaccugaagcacgggggcggcguggccggggcccugaacaaggcgaccaacaacgccaugcaggucgaguccgacgacuacaucgccacgaacggcccccucaagguggggggcagcugcguccuguccggccacaaccuggccaagcacugccuccacgugguggggcccaacgucaacaagggcgaggacauccagcugcugaagagcgccuacgagaacuucaaccagcacgaggugcuccuggcgccgcugcucuccgccgggaucuucggcgccgaccccauccacagccugcgggugugcgucgacaccgugcgcaccaacguguaccuggccgucuucgacaagaaccucuacgacaagcugguguccagcuuccuggagaugaagagcgagaagcagguggagcagaagaucgccgagauccccaaggaggaggucaagcccuucaucaccgaguccaagccgagcguggagcagcggaagcaggacgacaagaagaucaaggcgugcguggaggaggucacgaccacccucgaggagaccaaguuccugacggagaaccugcuccuguacaucgacaucaacgggaaccugcaccccgacuccgccacccucgugagcgacaucgacaucaccuuccugaagaaggacgcccccuacaucgugggcgacgucgugcaggagggcgugcugaccgccgucgugauccccacgaagaaggccgggggcaccaccgagaugcucgcgaaggcccugcgcaaggugccgaccgacaacuacaucacgaccuaccccgggcagggccugaacggguacaccgucgaggaggccaagaccgugcucaagaagugcaaguccgccuucuacauccugcccagcaucaucuccaacgagaagcaggagauccugggcaccgugagcuggaaccuccgggagaugcuggcgcacgccgaggagacgcgcaagcugaugcccgucugcguggagaccaaggccaucguguccaccauccagcggaaguacaagggcaucaagauccaggagggggucguggacuacggcgcccgcuucuacuucuacaccagcaagacgaccguggccucccugaucaacacccucaacgaccugaacgagacccuggucacgaugccgcucggguacgugacccacggccugaaccuggaggaggcggcccgguacaugcgcagccucaaggugcccgccaccgucuccgugagcucccccgacgccgugaccgccuacaacggguaccugacgagcuccagcaagacccccgaggagcacuucaucgagaccaucucccuggcgggcagcuacaaggacuggagcuacuccggccagagcacccagcucgggaucgaguuccugaagcggggcgacaaguccgucuacuacacgagcaacccgaccaccuuccaccuggacggggaggugaucaccuucgacaaccucaagacgcugcugucccuccgcgaggugcggaccaucaaggucuucaccaccguggacaacaucaaccugcacacgcagguggucgacaugagcaugaccuacggccagcaguucggccccaccuaccuggacggggccgacgugaccaagaucaagccccacaacucccacgagggcaagacguucuacgugcucccgaacgacgacacccugcgcgucgaggccuucgaguacuaccacaccaccgaccccagcuuccuggggcgguacauguccgcccucaaccacacgaagaaguggaaguacccccaggugaacggccugaccagcaucaagugggccgacaacaacugcuaccuggcgaccgcccuccugacccugcagcagaucgagcucaaguucaaccccccggcccugcaggacgccuacuaccgcgcgcgggccggggaggccgccaacuucugcgcccugauccucgcguacugcaacaagacggugggcgagcugggcgacguccgcgagaccauguccuaccuguuccagcacgccaaccucgacagcugcaagcgggugcugaacgucgugugcaagaccugcgggcagcagcagaccacccugaagggcguggaggccgucauguacauggggacgcucuccuacgagcaguucaagaagggcgugcagauccccugcaccugcgggaagcaggccaccaaguaccuggugcagcaggagagccccuucgucaugauguccgcccccccggcgcaguacgagcugaagcacggcaccuucacgugcgccagcgaguacaccggcaacuaccagugcgggcacuacaagcacaucaccuccaaggagacccucuacugcaucgacggcgcccugcugacgaagagcagcgaguacaaggggcccaucaccgacguguucuacaaggagaacuccuacaccaccacgaucaagcccgugaccuacaagcucgacggcgucgugugcaccgagaucgaccccaagcuggacaacuacuacaagaaggacaacagcuacuucaccgagcagccgaucgaccuggugcccaaccagcccuaccccaacgccuccuucgacaacuucaaguucgucugcgacaacaucaaguucgccgacgaccucaaccagcugacgggguacaagaagccggcgagccgcgagcugaaggugaccuucuuccccgaccucaacggcgacguggucgccaucgacuacaagcacuacacccccuccuucaagaagggcgccaagcugcugcacaagcccaucguguggcacgugaacaacgccaccaacaaggcgacguacaagccgaacaccuggugcauccggugccucuggagcaccaagcccgucgagaccuccaacagcuucgacgugcugaaguccgaggacgcccaggggauggacaaccuggccugcgaggaccucaagcccgugagcgaggaggucguggagaaccccacgauccagaaggacgugcuggagugcaacgucaagaccaccgagguggugggcgacaucauccugaagccggccaacaacucccucaagaucaccgaggaggucgggcacacggaccugauggccgcguacguggacaacagcucccugaccaucaagaagcccaacgagcucagccgcgugcugggccugaagacccucgccacccacgggcuggccgccgucaacuccgugcccugggacacgaucgccaacuacgcgaagccguuccugaacaagguggucagcaccaccaccaacaucgugacgcgcugccucaaccgggugugcaccaacuacaugcccuacuucuucacccugcugcuccagcugugcaccuucacccgcuccacgaacagccggaucaaggccuccaugcccaccaccaucgccaagaacaccgucaagagcgugggcaaguucugccuggaggccagcuucaacuaccucaaguccagcaacuucuccaagcugaucaacaucaucaucugguuccugcuccugagcgugugccugggcucccucaucuacagcacggccgcgcuggggguccugauguccaaccucggcaugcccagcuacugcaccggguaccgcgagggcuaccugaacuccaccaacgugaccaucgccacguacugcaccggcagcaucccgugcuccgugugccugagcgggcucgacucccuggacaccuaccccagccuggagaccauccagaucacgaucuccagcuucaagugggaccucaccgccuucggccuggucgccgagugguuccuggccuacauccucuucacccgguucuucuacgugcuggggcuggcggccaucaugcagcucuucuucuccuacuucgccgugcacuucaucagcaacuccuggcugauguggcugaucaucaaccugguccagauggcccccaucagcgcgauggugcgcauguacaucuucuucgccagcuucuacuacguguggaaguccuacguccacgugguggacggcugcaacagcuccaccugcaugaugugcuacaagcggaaccgcgccacgcgggucgagugcaccaccaucgugaacgggguccgccggagcuucuacguguacgccaacggcggcaagggguucugcaagcuccacaacuggaacugcgugaacugcgacaccuucugcgccggcuccacguucaucagcgacgaggucgcgcgcgaccugucccugcaguucaagcggcccaucaacccgaccgaccagagcuccuacaucguggacagcgugaccgucaagaacggguccauccaccucuacuucgacaaggccggccagaagaccuacgagcgccacagccugucccacuucgugaaccuggacaaccuccgggccaacaacacgaaggggagccugcccaucaacgugaucgucuucgacggcaaguccaagugcgaggagagcuccgccaagagcgccuccguguacuacagccagcugaugugccagcccauccuccugcuggaccaggcgcucgugagcgacgucggcgacuccgccgagguggccgugaagauguucgacgccuacgucaacaccuucagcuccaccuucaacgugcccauggagaagcugaagacccugguggccacggcggaggccgagcucgccaagaacgucagccuggacaacgugcuguccaccuucaucagcgccgcgcgccagggguucguggacuccgacgucgagaccaaggacgugguggagugccucaagcugagccaccaguccgacaucgaggucaccggcgacagcugcaacaacuacaugcugacguacaacaagguggagaacaugaccccgcgggaccucggggccugcaucgacugcuccgcccgccacaucaacgcccagguggccaagagccacaacaucgcgcugaucuggaacgucaaggacuucaugucccugagcgagcagcuccggaagcagauccgcuccgccgccaagaagaacaaccugcccuucaagcugaccugcgccaccacgcgccagguggugaacgucgugaccaccaagaucgcccucaagggcggguga

SEQ ID NO: 18111 - RNA, 5841 nt, Artificial Sequence
  SARS-CoV-2__MT614556.1__non-structural protein 3 (NSP3) CDS gc
auggcccccaccaaggugaccuucggcgacgacacggucaucgaggugcagggguacaagagcgugaacaucaccuucgagcuggacgagcgcaucgacaagguccucaacgagaagugcuccaccuacaccguggagcugggcacggaggugaacgaguucgccugcgucguggcggacgccgugaucaagacccugcagccggucagcgagcuccugaccccccuggggaucgaccucgacgagugguccauggccaccuacuaccuguucgacgagagcggcgaguucaagcuggccucccacauguacugcagcuucuacccccccgacgaggacgaggaggagggggacugcgaggaggaggaguucgagccguccacgcaguacgaguacggcaccgaggacgacuaccagggcaagccccucgaguucggggccaccagcgcggcccugcagcccgaggaggagcaggaggaggacuggcuggacgacgacucccagcagaccgugggccagcaggacgggagcgaggacaaccagacgaccaccauccagaccaucguggagguccagccccagcucgagauggagcugacgccgguggugcagaccaucgaggucaacuccuucagcggcuaccugaagcucaccgacaacguguacaucaagaacgccgacaucguggaggaggccaagaaggucaagcccaccgugguggucaacgcggccaacguguaccugaagcacgggggcggcguggccggggcccugaacaaggccacgaacaacgcgaugcaggucgaguccgacgacuacaucgccaccaacggcccccucaagguggggggcagcugcguccuguccggccacaaccuggccaagcacugccuccacgugguggggcccaacgucaacaagggcgaggacauccagcugcugaagagcgccuacgagaacuucaaccagcacgaggugcuccuggccccgcugcucuccgcggggaucuucggcgccgaccccauccacagccugcgggugugcgucgacaccgugcgcaccaacguguaccuggccgucuucgacaagaaccucuacgacaagcugguguccagcuuccuggagaugaagagcgagaagcagguggagcagaagaucgccgagauccccaaggaggaggucaagcccuucaucacggaguccaagccgagcguggagcagcggaagcaggacgacaagaagaucaaggccugcguggaggaggucaccaccacccucgaggagacgaaguuccugaccgagaaccugcuccuguacaucgacaucaacgggaaccugcaccccgacuccgcgacccucgugagcgacaucgacaucaccuuccugaagaaggacgcccccuacaucgugggcgacgucgugcaggagggcgugcugacggccgucgugauccccaccaagaaggccgggggcaccaccgagaugcucgccaaggcgcugcgcaaggugccgacggacaacuacaucaccaccuaccccgggcagggccugaacggguacaccgucgaggaggccaagaccgugcucaagaagugcaaguccgccuucuacauccugcccagcaucaucuccaacgagaagcaggagauccugggcacggugagcuggaaccuccgggagaugcuggcccacgcggaggagacccgcaagcugaugcccgucugcguggagaccaaggccaucguguccaccauccagcggaaguacaagggcaucaagauccaggagggggucguggacuacggcgcccgcuucuacuucuacacgagcaagaccaccguggccucccugaucaacacccucaacgaccugaacgagacgcuggucaccaugccgcucggguacgugacccacggccugaaccuggaggaggccgcgcgguacaugcgcagccucaaggugcccgccaccgucuccgugagcucccccgacgccgugacggccuacaacggguaccugaccagcuccagcaagacccccgaggagcacuucaucgagaccaucucccuggccggcagcuacaaggacuggagcuacuccggccagagcacgcagcucgggaucgaguuccugaagcggggcgacaaguccgucuacuacaccagcaacccgaccaccuuccaccuggacggggaggugaucacguucgacaaccucaagacccugcugucccuccgcgaggugcggaccaucaaggucuucaccacgguggacaacaucaaccugcacacccagguggucgacaugagcaugaccuacggccagcaguucggccccaccuaccuggacggggcggacgugacgaagaucaagccccacaacucccacgagggcaagaccuucuacgugcucccgaacgacgacacccugcgcgucgaggccuucgaguacuaccacaccacggaccccagcuuccuggggcgguacauguccgcccucaaccacaccaagaaguggaaguacccccaggugaacggccugaccagcaucaagugggccgacaacaacugcuaccuggccaccgcgcuccugacgcugcagcagaucgagcucaaguucaaccccccggcccugcaggacgccuacuaccgcgcccgggcgggggaggccgccaacuucugcgcccugauccucgccuacugcaacaagaccgugggcgagcugggcgacguccgcgagaccauguccuaccuguuccagcacgcgaaccucgacagcugcaagcgggugcugaacgucgugugcaagaccugcgggcagcagcagaccacgcugaagggcguggaggccgucaucuacauggggacccucuccuacgagcaguucaagaagggcgugcagauccccugcaccugcgggaagcaggccaccaaguaccuggugcagcaggagagccccuucgucaugauguccgcccccccggcccaguacgagcugaagcacggcacguucaccugcgcgagcgaguacaccggcaacuaccagugcgggcacuacaagcacaucaccuccaaggagacgcucuacugcaucgacggcgcccugcugaccaagagcagcgaguacaaggggcccaucaccgacguguucuacaaggagaacuccuacaccacgaccaucaagcccgugaccuacaagcucgacggcgucgugugcaccgagaucgaccccaagcuggacaacuacuacaagaaggacaacagcuacuucacggagcagccgaucgaccuggugcccaaccagcccuaccccaacgccuccuucgacaacuucaaguucgucugcgacaacaucaaguucgccgacgaccucaaccagcugaccggguacaagaagccggccagccgcgagcugaaggugaccuucuuccccgaccucaacggcgacguggucgcgaucgacuacaagcacuacacccccuccuucaagaagggcgccaagcugcugcacaagcccaucguguggcacgugaacaacgccacgaacaaggccaccuacaagccgaacaccuggugcauccggugccucuggagcaccaagcccgucgagacguccaacagcuucgacgugcugaaguccgaggacgcgcaggggauggacaaccuggccugcgaggaccucaagcccgugagcgaggaggucguggagaaccccaccauccagaaggacgugcuggagugcaacgucaagaccaccgagguggugggcgacaucauccugaagccggccaacaacucccucaagaucacggaggaggucgggcacaccgaccugauggccgccuacguggacaacagcucccugaccaucaagaagcccaacgagcucagccgcgugcugggccugaagacccucgcgacgcacgggcuggccgccgucaacuccgugcccugggacaccaucgccaacuacgccaagccguuccugaacaagguggucagcaccaccacgaacaucgugacccgcugccucaaccgggugugcaccaacuacaugcccuacuucuucacccugcugcuccagcugugcaccuucacgcgcuccaccaacagccggaucaaggcguccaugcccaccaccaucgccaagaacacggucaagagcgugggcaaguucugccuggaggccagcuucaacuaccucaagucccccaacuucagcaagcugaucaacaucaucaucugguuccugcuccuguccgugugccugggcagccucaucuacuccaccgccgcccuggggguccugaugagcaaccucggcaugccguccuacugcaccggguaccgcgagggcuaccugaacagcaccaacgugacgaucgcgaccuacugcaccggcuccauccccugcagcgugugccuguccgggcucgacagccuggacaccuaccccucccuggagacgauccagaucaccaucagcuccuucaagugggaccucaccgccuucggccuggucgccgagugguuccuggccuacauccucuucacccgguucuucuacgugcuggggcuggccgcgaucaugcagcucuucuucagcuacuucgccgugcacuucaucuccaacagcuggcugauguggcugaucaucaaccugguccagauggcccccaucuccgccauggugcgcauguacaucuucuucgcgagcuucuacuacguguggaagagcuacguccacgugguggacggcugcaacuccagcacgugcaugaugugcuacaagcggaaccgcgccacccgggucgagugcaccaccaucgugaacgggguccgccgguccuucuacguguacgccaacggcggcaagggguucugcaagcuccacaacuggaacugcgugaacugcgacacguucugcgccggcagcaccuucaucuccgacgaggucgcccgcgaccugagccugcaguucaagcggccgaucaaccccaccgaccaguccagcuacaucguggacuccgugaccgucaagaacgggagcauccaccucuacuucgacaaggcgggccagaagacguacgagcgccacucccugagccacuucgugaaccuggacaaccuccgggccaacaacaccaaggggucccugcccaucaacgugaucgucuucgacggcaagagcaagugcgaggaguccagcgccaaguccgccagcguguacuacucccagcugaugugccagcccauccuccugcuggaccaggcccucgugagcgacgucggcgacagcgcggagguggccgugaagauguucgacgccuacgucaacaccuucuccagcaccuucaacgugccgauggagaagcugaagacgcugguggccaccgccgaggcggagcucgccaagaacgucucccuggacaacgugcugagcaccuucaucuccgccgcccgccagggguucguggacagcgacgucgagaccaaggacgugguggagugccucaagcugucccaccagagcgacaucgaggucacgggcgacuccugcaacaacuacaugcugaccuacaacaagguggagaacaugaccccccgggaccucggggcgugcaucgacugcagcgcccgccacaucaacgcccagguggccaagucccacaacaucgcccugaucuggaacgucaaggacuucaugagccuguccgagcagcuccggaagcagauccgcagcgcggccaagaagaacaaccugcccuucaagcugaccugcgccacgacccgccagguggugaacgucgugaccaccaagaucgcccucaagggcggguga

SEQ ID NO: 18112 - RNA, 5841 nt, Artificial Sequence
  SARS-CoV-2__MT510701.1__non-structural protein 3 (NSP3) CDS gc
auggcccccaccaaggugaccuucggcgacgacacggucaucgaggugcagggguacaagagcgugaacaucaccuucgagcuggacgagcgcaucgacaagguccucaacgagaagugcuccgccuacaccguggagcugggcaccgaggugaacgaguucgcgugcgucguggccgacgccgugaucaagacgcugcagccggucagcgagcuccugaccccccuggggaucgaccucgacgagugguccauggccaccuacuaccuguucgacgagagcggcgaguucaagcuggccucccacauguacugcagcuucuacccccccgacgaggacgaggaggagggggacugcgaggaggaggaguucgagccguccacccaguacgaguacggcacggaggacgacuaccagggcaagccccucgaguucggggcgaccagcgccgcccugcagcccgaggaggagcaggaggaggacuggcuggacgacgacucccagcagaccgugggccagcaggacgggagcgaggacaaccagaccacgaccauccagaccaucguggagguccagccccagcucgagauggagcugaccccgguggugcagacgaucgaggucaacuccuucagcggcuaccugaagcucaccgacaacguguacaucaagaacgccgacaucguggaggaggcgaagaaggucaagcccaccgugguggucaacgccgccaacguguaccugaagcacgggggcggcguggccggggcccugaacaaggcgaccaacaacgccaugcaggucgaguccgacgacuacaucgccacgaacggcccccucaagguggggggcagcugcguccuguccggccacaaccuggccaagcacugccuccacgugguggggcccaacgucaacaagggcgaggacauccagcugcugaagagcgccuacgagaacuucaaccagcacgaggugcuccuggcgccgcugcucuccgccgggaucuucggcgccgaccccauccacagccugcgggugugcgucgacaccgugcgcaccaacguguaccuggccgucuucgacaagaaccucuacgacaagcugguguccagcuuccuggagaugaagagcgagaagcagguggagcagaagaucgccgagauccccaaggaggaggucaagcccuucaucaccgaguccaagccgagcguggagcagcggaagcaggacgacaagaagaucaaggcgugcguggaggaggucacgaccacccucgaggagaccaaguuccugacggagaaccugcuccuguacaucgacaucaacgggaaccugcaccccgacuccgccacccucgugagcgacaucgacaucaccuuccugaagaaggacgcccccuacaucgugggcgacgucgugcaggagggcgugcugaccgccgucgugauccccacgaagaacgccgggggcaccaccgagaugcucgcgaaggcccugcgcaaggugccgaccgacaacuacaucacgaccuaccccgggcagggccugaacggguacaccgucgaggaggccaagaccgugcucaagaagugcaaguccgccuucuacauccugcccagcaucaucuccaacgagaagcaggagauccugggcaccgugagcuggaaccuccgggagaugcuggcgcacgccgaggagacgcgcaagcugaugcccgucugcguggagaccaaggccaucguguccaccauccagcggaaguacaagggcaucaagauccaggagggggucguggacuacggcgcccgcuucuacuucuacaccagcaagacgaccguggccucccugaucaacacccucaacgaccugaacgagacccuggucacgaugccgcucggguacgugacccacggccugaaccuggaggaggcggcccgguacaugcgcagccucaaggugcccgccaccgucuccgugagcucccccgacgccgugaccgccuacaacggguaccugacgagcuccagcaagacccccgaggagcacuucaucgagaccaucucccuggcgggcagcuacaaggacuggagcuacuccggccagagcacccagcucgggaucgaguuccugaagcggggcgacaaguccgucuacuacacgagcaacccgaccaccuuccaccuggacggggaggugaucaccuucgacaaccucaagacgcugcugucccuccgcgaggugcggaccaucaaggucuucaccaccguggacaacaucaaccugcacacgcagguggucgacaugagcaugaccuacggccagcaguucggccccaccuaccuggacggggccgacgugaccaagaucaagccccacaacucccacgagggcaagacguucuacgugcucccgaacgacgacacccugcgcgucgaggccuucgaguacuaccacaccaccgaccccagcuuccuggggcgguacauguccgcccucaaccacacgaagaacuggaaguacccccaggugaacggccugaccagcaucaagugggccgacaacaacugcuaccuggcgaccgcccuccugacccugcagcagaucgagcucaaguucaaccccccggcccugcaggacgccuacuaccgcgcgcgggccggggaggccgccaacuucugcgcccugauccucgcguacugcaacaagacggugggcgagcugggcgacguccgcgagaccauguccuaccuguuccagcacgccaaccucgacagcugcaagcgggugcugaacgucgugugcaagaccugcgggcagcagcagaccacccugaagggcguggaggccgucauguacauggggacgcucuccuacgagcaguucaagaagggcgugcagauccccugcaccugcgggaagcaggccaccaaguaccuggugcagcaggagagccccuucgucaugauguccgcccccccggcgcaguacgagcugaagcacggcaccuucacgugcgccagcgaguacaccggcaacuaccagugcgggcacuacaagcacaucaccuccaaggagacccucuacugcaucgacggcgcccugcugacgaagagcagcgaguacaaggggcccaucaccgacguguucuacaaggagaacuccuacaccaccacgaucaagcccgugaccuacaagcucgacggcgucgugugcaccgagaucgaccccaagcuggacaacuacuacaagaaggacaacagcuacuucaccgagcagccgaucgaccuggugcccaaccagcccuaccccaacgccuccuucgacaacuucaaguucgucugcgacaacaucaaguucgccgacgaccucaaccagcugacgggguacaagaagccggcgagccgcgagcugaaggugaccuucuuccccgaccucaacggcgacguggucgccaucgacuacaagcacuacacccccuccuucaagaagggcgccaagcugcugcacaagcccaucguguggcacgugaacaacgccaccaacaaggcgacguacaagccgaacaccuggugcauccggugccucuggagcaccaagcccgucgagaccuccaacagcuucgacgugcugaaguccgaggacgcccaggggauggacaaccuggccugcgaggaccucaagcccgugagcgaggaggucguggagaaccccacgauccagaaggacgugcuggagugcaacgucaagaccaccgagguggugggcgacaucauccugaagccggccaacaacucccucaagaucaccgaggaggucgggcacacggaccugauggccgcguacguggacaacagcucccugaccaucaagaagcccaacgagcucagccgcgugcugggccugaagacccucgccacccacgggcuggccgccgucaacuccgugcccugggacacgaucgccaacuacgcgaagccguuccugaacaagguggucagcaccaccaccaacaucgugacgcgcugccucaaccgggugugcaccaacuacaugcccuacuucuucacccugcugcuccagcugugcaccuucacccgcuccacgaacagccggaucaaggccuccaugcccaccaccaucgccaagaacaccgucaagagcgugggcaaguucugccuggaggccagcuucaacuaccucaagucccccaacuucagcaagcugaucaacaucaucaucugguuccugcuccuguccgugugccugggcagccucaucuacuccacggccgcgcuggggguccugaugagcaaccucggcaugccguccuacugcaccggguaccgcgagggcuaccugaacagcaccaacgugaccaucgccacguacugcaccggcuccauccccugcagcgugugccuguccgggcucgacagccuggacaccuaccccucccuggagaccauccagaucacgaucagcuccuucaagugggaccucaccgccuucggccuggucgccgagugguuccuggccuacauccucuucacccgguucuucuacgugcuggggcuggcggccaucaugcagcucuucuucagcuacuucgccgugcacuucaucuccaacagcuggcugauguggcugaucaucaaccugguccagauggcccccaucuccgcgauggugcgcauguacaucuucuucgccagcuucuacuacguguggaagagcuacguccacgugguggacggcugcaacuccagcaccugcaugaugugcuacaagcggaaccgcgccacgcgggucgagugcaccaccaucgugaacgggguccgccgguccuucuacguguacgccaacggcggcaagggguucugcaagcuccacaacuggaacugcgugaacugcgacaccuucugcgccggcagcacguucaucuccgacgaggucgcgcgcgaccugagccugcaguucaagcggccgaucaaccccaccgaccaguccagcuacaucguggacuccgugaccgucaagaacgggagcauccaccucuacuucgacaaggccggccagaagaccuacgagcgccacucccugagccacuucgugaaccuggacaaccuccgggccaacaacacgaaggggucccugcccaucaacgugaucgucuucgacggcaagagcaagugcgaggaguccagcgccaaguccgccagcguguacuacucccagcugaugugccagcccauccuccugcuggaccaggcgcucgugagcgacgucggcgacagcgccgagguggccgugaagauguucgacgccuacgucaacaccuucuccagcaccuucaacgugccgauggagaagcugaagacccugguggccacggcggaggccgagcucgccaagaacgucucccuggacaacgugcugagcaccuucaucuccgccgcgcgccagggguucguggacagcgacgucgagaccaaggacgugguggagugccucaagcugucccaccagagcgacaucgaggucaccggcgacuccugcaacaacuacaugcugacguacaacaagguggagaacaugaccccccgggaccucggggccugcaucgacugcagcgcccgccacaucaacgcccagguggccaagucccacaacaucgcgcugaucuggaacgucaaggacuucaugagccuguccgagcagcuccggaagcagauccgcagcgccgccaagaagaacaaccugcccuucaagcugaccugcgccaccacgcgccagguggugaacgucgugaccaccaagaucgcccucaagggcggguga

SEQ ID NO: 18113 - RNA, 5841 nt, Artificial Sequence
  SARS-CoV-2__MT607252.1__non-structural protein 3 (NSP3) CDS gc
auggcccccaccaaggugaccuucggcgacgacacggucaucgaggugcagggguacaagagcgugaacaucaccuucgagcuggacgagcgcaucgacaagguccucaacgagaagugcuccgccuacaccguggagcugggcaccgaggugaacgaguucgcgugcgucguggccgacgccgugaucaagacgcugcagccggucagcgagcuccugaccccccuggggaucgaccucgacgagugguccauggccaccuacuaccuguucgacgagagcggcgaguucaagcuggccucccacauguacugcagcuucuacccccccgacgaggacgaggaggagggggacugcgaggaggaggaguucgagccguccacccaguacgaguacggcacggaggacgacuaccagggcaagccccucgaguucggggcgaccagcgccgcccugcagcccgaggaggagcaggaggaggacuggcuggacgacgacucccagcagaccgugggccagcaggacgggagcgaggacaaccagaccacgaccauccagaccaucguggagguccagccccagcucgagauggagcugaccccgguggugcagacgaucgaggucaacuccuucagcggcuaccugaagcucaccgacaacguguacaucaagaacgccgacaucguggaggaggcgaagaaggucaagcccaccgugguggucaacgccgccaacguguaccugaagcacgggggcggcguggccggggcccugaacaaggcgaccaacaacgccaugcaggucgaguccgacgacuacaucgccacgaacggcccccucaagguggggggcagcugcguccuguccggccacaaccuggccaagcacugccuccacgugguggggcccaacgucaacaagggcgaggacauccagcugcugaagagcgccuacgagaacuucaaccagcacgaggugcuccuggcgccgcugcucuccgccgggaucuucggcgccgaccccauccacagccugcgggugugcgucgacaccgugcgcaccaacguguaccuggccgucuucgacaagaaccucuacgacaagcugguguccagcuuccuggagaugaagagcgagaagcagguggagcagaagaucgccgagauccccaaggaggaggucaagcccuucaucaccgaguccaagccgagcguggagcagcggaagcaggacgacaagaagaucaaggcgugcguggaggaggucacgaccacccucgaggagaccaaguuccugacggagaaccugcuccuguacaucgacaucaacgggaaccugcaccccgacuccgccacccucgugagcgacaucgacaucaccuuccugaagaaggacgcccccuacaucgugggcgacgucgugcaggagggcgugcugaccgccgucgugauccccacgaagaaggccgggggcaccaccgagaugcucgcgaaggcccugcgcaaggugccgaccgacaacuacaucacgaccuaccccgggcagggccugaacggguacaccgucgaggaggccaagaccgugcucaagaagugcaaguccgccuucuacauccugcccagcaucaucuccaacgagaagcaggagauccugggcaccgugagcuggaaccuccgggagaugcuggcgcacgccgaggagacgcgcaagcugaugcccgucugcguggagaccaaggccaucguguccaccauccagcggaaguacaagggcaucaagauccaggagggggucguggacuacggcgcccgcuucuacuucuacaccagcaagacgaccguggccucccugaucaacacccucaacgaccugaacgagacccuggucacgaugccgcucggguacgugacccacggccugaaccuggaggaggcggcccgguacaugcgcagccucaaggugcccgccaccgucuccgugagcucccccgacgccgugaccgccuacaacggguaccugacgagcuccagcaagacccccgaggagcacuucaucgagaccaucucccuggcgggcagcuacaaggacuggagcuacuccggccagagcacccagcucgggaucgaguuccugaagcggggcgacaaguccgucuacuacacgagcaacccgaccaccuuccaccuggacggggaggugaucaccuucgacaaccucaagacgcugcugucccuccgcgaggugcggaccaucaaggucuucaccaccguggacaacaucaaccugcacacgcagguggucgacaugagcaugaccuacggccagcaguucggccccaccuaccuggacggggccgacgugaccaagaucaagccccacaacucccacgagggcaagacguucuacgugcucccgaacgacgacacccugcgcgucgaggccuucgaguacuaccacaccaccgaccccagcuuccuggggcgguacauguccgcccucaaccacacgaagaaguggaaguacccccaggugaacggccugaccagcaucaagugggccgacaacaacugcuaccuggcgaccgcccuccugacccugcagcagaucgagcucaaguucaaccccccggcccugcaggacgccuacuaccgcgcgcgggccggggaggccgccaacuucugcgcccugauccucgcguacugcaacaagacggugggcgagcugggcgacguccgcgagaccauguccuaccuguuccagcacgccaaccucgacagcugcaagcgggugcugaacgucgugugcaagaccugcgggcagcagcagaccacccugaagggcguggaggccgucauguacauggggacgcucuccuacgagcaguucaagaagggcgugcagaucagcugcaccugcgggaagcaggccaccaaguaccuggugcagcaggagucccccuucgucaugaugagcgccccccccgcgcaguacgagcugaagcacggcaccuucacgugcgccuccgaguacaccggcaacuaccagugcgggcacuacaagcacaucaccagcaaggagacccucuacugcaucgacggcgcccugcugacgaagagcuccgaguacaaggggccgaucaccgacguguucuacaaggagaacagcuacaccaccacgaucaagcccgugaccuacaagcucgacggcgucgugugcaccgagaucgaccccaagcuggacaacuacuacaagaaggacaacuccuacuucaccgagcagcccaucgaccuggugccgaaccagcccuaccccaacgccagcuucgacaacuucaaguucgucugcgacaacaucaaguucgccgacgaccucaaccagcugacgggguacaagaagcccgcgucccgcgagcugaaggugaccuucuucccggaccucaacggcgacguggucgccaucgacuacaagcacuacacccccagcuucaagaagggcgccaagcugcugcacaagcccaucguguggcacgugaacaacgccaccaacaaggcgacguacaagcccaacaccuggugcauccggugccucugguccaccaagccggucgagaccagcaacuccuucgacgugcugaagagcgaggacgcccaggggauggacaaccuggccugcgaggaccucaagcccguguccgaggaggucguggagaaccccacgauccagaaggacgugcuggagugcaacgucaagaccaccgagguggugggcgacaucauccugaagcccgccaacaacagccucaagaucaccgaggaggucgggcacacggaccugauggccgcguacguggacaacuccagccugaccaucaagaagccgaacgagcucucccgcgugcugggccugaagacccucgccacccacgggcuggccgccgucaacagcgugcccugggacacgaucgccaacuacgcgaagcccuuccugaacaagguggucuccaccaccaccaacaucgugacgcgcugccucaaccgggugugcaccaacuacaugccguacuucuucacccugcugcuccagcugugcaccuucacccgcagcacgaacucccggaucaaggccagcaugcccaccaccaucgccaagaacaccgucaagagcgugggcaaguucugccuggaggccuccuucaacuaccucaagagccccaacuucuccaagcugaucaacaucaucaucugguuccugcuccugagcgugugccugggcucccucaucuacagcacggccgcgcuggggguccugauguccaaccucggcaugcccagcuacugcaccggguaccgcgagggcuaccugaacuccaccaacgugaccaucgccacguacugcaccggcagcaucccgugcuccgugugccugagcgggcucgacucccuggacaccuaccccagccuggagaccauccagaucacgaucuccagcuucaagugggaccucaccgccuucggccuggucgccgagugguuccuggccuacauccucuucacccgguucuucuacgugcuggggcuggcggccaucaugcagcucuucuucuccuacuucgccgugcacuucaucagcaacuccuggcugauguggcugaucaucaaccugguccagauggcccccaucagcgcgauggugcgcauguacaucuucuucgccagcuucuacuacguguggaaguccuacguccacgugguggacggcugcaacagcuccaccugcaugaugugcuacaagcggaaccgcgccacgcgggucgagugcaccaccaucgugaacgggguccgccggagcuucuacguguacgccaacggcggcaagggguucugcaagcuccacaacuggaacugcgugaacugcgacaccuucugcgccggcuccacguucaucagcgacgaggucgcgcgcgaccugucccugcaguucaagcggcccaucaacccgaccgaccagagcuccuacaucguggacagcgugaccgucaagaacggguccauccaccucuacuucgacaaggccggccagaagaccuacgagcgccacagccugucccacuucgugaaccuggacaaccuccgggccaacaacacgaaggggagccugcccaucaacgugaucgucuucgacggcaaguccaagugcgaggagagcuccgccaagagcgccuccguguacuacagccagcugaugugccagcccauccuccugcuggaccaggcgcucgugagcgacgucggcgacuccgccgagguggccgugaagauguucgacgccuacgucaacaccuucagcuccaccuucaacgugcccauggagaagcugaagacccugguggccacggcggaggccgagcucgccaagaacgucagccuggacaacgugcuguccaccuucaucagcgccgcgcgccagggguucguggacuccgacgucgagaccaaggacgugguggagugccucaagcugagccaccaguccgacaucgaggucaccggcgacagcugcaacaacuacaugcugacguacaacaagguggagaacaugaccccgcgggaccucggggccugcaucgacugcuccgcccgccacaucaacgcccagguggccaagagccacaacaucgcgcugaucuggaacgucaaggacuucaugucccugagcgagcagcuccggaagcagauccgcuccgccgccaagaagaacaaccugcccuucaagcugaccugcgccaccacgcgccagguggugaacgucgugaccaccaagaucgcccucaagggcggguga

SEQ ID NO: 18114 - RNA, 5841 nt, Artificial Sequence
  SARS-CoV-2__MT607602.1__non-structural protein 3 (NSP3) CDS gc
auggcccccaccaaggugaccuucggcgacgacacggucaucgaggugcagggguacaagagcgugaacaucaccuucgagcuggacgagcgcaucgacaagguccucaacgagaagugcuccgccuacaccguggagcugggcaccgaggugaacgaguucgcgugcgucguggccgacgccgugaucaagacgcugcagccggucagcgagcuccugaccccccuggggaucgaccucgacgagugguccauggccaccuacuaccuguucgacgagagcggcgaguucaagcuggccucccacauguacugcagcuucuacccccccgacgaggacgaggaggagggggacugcgaggaggaggaguucgagccguccacccaguacgaguacggcacggaggacgacuaccagggcaagccccucgaguucggggcgaccagcgccgcccugcagcccgaggaggagcaggaggaggacuggcuggacgacgacucccagcagaccgugggccagcaggacgggagcgaggacaaccagaccacgaccauccagaccaucguggagguccagccccagcucgagauggagcugaccccgguggugcagacgaucgaggucaacuccuucagcggcuaccugaagcucaccgacaacguguacaucaagaacgccgacaucguggaggaggcgaagaaggucaagcccaccgugguggucaacgccgccaacguguaccugaagcacgggggcggcguggccggggcccugaacaaggcgaccaacaacgccaugcaggucgaguccgacgacuacaucgccacgaacggcccccucaagguggggggcagcugcguccuguccggccacaaccuggccaagcacugccuccacgugguggggcccaacgucaacaagggcgaggacauccagcugcugaagagcgccuacgagaacuucaaccagcacgaggugcuccuggcgccgcugcucuccgccgggaucuucggcgccgaccccauccacagccugcgggugugcgucgacaccgugcgcaccaacguguaccuggccgucuucgacaagaaccucuacgacaagcugguguccagcuuccuggagaugaagagcgagaagcagguggagcagaagaucgccgagauccccaaggaggaggucaagcccuucaucaccgaguccaagccgagcguggagcagcggaagcaggacgacaagaagaucaaggcgugcguggaggaggucacgaccacccucgaggagaccaaguuccugacggagaaccugcuccuguacaucgacaucaacgggaaccugcaccccgacuccgccacccucgugagcgacaucgacaucaccuuccugaagaaggacgcccccuacaucgugggcgacgucgugcaggagggcgugcugaccgccgucgugauccccacgaagaaggccgggggcaccaccgagaugcucgcgaaggcccugcgcaaggugccgaccgacaacuacaucacgaccuaccccgggcagggccugaacggguacaccgucgaggaggccaagaccgugcucaagaagugcaaguccgccuucuacauccugcccagcaucaucuccaacgagaagcaggagauccugggcaccgugagcuggaaccuccgggagaugcuggcgcacgccgaggagacgcgcaagcugaugcccgucugcguggagaccaaggccaucguguccaccauccagcggaaguacaagggcaucaagauccaggagggggucguggacuacggcgcccgcuucuacuucuacaccagcaagacgaccguggccucccugaucaacacccucaacgaccugaacgagacccuggucacgaugccgcucggguacgugacccacggccugaaccuggaggaggcggcccgguacaugcgcagccucaaggugcccgccaccgucuccgugagcucccccgacgccgugaccgccuacaacggguaccugacgagcuccagcaagacccccgaggagcacuucaucgagaccaucucccuggcgggcagcuacaaggacuggagcuacuccggccagagcacccagcucgggaucgaguuccugaagcggggcgacaaguccgucuacuacacgagcaacccgaccaccuuccaccuggacggggaggugaucaccuucgacaaccucaagacgcugcugucccuccgcgaggugcggaccaucaaggucuucaccaccguggacaacaucaaccugcacacgcagguggucgacaugagcaugaccuacggccagcaguucggccccaccuaccuggacggggccgacgugaccaagaucaagccccacaacucccacgagggcaagacguucuacgugcucccgaacgacgacacccugcgcgucgaggccuucgaguacuaccacaccaccgaccccagcuuccuggggcgguacauguccgcccucaaccacacgaagaaguggaaguacccccaggugaacggccugaccagcaucaagugggccgacaacaacugcuaccuggcgaccgcccuccugacccugcagcagaucgagcucaaguucaaccccccggcccugcaggacgccuacuaccgcgcgcgggccggggaggccgccaacuucugcgcccugauccucgcguacugcaacaagacggugggcgagcugggcgacguccgcgagaccaugggguaccuguuccagcacgccaaccucgacuccugcaagcgggugcugaacgucgugugcaagaccugcggccagcagcagaccacccugaaggggguggaggccgucauguacaugggcacgcucagcuacgagcaguucaagaagggggugcagauccccugcaccugcggcaagcaggccaccaaguaccuggugcagcaggagucccccuucgucaugaugagcgcccccccggcgcaguacgagcugaagcacggcaccuucacgugcgccuccgaguacaccgggaacuaccagugcggccacuacaagcacaucaccagcaaggagacccucuacugcaucgacggggcccugcugacgaaguccagcgaguacaagggccccaucaccgacguguucuacaaggagaacagcuacaccaccacgaucaagcccgugaccuacaagcucgacggggucgugugcaccgagaucgaccccaagcuggacaacuacuacaagaaggacaacuccuacuucaccgagcagccgaucgaccuggugcccaaccagcccuaccccaacgccagcuucgacaacuucaaguucgucugcgacaacaucaaguucgccgacgaccucaaccagcugacgggcuacaagaagccggcgucccgcgagcugaaggugaccuucuuccccgaccucaacggcgacguggucgccaucgacuacaagcacuacacccccagcuucaagaagggggccaagcugcugcacaagcccaucguguggcacgugaacaacgccaccaacaaggcgacguacaagccgaacaccuggugcauccggugccucugguccaccaagcccgucgagaccagcaacuccuucgacgugcugaagagcgaggacgcccagggcauggacaaccuggccugcgaggaccucaagcccguguccgaggaggucguggagaaccccacgauccagaaggacgugcuggagugcaacgucaagaccaccgagguggugggggacaucauccugaagccggccaacaacagccucaagaucaccgaggaggucggccacacggaccugauggccgcguacguggacaacuccagccugaccaucaagaagcccaacgagcucucccgcgugcuggggcugaagacccucgccacccacggccuggccgccgucaacagcgugcccugggacacgaucgccaacuacgcgaagccguuccugaacaagguggucuccaccaccaccaacaucgugacgcgcugccucaaccgggugugcaccaacuacaugcccuacuucuucacccugcugcuccagcugugcaccuucacccgcagcacgaacucccggaucaaggccagcaugcccaccaccaucgccaagaacaccgucaaguccgugggcaaguucugccuggaggccagcuucaacuaccucaagagccccaacuucuccaagcugaucaacaucaucaucugguuccugcuccugagcgugugccuggggucccucaucuacagcacggccgcgcugggcguccugauguccaaccucgggaugccgagcuacugcaccggcuaccgcgagggcuaccugaacuccaccaacgugaccaucgccacguacugcaccgggagcauccccugcuccgugugccugagcggccucgacucccuggacaccuaccccagccuggagaccauccagaucacgaucuccagcuucaagugggaccucaccgccuucgggcuggucgccgagugguuccuggccuacauccucuucacccgguucuucuacgugcugggccuggcggccaucaugcagcucuucuucuccuacuucgccgugcacuucaucagcaacuccuggcugauguggcugaucaucaaccugguccagauggcccccaucagcgcgauggugcgcauguacaucuucuucgccuccuucuacuacguguggaagagcuacguccacgugguggacgggugcaacagcuccaccugcaugaugugcuacaagcggaaccgcgccacgcgggucgagugcaccaccaucgugaacggcguccgccggagcuucuacguguacgccaacggcgggaagggcuucugcaagcuccacaacuggaacugcgugaacugcgacaccuucugcgccggguccacguucaucagcgacgaggucgcgcgcgaccugucccugcaguucaagcggccgaucaaccccaccgaccagagcuccuacaucguggacagcgugaccgucaagaacggcuccauccaccucuacuucgacaaggccgggcagaagaccuacgagcgccacagccugucccacuucgugaaccuggacaaccuccgggccaacaacacgaagggcagccugcccaucaacgugaucgucuucgacggcaaguccaagugcgaggagagcuccgccaagagcgccuccguguacuacagccagcugaugugccagcccauccuccugcuggaccaggcgcucguguccgacgucggggacagcgccgagguggccgugaagauguucgacgccuacgucaacaccuucagcuccaccuucaacgugccgauggagaagcugaagacccugguggccacggcggaggccgagcucgccaagaacgucagccuggacaacgugcuguccaccuucaucagcgccgcgcgccagggcuucguggacuccgacgucgagaccaaggacgugguggagugccucaagcugagccaccaguccgacaucgaggucaccggggacagcugcaacaacuacaugcugacguacaacaagguggagaacaugaccccccgggaccucggcgccugcaucgacugcuccgcccgccacaucaacgcccagguggccaagagccacaacaucgcgcugaucuggaacgucaaggacuucaugucccugagcgagcagcuccggaagcagauccgcuccgccgccaagaagaacaaccugcccuucaagcugaccugcgccaccacgcgccagguggugaacgucgugaccaccaagaucgcccucaaggggggcuga

SEQ ID NO: 18115 - RNA, 5841 nt, Artificial Sequence
  SARS-CoV-2__MT607608.1__non-structural protein 3 (NSP3) CDS gc
auggcccccaccaaggugaccuucggcgacgacacggucaucgaggugcagggguacaagagcgugaacaucaccuucgagcuggacgagcgcaucgacaagguccucaacgagaagugcuccgccuacaccguggagcugggcaccgaggugaacgaguucgcgugcgucguggccgacgccgugaucaagacgcugcagccggucagcgagcuccugaccccccuggggaucgaccucgacgagugguccauggccaccuacuaccuguucgacgagagcggcgaguucaagcuggccucccacauguacugcagcuucuacccccccgacgaggacgaggaggagggggacugcgaggaggaggaguucgagccguccacccaguacgaguacggcacggaggacgacuaccagggcaagccccucgaguucggggcgaccagcgccgcccugcagcccgaggaggagcaggaggaggacuggcuggacgacgacucccagcagaccgugggccagcaggacgggagcgaggacaaccagaccacgaccauccagaccaucguggagguccagccccagcucgagauggagcugaccccgguggugcagacgaucgaggucaacuccuucagcggcuaccugaagcucaccgacaacguguacaucaagaacgccgacaucguggaggaggcgaagaaggucaagcccaccgugguggucaacgccgccaacguguaccugaagcacgggggcggcguggccggggcccugaacaaggcgaccaacaacgccaugcaggucgaguccgacgacuacaucgccacgaacggcccccucaagguggggggcagcugcguccuguccggccacaaccuggccaagcacugccuccacgugguggggcccaacgucaacaagggcgaggacauccagcugcugaagagcgccuacgagaacuucaaccagcacgaggugcuccuggcgccgcugcucuccgccgggaucuucggcgccgaccccauccacagccugcgggugugcgucgacaccgugcgcaccaacguguaccuggccgucuucgacaagaaccucuacgacaagcugguguccagcuuccuggagaugaagagcgagaagcagguggagcagaagaucgccgagauccccaaggaggaggucaagcccuucaucaccgaguccaagccgagcguggagcagcggaagcaggacgacaagaagaucaaggcgugcguggaggaggucacgaccacccucgaggagaccaaguuccugacggagaaccugcuccuguacaucgacaucaacgggaaccugcaccccgacuccgccacccucgugagcgacaucgacaucaccuuccugaagaaggacgcccccuacaucgugggcgacgucgugcaggagggcgugcugaccgccgucgugauccccacgaagaaggccgggggcaccaccgagaugcucgcgaaggcccugcgcaaggugccgaccgacaacuacaucacgaccuaccccgggcagggccugaacggguacaccgucgaggaggccaagaccgugcucaagaagugcaaguccgccuucuacauccugcccagcaucaucuccaacgagaagcaggagauccugggcaccgugagcuggaaccuccgggagaugcuggcgcacgccgaggagacgcgcaagcugaugcccgucugcguggagaccaaggccaucguguccaccauccagcggaaguacaagggcaucaagauccaggagggggucguggacuacggcgcccgcuucuacuucuacaccagcaagacgaccguggccucccugaucaacacccucaacgaccugaacgagacccuggucacgaugccgcucggguacgugacccacggccugaaccuggaggaggcggcccgguacaugcgcagccucaaggugcccgccaccgucuccgugagcucccccgacgccgugaccgccuacaacggguaccugacgagcuccagcaagacccccgaggagcacuucaucgagaccaucucccuggcgggcagcuacaaggacuggagcuacuccggccagagcacccagcucgggaucgaguuccugaagcggggcgacaaguccgucuacuacacgagcaacccgaccaccuuccaccuggacggggaggugaucaccuucgacaaccucaagacgcugcugucccuccgcgaggugcggaccaucaaggucuucaccaccguggacaacaucaaccugcacacgcagguggucgacaugagcaugaccuacggccagcaguucggccccaccuaccuggacggggccgacgugaccaagaucaagccccacaacucccacgagggcaagacguucuacgugcucccgaacgacgacacccugcgcgucgaggccuucgaguacuaccacaccaccgaccccagcuuccuggggcgguacauguccgcccucaaccacacgaagaaguggaaguacccccaggugaacggccugaccagcaucaagugggccgacaacaacugcuaccuggcgaccgcccuccugacccugcagcagaucgagcucaaguucaaccccccggcccugcaggacgccuacuaccgcgcgcgggccggggaggccgccaacuucugcgcccugauccucgcguacugcaacaagacggugggcgagcugggcgacguccgcgagaccauguccuaccuguuccagcacgccaaccucgacagcugcaagcgggugcugaacgucgugugcaagaccugcgggcagcagcagaccacccugaagggcguggaggccgucauguacauggggacgcucuccuacgagcaguucaagaagggcgugcagauccccugcaccugcgggaagcaggccaccaaguaccuggugcagcaggagagccccuucgucaugauguccgcccccccggcgcaguacgagcugaagcacggcaccuucacgugcgccagcgaguacaccggcaacuaccagugcgggcacuacaagcacaucaccuccaaggagacccucuacugcaucgacggcgcccugcugacgaagagcagcgaguacaaggggcccaucaccgacguguucuacaaggagaacuccuacaucaccaccaucaagcccgugacguacaagcucgacggcgucgugugcaccgagaucgaccccaagcuggacaacuacuacaagaaggacaacagcuacuucaccgagcagccgaucgaccuggugcccaaccagcccuaccccaacgccuccuucgacaacuucaaguucgucugcgacaacaucaaguucgccgacgaccucaaccagcugaccggguacaagaagccggcgagccgcgagcugaaggugacguucuuccccgaccucaacggcgacguggucgccaucgacuacaagcacuacacccccuccuucaagaagggcgccaagcugcugcacaagcccaucguguggcacgugaacaacgccaccaacaaggcgaccuacaagccgaacacguggugcauccggugccucuggagcaccaagcccgucgagaccuccaacagcuucgacgugcugaaguccgaggacgcccaggggauggacaaccuggccugcgaggaccucaagcccgugagcgaggaggucguggagaaccccaccauccagaaggacgugcuggagugcaacgucaagacgaccgagguggugggcgacaucauccugaagccggccaacaacucccucaagaucaccgaggaggucgggcacaccgaccugauggccgcguacguggacaacagcucccugacgaucaagaagcccaacgagcucagccgcgugcugggccugaagacccucgccacccacgggcuggccgccgucaacuccgugcccugggacaccaucgccaacuacgcgaagccguuccugaacaagguggucagcacgaccaccaacaucgugacccgcugccucaaccgggugugcacgaacuacaugcccuacuucuucacccugcugcuccagcugugcaccuucacccgcuccaccaacagccggaucaaggccuccaugcccacgaccaucgccaagaacaccgucaagagcgugggcaaguucugccuggaggccagcuucaacuaccucaagucccccaacuucagcaagcugaucaacaucaucaucugguuccugcuccuguccgugugccugggcagccucaucuacuccaccgccgcgcuggggguccugaugagcaaccucggcaugccguccuacugcacgggguaccgcgagggcuaccugaacagcaccaacgugaccaucgccaccuacugcacgggcuccauccccugcagcgugugccuguccgggcucgacagccuggacaccuaccccucccuggagaccauccagaucaccaucagcuccuucaagugggaccucacggccuucggccuggucgccgagugguuccuggccuacauccucuucacccgguucuucuacgugcuggggcuggcggccaucaugcagcucuucuucagcuacuucgccgugcacuucaucuccaacagcuggcugauguggcugaucaucaaccugguccagauggcccccaucuccgcgauggugcgcauguacaucuucuucgccagcuucuacuacguguggaagagcuacguccacgugguggacggcugcaacuccagcaccugcaugaugugcuacaagcggaaccgcgccacccgggucgagugcacgaccaucgugaacgggguccgccgguccuucuacguguacgccaacggcggcaagggguucugcaagcuccacaacuggaacugcgugaacugcgacaccuucugcgccggcagcaccuucaucuccgacgaggucgcgcgcgaccugagccugcaguucaagcggccgaucaaccccacggaccaguccagcuacaucguggacuccgugaccgucaagaacgggagcauccaccucuacuucgacaaggccggccagaagaccuacgagcgccacucccugagccacuucgugaaccuggacaaccuccgggccaacaacaccaaggggucccugcccaucaacgugaucgucuucgacggcaagagcaagugcgaggaguccagcgccaaguccgccagcguguacuacucccagcugaugugccagcccauccuccugcuggaccaggcgcucgugagcgacgucggcgacagcgccgagguggccgugaagauguucgacgccuacgucaacacguucuccagcaccuucaacgugccgauggagaagcugaagacccugguggccaccgcggaggccgagcucgccaagaacgucucccuggacaacgugcugagcacguucaucuccgccgcgcgccagggguucguggacagcgacgucgagaccaaggacgugguggagugccucaagcugucccaccagagcgacaucgaggucaccggcgacuccugcaacaacuacaugcugaccuacaacaagguggagaacaugacgccccgggaccucggggccugcaucgacugcagcgcccgccacaucaacgcccagguggccaagucccacaacaucgcgcugaucuggaacgucaaggacuucaugagccuguccgagcagcuccggaagcagauccgcagcgccgccaagaagaacaaccugcccuucaagcugaccugcgccaccacccgccagguggugaacgucgugacgaccaagaucgcccucaagggcggguga

SEQ ID NO: 18116 - RNA, 5841 nt, Artificial Sequence
  SARS-CoV-2__MT607614.1__non-structural protein 3 (NSP3) CDS gc
auggcccccaccaaggugaccuucggcgacgacacggucaucgaggugcagggguacaagagcgugaacaucaccuucgagcuggacgagcgcaucgacaagguccucaacgagaagugcuccgccuacaccguggagcugggcaccgaggugaacgaguucgcgugcgucguggccgacgccgugaucaagacgcugcagccggucagcgagcuccugaccccccuggggaucgaccucgacgagugguccauggccaccuacuaccuguucgacgagagcggcgaguucaagcuggccucccacauguacugcagcuucuacccccccgacgaggacgaggaggagggggacugcgaggaggaggaguucgagccguccacccaguacgaguacggcacggaggacgacuaccagggcaagccccucgaguucggggcgaccagcgccgcccugcagcccgaggaggagcaggaggaggacuggcuggacgacgacucccagcagaccgugggccagcaggacgggagcgaggacaaccagaccacgaccauccagaccaucguggagguccagccccagcucgagauggagcugaccccgguggugcagacgaucgaggucaacuccuucagcggcuaccugaagcucaccgacaacguguacaucaagaacgccgacaucguggaggaggcgaagaaggucaagcccaccgugguggucaacgccgccaacguguaccugaagcacgggggcggcguggccggggcccugaacaaggcgaccaacaacgccaugcaggucgaguccgacgacuacaucgccacgaacggcccccucaagguggggggcagcugcguccuguccggccacaaccuggccaagcacugccuccacgugguggggcccaacgucaacaagggcgaggacauccagcugcugaagagcgccuacgagaacuucaaccagcacgaggugcuccuggcgccgcugcucuccgccgggaucuucggcgccgaccccauccacagccugcgggugugcgucgacaccgugcgcaccaacguguaccuggccgucuucgacaagaaccucuacgacaagcugguguccagcuuccuggagaugaagagcgagaagcagguggagcagaagaucgccgagauccccaaggaggaggucaagcccuucaucaccgaguccaagccgagcguggagcagcggaagcaggacgacaagaagaucaaggcgugcguggaggaggucacgaccacccucgaggagaccaaguuccugacggagaaccugcuccuguacaucgacaucaacgggaaccugcaccccgacuccgccacccucgugagcgacaucgacaucaccuuccugaagaaggacgcccccuacaucgugggcgacgucgugcaggagggcgugcugaccgccgucgugauccccacgaagaaggccgggggcaccaccgagaugcucgcgaaggcccugcgcaaggugccgaccgacaacuacaucacgaccuaccccgggcagggccugaacggguacaccgucgaggaggccaagaccgugcucaagaagugcaaguccgccuucuacauccugcccagcaucaucuccaacgagaagcaggagauccugggcaccgugagcuggaaccuccgggagaugcuggcgcacgccgaggagacgcgcaagcugaugcccgucugcguggagaccaaggccaucguguccaccauccagcggaaguacaagggcaucaagauccaggagggggucguggacuacggcgcccgcuucuacuucuacaccagcaagacgaccguggccucccugaucaacacccucaacgaccugaacgagacccuggucacgaugccgcucggguacgugacccacggccugaaccuggaggaggcggcccgguacaugcgcagccucaaggugcccgccaccgucuccgugagcucccccgacgccgugaccgccuacaacggguaccugacgagcuccagcaagacccccgaggagcacuucaucgagaccaucucccuggcgggcagcuacaaggacuggagcuacuccggccagagcacccagcucgggaucgaguuccugaagcggggcgacaaguccgucuacuacacgagcaacccgaccaccuuccaccuggacggggaggugaccacguucgacaaccucaagacccugcugucccuccgcgaggugcggaccaucaaggucuucaccacgguggacaacaucaaccugcacacccagguggucgacaugagcaugaccuacggccagcaguucggccccaccuaccuggacggggccgacgugacgaagaucaagccccacaacucccacgagggcaagaccuucuacgugcucccgaacgacgacacccugcgcgucgaggccuucgaguacuaccacaccacggaccccagcuuccuggggcgguacauguccgcccucaaccacaccaagaaguggaaguacccccaggugaacggccugaccagcaucaagugggccgacaacaacugcuaccuggcgaccgcccuccugacgcugcagcagaucgagcucaaguucaaccccccggcccugcaggacgccuacuaccgcgcgcgggccggggaggccgccaacuucugcgcccugauccucgcguacugcaacaagaccgugggcgagcugggcgacguccgcgagaccauguccuaccuguuccagcacgccaaccucgacagcugcaagcgggugcugaacgucgugugcaagaccugcgggcagcagcagaccacgcugaagggcguggaggccgucauguacauggggacccucuccuacgagcaguucaagaagggcgugcagauccccugcaccugcgggaagcaggccaccaaguaccuggugcagcaggagagccccuucgucaugauguccgcccccccggcgcaguacgagcugaagcacggcacguucaccugcgccagcgaguacaccggcaacuaccagugcgggcacuacaagcacaucaccuccaaggagacgcucuacugcaucgacggcgcccugcugaccaagagcagcgaguacaaggggcccaucaccgacguguucuacaaggagaacuccuacaccacgaccaucaagcccgugaccuacaagcucgacggcgucgugugcaccgagaucgaccccaagcuggacaacuacuacaagaaggacaacagcuacuucacggagcagccgaucgaccuggugcccaaccagcccuaccccaacgccuccuucgacaacuucaaguucgucugcgacaacaucaaguucgccgacgaccucaaccagcugaccggguacaagaagccggcgagccgcgagcugaaggugaccuucuuccccgaccucaacggcgacguggucgccaucgacuacaagcacuacacccccuccuucaagaagggcgccaagcugcugcacaagcccaucguguggcacgugaacaacgccacgaacaaggcgaccuacaagccgaacaccuggugcauccggugccucuggagcaccaagcccgucgagacguccaacagcuucgacgugcugaaguccgaggacgcccaggggauggacaaccuggccugcgaggaccucaagcccgugagcgaggaggucguggagaaccccaccauccagaaggacgugcuggagugcaacgucaagaccaccgagguggugggcgacaucauccugaagccggccaacaacucccucaagaucacggaggaggucgggcacaccgaccugauggccgcguacguggacaacagcucccugaccaucaagaagcccaacgagcucagccgcgugcugggccugaagacccucgccacgcacgggcuggccgccgucaacuccgugcccugggacaccaucgccaacuacgcgaagccguuccugaacaagguggucagcaccaccacgaacaucgugacccgcugccucaaccgggugugcaccaacuacaugcccuacuucuucacccugcugcuccagcugugcaccuucacgcgcuccaccaacagccggaucaaggccuccaugcccaccaccaucgccaagaacacggucaagagcgugggcaaguucugccuggaggccagcuucaacuaccucaagucccccaacuucagcaagcugaucaacaucaucaucugguuccugcuccuguccgugugccugggcagccucaucuacuccaccgccgcgcuggggguccugaugagcaaccucggcaugccguccuacugcaccggguaccgcgagggcuaccugaacagcaccaacgugacgaucgccaccuacugcaccggcuccauccccugcagcgugugccuguccgggcucgacagccuggacaccuaccccucccuggagacgauccagaucaccaucagcuccuucaagugggaccucaccgccuucggccuggucgccgagugguuccuggccuacauccucuucacccgguucuucuacgugcuggggcuggcggccaucaugcagcucuucuucagcuacuucgccgugcacuucaucuccaacagcuggcugauguggcugaucaucaaccugguccagauggcccccaucuccgcgauggugcgcauguacaucuucuucgccagcuucuacuacguguggaagagcuacguccacgugguggacggcugcaacuccagcacgugcaugaugugcuacaagcggaaccgcgccacccgggucgagugcaccaccaucgugaacgggguccgccgguccuucuacguguacgccaacggcggcaagggguucugcaagcuccacaacuggaacugcgugaacugcgacacguucugcgccggcagcaccuucaucuccgacgaggucgcgcgcgaccugagccugcaguucaagcggccgaucaaccccaccgaccaguccagcuacaucguggacuccgugaccgucaagaacgggagcauccaccucuacuucgacaaggccggccagaagacguacgagcgccacucccugagccacuucgugaaccuggacaaccuccgggccaacaacaccaaggggucccugcccaucaacgugaucgucuucgacggcaagagcaagugcgaggaguccagcgccaaguccgccagcguguacuacucccagcugaugugccagcccauccuccugcuggaccaggcgcucgugagcgacgucggcgacagcgccgagguggccgugaagauguucgacgccuacgucaacaccuucuccagcaccuucaacgugccgauggagaagcugaagacgcugguggccaccgcggaggccgagcucgccaagaacgucucccuggacaacgugcugagcaccuucaucuccgccgcgcgccagggguucguggacagcgacgucgagaccaaggacgugguggagugccucaagcugucccaccagagcgacaucgaggucacgggcgacuccugcaacaacuacaugcugaccuacaacaagguggagaacaugaccccccgggaccucggggccugcaucgacugcagcgcccgccacaucaacgcccagguggccaagucccacaacaucgcgcugaucuggaacgucaaggacuucaugagccuguccgagcagcuccggaagcagauccgcagcgccgccaagaagaacaaccugcccuucaagcugaccugcgccacgacccgccagguggugaacgucgugaccaccaagaucgcccucaagggcggguga

SEQ ID NO: 18117 - RNA, 5841 nt, Artificial Sequence
  SARS-CoV-2__MT609570.1__non-structural protein 3 (NSP3) CDS gc
auggcccccaccaaggugaccuucggcgacgacacggucaucgaggugcagggguacaagagcgugaacaucaccuucgagcuggacgagcgcaucgacaagguccucaacgagaagugcuccgccuacaccguggagcugggcaccgaggugaacgaguucgcgugcgucguggccgacgccgugaucaagacgcugcagccggucagcgagcuccugaccccccuggggaucgaccucgacgagugguccauggccaccuacuaccuguucgacgagagcggcgaguucaagcuggccucccacauguacugcagcuucuacccccccgacgaggacgaggaggagggggacugcgaggaggaggaguucgagccguccacccaguacgaguacggcacggaggacgacuaccagggcaagccccucgaguucggggcgaccagcgccgcccugcagcccgaggaggagcaggaggaggacuggcuggacgacgacucccagcagaccgugggccagcaggacgggagcgaggacaaccagaccacgaccauccagaccaucguggagguccagccccagcucgagauggagcugaccccgguggugcagacgaucgaggucaacuccuucagcggcuaccugaagcucaccgacaacguguacaucaagaacgccgacaucguggaggaggcgaagaaggucaagcccaccgugguggucaacgccgccaacguguaccugaagcacgggggcggcguggccggggcccugaacaaggcgaccaacaacgccaugcaggucgaguccgacgacuacaucgccacgaacggcccccucaagguggggggcagcugcguccuguccggccacaaccuggccaagcacugccuccacgugguggggcccaacgucaacaagggcgaggacauccagcugcugaagagcgccuacgagaacuucaaccagcacgaggugcuccuggcgccgcugcucuccgccgggguguucggcgccgaccccauccacagccugcgggucugcguggacaccgugcgcaccaacgucuaccuggccguguucgacaagaaccucuacgacaagcugguguccagcuuccuggagaugaagagcgagaagcaggucgagcagaagaucgccgagauccccaaggaggaggugaagcccuucaucaccgaguccaagccgagcguggagcagcggaagcaggacgacaagaagaucaaggcgugcgucgaggaggugacgaccacccucgaggagaccaaguuccugacggagaaccugcuccuguacaucgacaucaacgggaaccugcaccccgacuccgccacccucgugagcgacaucgacaucaccuuccugaagaaggacgcccccuacaucgucggcgacguggugcaggagggcguccugaccgccguggugauccccacgaagaaggccgggggcaccaccgagaugcucgcgaaggcccugcgcaaggucccgaccgacaacuacaucacgaccuaccccgggcagggccugaacggguacaccguggaggaggccaagaccgugcucaagaagugcaaguccgccuucuacauccugcccagcaucaucuccaacgagaagcaggagauccugggcaccgucagcuggaaccuccgggagaugcuggcgcacgccgaggagacgcgcaagcugaugcccgugugcguggagaccaaggccaucgucuccaccauccagcggaaguacaagggcaucaagauccaggagggggugguggacuacggcgcccgcuucuacuucuacaccagcaagacgaccgucgccucccugaucaacacccucaacgaccugaacgagacccuggugacgaugccgcucggguacgugacccacggccugaaccuggaggaggcggcccgguacaugcgcagccucaagguccccgccaccguguccgugagcucccccgacgccgucaccgccuacaacggguaccugacgagcuccagcaagacccccgaggagcacuucaucgagaccaucucccuggcgggcagcuacaaggacuggagcuacuccggccagagcacccagcucgggaucgaguuccugaagcggggcgacaaguccguguacuacacgagcaacccgaccaccuuccaccuggacggggaggugaucaccuucgacaaccucaagacgcugcugucccuccgcgagguccggaccaucaagguguucaccaccguggacaacaucaaccugcacacgcaggucguggacaugagcaugaccuacggccagcaguucggccccaccuaccuggacggggccgacgugaccaagaucaagccccacaacucccacgagggcaagacguucuacguccucccgaacgacgacacccugcgcguggaggccuucgaguacuaccacaccaccgaccccagcuuccuggggcgguacauguccgcccucaaccacacgaagaaguggaaguacccccaggugaacggccugaccagcaucaagugggccgacaacaacugcuaccuggcgaccgcccuccugacccugcagcagaucgagcucaaguucaaccccccggcccugcaggacgccuacuaccgcgcgcgggccggggaggccgccaacuucugcgcccugauccucgcguacugcaacaagacggucggcgagcugggcgacgugcgcgagaccauguccuaccuguuccagcacgccaaccucgacagcugcaagcggguccugaacguggugugcaagaccugcgggcagcagcagaccacccugaagggcgucgaggccgugauguacauggggacgcucuccuacgagcaguucaagaagggcgugcagauccccugcaccugcgggaagcaggccaccaaguaccugguccagcaggagagccccuucgugaugauguccgcccccccggcgcaguacgagcugaagcacggcaccuucacgugcgccagcgaguacaccggcaacuaccagugcgggcacuacaagcacaucaccuccaaggagacccucuacugcaucgacggcgcccugcugacgaagagcagcgaguacaaggggcccaucaccgacguguucuacaaggagaacuccuacaccaccacgaucaagcccgucaccuacaagcucgacggcguggugugcaccgagaucgaccccaagcuggacaacuacuacaagaaggacaacagcuacuucaccgagcagccgaucgaccugguccccaaccagcccuaccccaacgccuccuucgacaacuucaaguucgugugcgacaacaucaaguucgccgacgaccucaaccagcugacgggguacaagaagccggcgagccgcgagcugaaggugaccuucuuccccgaccucaacggcgacgucguggccaucgacuacaagcacuacacccccuccuucaagaagggcgccaagcugcugcacaagcccaucguguggcacgucaacaacgccaccaacaaggcgacguacaagccgaacaccuggugcauccggugccucuggagcaccaagcccguggagaccuccaacagcuucgacgugcugaaguccgaggacgcccaggggauggacaaccuggccugcgaggaccucaagcccgucagcgaggaggugguggagaaccccacgauccagaaggacguccuggagugcaacgugaagaccaccgagguggucggcgacaucauccugaagccggccaacaacucccucaagaucaccgaggagguggggcacacggaccugauggccgcguacguggacaacagcucccugaccaucaagaagcccaacgagcucagccgcguccugggccugaagacccucgccacccacgggcuggccgccgugaacuccgugcccugggacacgaucgccaacuacgcgaagccguuccugaacaaggucgugagcaccaccaccaacaucgugacgcgcugccucaaccgggucugcaccaacuacaugcccuacuucuucacccugcugcuccagcugugcaccuucacccgcuccacgaacagccggaucaaggccuccaugcccaccaccaucgccaagaacaccgugaagagcgugggcaaguucugccuggaggccagcuucaacuaccucaagucccccaacuucagcaagcugaucaacaucaucaucugguuccugcuccuguccgucugccugggcagccucaucuacuccacggccgcgcugggggugcugaugagcaaccucggcaugccguccuacugcaccggguaccgcgagggcuaccugaacagcaccaacgugaccaucgccacguacugcaccggcuccauccccugcagcgucugccuguccgggcucgacagccuggacaccuaccccucccuggagaccauccagaucacgaucagcuccuucaagugggaccucaccgccuucggccugguggccgagugguuccuggccuacauccucuucacccgguucuucuacgugcuggggcuggcggccaucaugcagcucuucuucagcuacuucgccguccacuucaucuccaacagcuggcugauguggcugaucaucaaccuggugcagauggcccccaucuccgcgauggugcgcauguacaucuucuucgccagcuucuacuacgucuggaagagcuacgugcacguggucgacggcugcaacuccagcaccugcaugaugugcuacaagcggaaccgcgccacgcggguggagugcaccaccaucgucaacggggugcgccgguccuucuacguguacgccaacggcggcaagggguucugcaagcuccacaacuggaacugcgucaacugcgacaccuucugcgccggcagcacguucaucuccgacgagguggcgcgcgaccugagccugcaguucaagcggccgaucaaccccaccgaccaguccagcuacaucguggacuccgucaccgugaagaacgggagcauccaccucuacuucgacaaggccggccagaagaccuacgagcgccacucccugagccacuucgugaaccuggacaaccuccgggccaacaacacgaaggggucccugcccaucaacgucaucguguucgacggcaagagcaagugcgaggaguccagcgccaaguccgccagcguguacuacucccagcugaugugccagcccauccuccugcuggaccaggcgcucgucagcgacgugggcgacagcgccgagguggccgucaagauguucgacgccuacgugaacaccuucuccagcaccuucaacgugccgauggagaagcugaagacccuggucgccacggcggaggccgagcucgccaagaacgugucccuggacaacgugcugagcaccuucaucuccgccgcgcgccagggguucgucgacagcgacguggagaccaaggacguggucgagugccucaagcugucccaccagagcgacaucgaggugaccggcgacuccugcaacaacuacaugcugacguacaacaagguggagaacaugaccccccgggaccucggggccugcaucgacugcagcgcccgccacaucaacgcccaggucgccaagucccacaacaucgcgcugaucuggaacgugaaggacuucaugagccuguccgagcagcuccggaagcagauccgcagcgccgccaagaagaacaaccugcccuucaagcugaccugcgccaccacgcgccagguggucaacguggugaccaccaagaucgcccucaagggcggguga

SEQ ID NO: 18118 - RNA, 5841 nt, Artificial Sequence
  SARS-CoV-2__MT609593.1__non-structural protein 3 (NSP3) CDS gc
auggcccccaccaaggugaccuucggcgacgacacggucaucgaggugcagggguacaagagcgugaacaucaccuucgagcuggacgagcgcaucgacaagguccucaacgagaagugcuccgccuacaccguggagcugggcaccgaggugaacgaguucgcgugcgucguggccgacgccgugaucaagacgcugcagccggucagcgagcuccugaccccccuggggaucgaccucgacgagugguccauggccaccuacuaccuguucgacgagagcggcgaguucaagcuggccucccacauguacugcagcuucuacccccccgacgaggacgaggaggagggggacugcgaggaggaggaguucgagccguccacccaguacgaguacggcacggaggacgacuaccagggcaagccccucgaguucggggcgaccagcgccgcccugcagcccgaggaggagcaggaggaggacuggcuggacgacgacucccagcagaccgugggccagcaggacgggagcgaggacaaccagaccacgaccauccagaccaucguggagguccagccccagcucgagauggagcugaccccgguggugcagacgaucgaggucaacuccuucagcggcuaccugaagcucaccgacaacguguacaucaagaacgccgacaucguggaggaggcgaagaaggucaagcccaccgugguggucaacgccgccaacguguaccugaagcacgggggcggcguggccggggcccugaacaaggcgaccaacaacacgaugcaggucgaguccgacgacuacaucgccaccaacggcccccucaagguggggggcagcugcguccuguccggccacaaccuggccaagcacugccuccacgugguggggcccaacgucaacaagggcgaggacauccagcugcugaagagcgccuacgagaacuucaaccagcacgaggugcuccuggccccgcugcucuccgcggggaucuucggcgccgaccccauccacagccugcgggugugcgucgacaccgugcgcaccaacguguaccuggccgucuucgacaagaaccucuacgacaagcugguguccagcuuccuggagaugaagagcgagaagcagguggagcagaagaucgccgagauccccaaggaggaggucaagcccuucaucacggaguccaagccgagcguggagcagcggaagcaggacgacaagaagaucaaggccugcguggaggaggucaccaccacccucgaggagacgaaguuccugaccgagaaccugcuccuguacaucgacaucaacgggaaccugcaccccgacuccgcgacccucgugagcgacaucgacaucaccuuccugaagaaggacgcccccuacaucgugggcgacgucgugcaggagggcgugcugacggccgucgugauccccaccaagaaggccgggggcaccaccgagaugcucgccaaggcgcugcgcaaggugccgacggacaacuacaucaccaccuaccccgggcagggccugaacggguacaccgucgaggaggccaagaccgugcucaagaagugcaaguccgccuucuacauccugcccagcaucaucuccaacgagaagcaggagauccugggcacggugagcuggaaccuccgggagaugcuggcccacgcggaggagacccgcaagcugaugcccgucugcguggagaccaaggccaucguguccaccauccagcggaaguacaagggcaucaagauccaggagggggucguggacuacggcgcccgcuucuacuucuacacgagcaagaccaccguggccucccugaucaacacccucaacgaccugaacgagacgcuggucaccaugccgcucggguacgugacccacggccugaaccuggaggaggccgcgcgguacaugcgcagccucaaggugcccgccaccgucuccgugagcucccccgacgccgugacggccuacaacggguaccugaccagcuccagcaagacccccgaggagcacuucaucgagaccaucucccuggccggcagcuacaaggacuggagcuacuccggccagagcacgcagcucgggaucgaguuccugaagcggggcgacaaguccgucuacuacaccagcaacccgaccaccuuccaccuggacggggaggugaucacguucgacaaccucaagacccugcugucccuccgcgaggugcggaccaucaaggucuucaccacgguggacaacaucaaccugcacacccagguggucgacaugagcaugaccuacggccagcaguucggccccaccuaccuggacggggcggacgugacgaagaucaagccccacaacucccacgagggcaagaccuucuacgugcucccgaacgacgacacccugcgcgucgaggccuucgaguacuaccacaccacggaccccagcuuccuggggcgguacauguccgcccucaaccacaccaagaaguggaaguacccccaggugaacggccugaccagcaucaagugggccgacaacaacugcuaccuggccaccgcgcuccugacgcugcagcagaucgagcucaaguucaaccccccggcccugcaggacgccuacuaccgcgcccgggcgggggaggccgccaacuucugcgcccugauccucgccuacugcaacaagaccgugggcgagcugggcgacguccgcgagaccauguccuaccuguuccagcacgcgaaccucgacagcugcaagcgggugcugaacgucgugugcaagaccugcgggcagcagcagaccacgcugaagggcguggaggccgucauguacauggggacccucuccuacgagcaguucaagaagggcgugcagauccccugcaccugcgggaagcaggccaccaaguaccuggugcagcaggagagccccuucgucaugauguccgcccccccggcccaguacgagcugaagcacggcacguucaccugcgcgagcgaguacaccggcaacuaccagugcgggcacuacaagcacaucaccuccaaggagacgcucuacugcaucgacggcgcccugcugaccaagagcagcgaguacaaggggcccaucaccgacguguucuacaaggagaacuccuacaccacgaccaucaagcccgugaccuacaagcucgacggcgucgugugcaccgagaucgaccccaagcuggacaacuacuacaagaaggacaacagcuacuucacggagcagccgaucgaccuggugcccaaccagcccuaccccaacgccuccuucgacaacuucaaguucgucugcgacaacaucaaguucgccgacgaccucaaccagcugaccggguacaagaagccggccagccgcgagcugaaggugaccuucuuccccgaccucaacggcgacguggucgcgaucgacuacaagcacuacacccccuccuucaagaagggcgccaagcugcugcacaagcccaucguguggcacgugaacaacgccacgaacaaggccaccuacaagccgaacaccuggugcauccggugccucuggagcaccaagcccgucgagacguccaacagcuucgacgugcugaaguccgaggacgcgcaggggauggacaaccuggccugcgaggaccucaagcccgugagcgaggaggucguggagaaccccaccauccagaaggacgugcuggagugcaacgucaagaccaccgagguggugggcgacaucauccugaagccggccaacaacucccucaagaucacggaggaggucgggcacaccgaccugauggccgccuacguggacaacagcucccugaccaucaagaagcccaacgagcucagccgcgugcugggccugaagacccucgcgacgcacgggcuggccgccgucaacuccgugcccugggacaccaucgccaacuacgccaagccguuccugaacaagguggucagcaccaccacgaacaucgugacccgcugccucaaccgggugugcaccaacuacaugcccuacuucuucacccugcugcuccagcugugcaccuucacgcgcuccaccaacagccggaucaaggcguccaugcccaccaccaucgccaagaacacggucaagagcgugggcaaguucugccuggaggccagcuucaacuaccucaagucccccaacuucagcaagcugaucaacaucaucaucugguuccugcuccuguccgugugccugggcagccucaucuacuccaccgccgcccuggggguccugaugagcaaccucggcaugccguccuacugcaccggguaccgcgagggcuaccugaacagcaccaacgugacgaucgcgaccuacugcaccggcuccauccccugcagcgugugccuguccgggcucgacagccuggacaccuaccccucccuggagacgauccagaucaccaucagcuccuucaagugggaccucaccgccuucggccuggucgccgagugguuccuggccuacauccucuucacccgguucuucuacgugcuggggcuggccgcgaucaugcagcucuucuucagcuacuucgccgugcacuucaucuccaacagcuggcugauguggcugaucaucaaccugguccagauggcccccaucuccgccauggugcgcauguacaucuucuucgcgagcuucuacuacguguggaagagcuacguccacgugguggacggcugcaacuccagcacgugcaugaugugcuacaagcggaaccgcgccacccgggucgagugcaccaccaucgugaacgggguccgccgguccuucuacguguacgccaacggcggcaagggguucugcaagcuccacaacuggaacugcgugaacugcgacacguucugcgccggcagcaccuucaucuccgacgaggucgcccgcgaccugagccugcaguucaagcggccgaucaaccccaccgaccaguccagcuacaucguggacuccgugaccgucaagaacgggagcauccaccucuacuucgacaaggcgggccagaagacguacgagcgccacucccugagccacuucgugaaccuggacaaccuccgggccaacaacaccaaggggucccugcccaucaacgugaucgucuucgacggcaagagcaagugcgaggaguccagcgccaaguccgccagcguguacuacucccagcugaugugccagcccauccuccugcuggaccaggcccucgugagcgacgucggcgacagcgcggagguggccgugaagauguucgacgccuacgucaacaccuucuccagcaccuucaacgugccgauggagaagcugaagacgcugguggccaccgccgaggcggagcucgccaagaacgucucccuggacaacgugcugagcaccuucaucuccgccgcccgccagggguucguggacagcgacgucgagaccaaggacgugguggagugccucaagcugucccaccagagcgacaucgaggucacgggcgacuccugcaacaacuacaugcugaccuacaacaagguggagaacaugaccccccgggaccucggggcgugcaucgacugcagcgcccgccacaucaacgcccagguggccaagucccacaacaucgcccugaucuggaacgucaaggacuucaugagccuguccgagcagcuccggaagcagauccgcagcgcggccaagaagaacaaccugcccuucaagcugaccugcgccacgacccgccagguggugaacgucgugaccaccaagaucgcccucaagggcggguga

SEQ ID NO: 18119 - RNA, 5841 nt, Artificial Sequence
  SARS-CoV-2__MT609599.1__non-structural protein 3 (NSP3) CDS gc
auggcccccaccaaggugaccuucggcgacgacacggucaucgaggugcagggguacaagagcgugaacaucaccuucgagcuggacgagcgcaucgacaagguccucaacgagaagugcuccgccuacaccguggagcugggcaccgaggugaacgaguucgcgugcgucguggccgacgccgugaucaagacgcugcagccggucagcgagcuccugaccccccuggggaucgaccucgacgagugguccauggccaccuacuaccuguucgacgagagcggcgaguucaagcuggccucccacauguacugcagcuucuacccccccgacgaggacgaggaggagggggacugcgaggaggaggaguucgagccguccacccaguacgaguacggcacggaggacgacuaccagggcaagccccucgaguucggggcgaccagcgccgcccugcagcccgaggaggagcaggaggaggacuggcuggacgacgacucccagcagaccgugggccagcaggacgggagcgaggacaaccagaccacgaccauccagaccaucguggagguccagccccagcucgagauggagcugaccccgguggugcagacgaucgaggucaacuccuucagcggcuaccugaagcucaccgacaacguguacaucaagaacgccgacaucguggaggaggcgaagaaggucaagcccaccgugguggucaacgccgccaacguguaccugaagcacgggggcggcguggccggggcccugaacaaggcgaccaacaacgccaugcaggucgaguccgacgacuacaucgccacgaacggcccccucaagguggggggcagcugcguccuguccggccacaaccuggccaagcacugccuccacgugguggggcccaacgucaacaagggcgaggacauccagcugcugaagagcgccuacgagaacuucaaccagcacgaggugcuccuggcgccgcugcucuccgccgggaucuucggcgccgaccccauccacagccugcgggugugcgucgacaccgugcgcaccaacguguaccuggccgucuucgacaagaaccucuacgacaagcugguguccagcuuccuggagaugaagagcgagaagcagguggagcagaagaucgccgagauccccaaggaggaggucaagcccuucaucaccgaguccaagccgagcguggagcagcggaagcaggacgacaagaagaucaaggcgugcguggaggaggucacgaccacccucgaggagaccaaguuccugacggagaaccugcuccuguacaucgacaucaacgggaaccugcaccccgacuccgccacccucgugagcgacaucgacaucaccuuccugaagaaggacgcccccuacaucgugggcgacgucgugcaggagggcgugcugaccgccgucgugauccccacgaagaaggccgggggcaccaccgagaugcucgcgaaggcccugcgcaaggugccgaccgacaacuacaucacgaccuaccccgggcagggccugaacggguacaccgucgaggaggccaagaccgugcucaagaagugcaaguccgccuucuacauccugcccagcaucaucuccaacgagaagcaggagauccugggcaccgugagcuggaaccuccgggagaugcuggcgcacgccgaggagacgcgcaagcugaugcccgucugcguggagaccaaggccaucguguccaccauccagcggaaguacaagggcaucaagauccaggagggggucguggacuacggcgcccgcuucuacuucuacaccagcaagacgaccguggccucccugaucaacacccucaacgaccugaacgagacccuggucacgaugccgcucggguacgugacccacggccugaaccuggaggaggcggcccgguacaugcgcagccucaaggugcccgccaccgucuccgugagcucccccgacgccgugaccgccuacaacggguaccugacgagcuccagcaagacccccgaggagcacuucaucgagaccaucucccuggcgggcagcuacaaggacuggagcuacuccggccagagcacccagcucgggaucgaguuccugaagcggggcgacaaguccgucuacuacacgagcaacccgaccaccuuccaccuggacggggaggugaucaccuucgacaaccucaagacgcugcugucccuccgcgaggugcggaccaucaaggucuucaccaccguggacaacaucaaccugcacacgcagguggucgacaugagcaugaccuacggccagcaguucggccccaccuaccuggacggggccgacgugaccaagaucaagccccacaacucccacgagggcaagacguucuacgugcucccgaacgacgacacccugcgcgucgaggccuucgaguacuaccacaccaccgaccccagcuuccuggggcgguacauguccgcccucaaccacacgaagaaguggaaguacccccaggugaacggccugaccagcaucaagugggccgacaacaacugcuaccuggcgaccgcccuccugacccugcagcagaucgagcucaaguucaaccccccggcccugcaggacgccuacuaccgcgcgcgggccggggaggccgccaacuucugcgcccugauccucgcguacugcaacaagacggugggcgagcugggcgacguccgcgagaccauguccuaccuguuccagcacgccaaccucgacagcugcaagcgggugcugaacgucgugugcaagaccugcgggcagcagcagaccacccugaagggcguggaggccgucauguacauggggacgcucuccuacgagcaguucaagaagggcgugcagauccccugcaccugcgggaagcaggccaccaaguaccuggugcagcaggagagccccuucgucaugauguccgcccccccggcgcaguacgagcugaagcacggcaccuucacgugcgccagcgaguacaccggcaacuaccagugcgggcacuacaagcacaucaccuccaaggagacccucuacugcaucgacggcgcccugcugacgaagagcagcgaguacaaggggcccaucaccgacguguucuacaaggagaacuccuacaccaccacgaucaagcccgugaccuacaagcucgacggcgucgugugcaccgagaucgaccccaagcuggacaacuacuacaagaaggacaacagcuacuucaccgagcagccgaucgaccuggugcccaaccagcccuaccccaacgccuccuucgacaacuucaaguucgucugcgacaacaucaaguucgccgacgaccucaaccagcugacgggguacaagaagccggcgagccgcgagcugaaggugaccuucuuccccgaccucaacggcgacguggucgccaucgacuacaagcacuacacccccuccuucaagaagggcgccaagcugcugcacaagcccaucguguggcacgugaacaacgccaccaacaaggcgacguacaagccgaacaccuggugcauccggugccucuggagcaccaagcccgucgagaccuccaacagcuucgacgugcugaaguccgaggacgcccaggggauggacaaccuggccugcgaggaccucaagcccgugagcgaggaggucguggagaaccccacgauccagaaggacgugcuggagugcaacgucaagaccaccgagguggugggcgacaucauccugaagccggccaacaacauccucaagaucaccgaggaggucgggcacacggaccugauggccgcguacguggacaacuccagccugaccaucaagaagcccaacgagcucucccgcgugcugggccugaagacccucgccacccacgggcuggccgccgucaacagcgugcccugggacacgaucgccaacuacgcgaagccguuccugaacaagguggucuccaccaccaccaacaucgugacgcgcugccucaaccgggugugcaccaacuacaugcccuacuucuucacccugcugcuccagcugugcaccuucacccgcagcacgaacucccggaucaaggccagcaugcccaccaccaucgccaagaacaccgucaaguccgugggcaaguucugccuggaggccagcuucaacuaccucaagagccccaacuucuccaagcugaucaacaucaucaucugguuccugcuccugagcgugugccugggcucccucaucuacagcacggccgcgcuggggguccugauguccaaccucggcaugccgagcuacugcaccggguaccgcgagggcuaccugaacuccaccaacgugaccaucgccacguacugcaccggcagcauccccugcuccgugugccugagcgggcucgacucccuggacaccuaccccagccuggagaccauccagaucacgaucuccagcuucaagugggaccucaccgccuucggccuggucgccgagugguuccuggccuacauccucuucacccgguucuucuacgugcuggggcuggcggccaucaugcagcucuucuucuccuacuucgccgugcacuucaucagcaacuccuggcugauguggcugaucaucaaccugguccagauggcccccaucagcgcgauggugcgcauguacaucuucuucgccuccuucuacuacguguggaagagcuacguccacgugguggacggcugcaacagcuccaccugcaugaugugcuacaagcggaaccgcgccacgcgggucgagugcaccaccaucgugaacgggguccgccggagcuucuacguguacgccaacggcggcaagggguucugcaagcuccacaacuggaacugcgugaacugcgacaccuucugcgccggcuccacguucaucagcgacgaggucgcgcgcgaccugucccugcaguucaagcggccgaucaaccccaccgaccagagcuccuacaucguggacagcgugaccgucaagaacggguccauccaccucuacuucgacaaggccggccagaagaccuacgagcgccacagccugucccacuucgugaaccuggacaaccuccgggccaacaacacgaaggggagccugcccaucaacgugaucgucuucgacggcaaguccaagugcgaggagagcuccgccaagagcgccuccguguacuacagccagcugaugugccagcccauccuccugcuggaccaggcgcucguguccgacgucggcgacagcgccgagguggccgugaagauguucgacgccuacgucaacaccuucagcuccaccuucaacgugccgauggagaagcugaagacccugguggccacggcggaggccgagcucgccaagaacgucagccuggacaacgugcuguccaccuucaucagcgccgcgcgccagggguucguggacuccgacgucgagaccaaggacgugguggagugccucaagcugagccaccaguccgacaucgaggucaccggcgacagcugcaacaacuacaugcugacguacaacaagguggagaacaugaccccccgggaccucggggccugcaucgacugcuccgcccgccacaucaacgcccagguggccaagagccacaacaucgcgcugaucuggaacgucaaggacuucaugucccugagcgagcagcuccggaagcagauccgcuccgccgccaagaagaacaaccugcccuucaagcugaccugcgccaccacgcgccagguggugaacgucgugaccaccaagaucgcccucaagggcggguga

SEQ ID NO: 18120 - RNA, 5841 nt, Artificial Sequence
  SARS-CoV-2__MT612115.1__non-structural protein 3 (NSP3) CDS gc
auggcccccaccaaggugaccuucggcgacgacacggucaucgaggugcagggguacaagagcgugaacaucaccuucgagcuggacgagcgcaucgacaagguccucaacgagaagugcuccgccuacaccguggagcugggcaccgaggugaacgaguucgcgugcgucguggccgacgccgugaucaagacgcugcagccggucagcgagcuccugaccccccuggggaucgaccucgacgagugguccauggccaccuacuaccuguucgacgagagcggcgaguucaagcuggccucccacauguacugcagcuucuacccccccgacgaggacgaggaggagggggacugcgaggaggaggaguucgagccguccacccaguacgaguacggcacggaggacgacuaccagggcaagccccucgaguucggggcgaccagcgccgcccugcagcccgaggaggagcaggaggaggacuggcuggacgacgacucccagcagaccgugggccagcaggacgggagcgaggacaaccagaccaucacgauccagaccaucguggagguccagccccagcucgagauggagcugaccccgguggugcagaccaucgaggucaacuccuucagcggcuaccugaagcucacggacaacguguacaucaagaacgccgacaucguggaggaggcgaagaaggucaagcccaccgugguggucaacgccgccaacguguaccugaagcacgggggcggcguggccggggcccugaacaaggcgaccaacaacgccaugcaggucgaguccgacgacuacaucgccaccaacggcccccucaagguggggggcagcugcguccuguccggccacaaccuggccaagcacugccuccacgugguggggcccaacgucaacaagggcgaggacauccagcugcugaagagcgccuacgagaacuucaaccagcacgaggugcuccuggcgccgcugcucuccgccgggaucuucggcgccgaccccauccacagccugcgggugugcgucgacacggugcgcaccaacguguaccuggccgucuucgacaagaaccucuacgacaagcugguguccagcuuccuggagaugaagagcgagaagcagguggagcagaagaucgccgagauccccaaggaggaggucaagcccuucaucaccgaguccaagccgagcguggagcagcggaagcaggacgacaagaagaucaaggcgugcguggaggaggucaccacgacccucgaggagaucaaguuccugaccgagaaccugcuccuguacaucgacaucaacgggaaccugcaccccgacuccgccacccucgugagcgacaucgacaucacguuccugaagaaggacgcccccuacaucgugggcgacgucgugcaggagggcgugcugaccgccgucgugauccccaccaagaaggccgggggcaccacggagaugcucgcgaaggcccugcgcaaggugccgaccgacaacuacaucaccaccuaccccgggcagggccugaacggguacacggucgaggaggccaagaccgugcucaagaagugcaaguccgccuucuacauccugcccagcaucaucuccaacgagaagcaggagauccugggcaccgugagcuggaaccuccgggagaugcuggcgcacgccgaggagacccgcaagcugaugcccgucugcguggagaccaaggccaucguguccacgauccagcggaaguacaagggcaucaagauccaggagggggucguggacuacggcgcccgcuucuacuucuacaccagcaagaccaccguggccucccugaucaacacgcucaacgaccugaacgagacccuggucaccaugccgcucggguacgugacccacggccugaaccuggaggaggcggcccgguacaugcgcagccucaaggugcccgccacggucuccgugagcucccccgacgccgugaccgccuacaacggguaccugaccagcuccagcaagacccccgaggagcacuucaucgagacgaucucccuggcgggcagcuacaaggacuggagcuacuccggccagagcacccagcucgggaucgaguuccugaagcggggcgacaaguccgucuacuacaccagcaacccgaccacguuccaccuggacggggaggugaucaccuucgacaaccucaagacccugcugucccuccgcgaggugcggaccaucaaggucuucacgaccguggacaacaucaaccugcacacccagguggucgacaugagcaugaccuacggccagcaguucggccccacguaccuggacggggccgacgugaccaagaucaagccccacaacucccacgagggcaagaccuucuacgugcucccgaacgacgacacccugcgcgucgaggccuucgaguacuaccacacgaccgaccccagcuuccuggggcgguacauguccgcccucaaccacaccaagaaguggaaguacccccaggugaacggccugaccagcaucaagugggccgacaacaacugcuaccuggcgacggcccuccugacccugcagcagaucgagcucaaguucaaccccccggcccugcaggacgccuacuaccgcgcgcgggccggggaggccgccaacuucugcgcccugauccucgcguacugcaacaagaccgugggcgagcugggcgacguccgcgagaccauguccuaccuguuccagcacgccaaccucgacagcugcaagcgggugcugaacgucgugugcaagacgugcgggcagcagcagaccacccugaagggcguggaggccgucauguacauggggacccucuccuacgagcaguucaagaagggcgugcagauccccugcaccugcgggaagcaggccacgaaguaccuggugcagcaggagagccccuucgucaugauguccgcccccccggcgcaguacgagcugaagcacggcaccuucaccugcgccagcgaguacaccggcaacuaccagugcgggcacuacaagcacaucacguccaaggagacccucuacugcaucgacggcgcccugcugaccaagagcagcgaguacaaggggcccaucaccgacguguucuacaaggagaacuccuacacgaccaccaucaagcccgugaccuacaagcucgacggcgucgugugcacggagaucgaccccaagcuggacaacuacuacaagaaggacaacagcuacuucaccgagcagccgaucgaccuggugcccaaccagcccuaccccaacgccuccuucgacaacuucaaguucgucugcgacaacaucaaguucgccgacgaccucaaccagcugaccggguacaagaagccggcgagccgcgagcugaaggugaccuucuuccccgaccucaacggcgacguggucgccaucgacuacaagcacuacacgcccuccuucaagaagggcgccaagcugcugcacaagcccaucguguggcacgugaacaacgccaccaacaaggcgaccuacaagccgaacaccuggugcauccggugccucuggagcacgaagcccgucgagaccuccaacagcuucgacgugcugaaguccgaggacgcccaggggauggacaaccuggccugcgaggaccucaagcccgugagcgaggaggucguggagaaccccaccauccagaaggacgugcuggagugcaacgucaagaccacggagguggugggcgacaucauccugaagccggccaacaacucccucaagaucaccgaggaggucgggcacaccgaccugauggccgcguacguggacaacagcucccugaccaucaagaagcccaacgagcucagccgcgugcugggccugaagacgcucgccacccacgggcuggccgccgucaacuccgugcccugggacaccaucgccaacuacgcgaagccguuccugaacaagguggucagcaccacgaccaacaucgugacccgcugccucaaccgggugugcaccaacuacaugcccuacuucuucacgcugcugcuccagcugugcaccuucacccgcuccaccaacagccggaucaaggccuccaugcccaccacgaucgccaagaacaccgucaagagcgugggcaaguucugccuggaggccagcuucaacuaccucaagucccccaacuucagcaagcugaucaacaucaucaucugguuccugcuccuguccgugugccugggcagccucaucuacuccaccgccgcgcuggggguccugaugagcaaccucggcaugccguccuacugcaccggguaccgcgagggcuaccugaacagcacgaacgugaccaucgccaccuacugcaccggcuccauccccugcagcgugugccuguccgggcucgacagccuggacacguaccccucccuggagaccauccagaucaccaucagcuccuucaagugggaccucaccgccuucggccuggucgccgagugguuccuggccuacauccucuucacgcgguucuucuacgugcuggggcuggcggccaucaugcagcucuucuucagcuacuucgccgugcacuucaucuccaacagcuggcugauguggcugaucaucaaccugguccagauggcccccaucuccgcgauggugcgcauguacaucuucuucgccagcuucuacuacguguggaagagcuacguccacgugguggacggcugcaacuccagcaccugcaugaugugcuacaagcggaaccgcgccacccgggucgagugcaccacgaucgugaacgggguccgccgguccuucuacguguacgccaacggcggcaagggguucugcaagcuccacaacuggaacugcgugaacugcgacaccuucugcgccggcagcaccuucaucuccgacgaggucgcgcgcgaccugagccugcaguucaagcggccgaucaaccccaccgaccaguccagcuacaucguggacuccgugacggucaagaacgggagcauccaccucuacuucgacaaggccggccagaagaccuacgagcgccacucccugagccacuucgugaaccuggacaaccuccgggccaacaacaccaaggggucccugcccaucaacgugaucgucuucgacggcaagagcaagugcgaggaguccagcgccaaguccgccagcguguacuacucccagcugaugugccagcccauccuccugcuggaccaggcgcucgugagcgacgucggcgacagcgccgagguggccgugaagauguucgacgccuacgucaacaccuucuccagcacguucaacgugccgauggagaagcugaagacccugguggccaccgcggaggccgagcucgccaagaacgucucccuggacaacgugcugagcaccuucaucuccgccgcgcgccagggguucguggacagcgacgucgagacgaaggacgugguggagugccucaagcugucccaccagagcgacaucgaggucaccggcgacuccugcaacaacuacaugcugaccuacaacaagguggagaacaugaccccccgggaccucggggccugcaucgacugcagcgcccgccacaucaacgcccagguggccaagucccacaacaucgcgcugaucuggaacgucaaggacuucaugagccuguccgagcagcuccggaagcagauccgcagcgccgccaagaagaacaaccugcccuucaagcugacgugcgccaccacccgccagguggugaacgucgugaccacgaagaucgcccucaagggcggguga

SEQ ID NO: 18121 - RNA, 5841 nt, Artificial Sequence
  SARS-CoV-2__MT601281.1__non-structural protein 3 (NSP3) CDS gc
auggcccccaccaaggugaccuucggcgacgacacggucaucgaggugcagggguacaagagcgugaacaucaccuucgagcuggacgagcgcaucgacaagguccucaacgagaagugcuccgccuacaccguggagcugggcaccgaggugaacgaguucgcgugcgucguggccgacgccgugaucaagacgcugcagccggucagcgagcuccugaccccccuggggaucgaccucgacgagugguccauggccaccuacuaccuguucgacgagagcggcgaguucaagcuggccucccacauguacugcagcuucuacccccccgacgaggacgaggaggagggggacugcgaggaggaggaguucgagccguccacccaguacgaguacggcacggaggacgacuaccagggcaagccccucgaguucggggcgaccagcgccgcccugcagcccgaggaggagcaggaggaggacuggcuggacgacgacucccagcagaccgugggccagcaggacgggagcgaggacaaccagaccacgaccauccagaccaucguggagguccagccccagcucgagauggagcugaccccgguggugcagacgaucgaggucaacuccuucagcggcuaccugaagcucaccgacaacguguacaucaagaacgccgacaucguggaggaggcgaagaaggucaagcccaccgugguggucaacgccgccaacguguaccugaagcacgggggcggcguggccggggcccugaacaaggcgaccaacaacgccaugcaggucgaguccgacgacuacaucgccacgaacggcccccucaagguggggggcagcugcguccuguccggccacaaccuggccaagcacugccuccacgugguggggcccaacgucaacaagggcgaggacauccagcugcugaagagcgccuacgagaacuucaaccagcacgaggugcuccuggcgccgcugcucuccgccgggaucuucggcgccgaccccauccacagccugcgggugugcgucgacaccgugcgcaccaacguguaccuggccgucuucgacaagaaccucuacgacaagcugguguccagcuuccuggagaugaagagcgagaagcagguggagcagaagaucgccgagauccccaaggaggaggucaagcccuucaucaccgaguccaagccgagcguggagcagcggaagcaggacgacaagaagaucaaggcgugcguggaggaggucacgaccacccucgaggagaccaaguuccugacggagaaccugcuccuguacaucgacaucaacgggaaccugcaccccgacuccgccacccucgugagcgacaucgacaucaccuuccugaagaaggacgcccccuacaucgugggcgacgucgugcaggagggcgugcugaccgccgucgugauccccacgaagaaggccgggggcaccaccgagaugcucgcgaaggcccugcgcaaggugccgaccgacaacuacaucacgaccuaccccgggcagggccugaacggguacaccgucgaggaggccaagaccgugcucaagaagugcaaguccgccuucuacauccugcccagcaucaucuccaacgagaagcaggagauccugggcaccgugagcuggaaccuccgggagaugcuggcgcacgccgaggagacgcgcaagcugaugcccgucugcguggagaccaaggccaucguguccaccauccagcggaaguacaagggcaucaagauccaggagggggucguggacuacggcagccgcuucuacuucuacaccuccaagacgaccguggccagccugaucaacacccucaacgaccugaacgagacccuggucacgaugccgcucggguacgugacccacggccugaaccuggaggaggccgcgcgguacaugcgcucccucaaggugcccgccaccgucagcguguccagccccgacgccgugaccgccuacaacggguaccugacguccagcuccaagacccccgaggagcacuucaucgagaccaucagccuggccggcagcuacaaggacugguccuacagcggccaguccacccagcucgggaucgaguuccugaagcggggcgacaagagcgucuacuacacguccaacccgaccaccuuccaccuggacggggaggugaucaccuucgacaaccucaagacgcugcugagccuccgcgaggugcggaccaucaaggucuucaccaccguggacaacaucaaccugcacacgcagguggucgacauguccaugaccuacggccagcaguucggccccaccuaccuggacggggcggacgugaccaagaucaagccccacaacagccacgagggcaagacguucuacgugcucccgaacgacgacacccugcgcgucgaggccuucgaguacuaccacaccaccgaccccuccuuccuggggcgguacaugagcgcccucaaccacacgaagaaguggaaguacccccaggugaacggccugaccuccaucaagugggccgacaacaacugcuaccuggccaccgcgcuccugacccugcagcagaucgagcucaaguucaaccccccggcccugcaggacgccuacuaccgcgcccgggcgggggaggccgccaacuucugcgcccugauccucgccuacugcaacaagacggugggcgagcugggcgacguccgcgagaccaugagcuaccuguuccagcacgcgaaccucgacuccugcaagcgggugcugaacgucgugugcaagaccugcgggcagcagcagaccacccugaagggcguggaggccgucauguacauggggacgcucagcuacgagcaguucaagaagggcgugcagauccccugcaccugcgggaagcaggccaccaaguaccuggugcagcaggagucccccuucgucaugaugagcgcccccccggcccaguacgagcugaagcacggcaccuucacgugcgcguccgaguacaccggcaacuaccagugcgggcacuacaagcacaucaccagcaaggagacccucuacugcaucgacggcgcccugcugacgaagagcuccgaguacaaggggcccaucaccgacguguucuacaaggagaacagcuacaccaccacgaucaagcccgugaccuacaagcucgacggcgucgugugcaccgagaucgaccccaagcuggacaacuacuacaagaaggacaacuccuacuucaccgagcagccgaucgaccuggugcccaaccagcccuaccccaacgccagcuucgacaacuucaaguucgucugcgacaacaucaaguucgccgacgaccucaaccagcugacgggguacaagaagccggccucccgcgagcugaaggugaccuucuuccccgaccucaacggcgacguggucgcgaucgacuacaagcacuacacccccagcuucaagaagggcgccaagcugcugcacaagcccaucguguggcacgugaacaacgccaccaacaaggccacguacaagccgaacaccuggugcauccggugccucugguccaccaagcccgucgagaccagcaacuccuucgacgugcugaagagcgaggacgcgcaggggauggacaaccuggccugcgaggaccucaagcccguguccgaggaggucguggagaaccccacgauccagaaggacgugcuggagugcaacgucaagaccaccgagguggugggcgacaucauccugaagccggccaacaacagccucaagaucaccgaggaggucgggcacacggaccugauggccgccuacguggacaacuccagccugaccaucaagaagcccaacgagcucucccgcgugcugggccugaagacccucgcgacccacgggcuggccgccgucaacagcgugcccugggacacgaucgccaacuacgccaagccguuccugaacaagguggucuccaccaccaccaacaucgugacgcgcugccucaaccgggugugcaccaacuacaugcccuacuucuucacccugcugcuccagcugugcaccuucacccgcagcacgaacucccggaucaaggcgagcaugcccaccaccaucgccaagaacaccgucaagagcgugggcaaguucugccuggaggccuccuucaacuaccucaagagccccaacuucuccaagcugaucaacaucaucaucugguuccugcuccugagcgugugccugggcucccucaucuacagcacggccgcccuggggguccugauguccaaccucggcaugccgagcuacugcaccggguaccgcgagggcuaccugaacuccaccaacgugaccaucgcgacguacugcaccggcagcauccccugcuccgugugccugagcgggcucgacucccuggacaccuaccccagccuggagaccauccagaucacgaucuccagcuucaagugggaccucaccgccuucggccuggucgccgagugguuccuggccuacauccucuucacccgguucuucuacgugcuggggcuggccgcgaucaugcagcucuucuucuccuacuucgccgugcacuucaucagcaacuccuggcugauguggcugaucaucaaccugguccagauggcccccaucagcgccauggugcgcauguacaucuucuucgcgagcuucuacuacguguggaaguccuacguccacgugguggacggcugcaacagcuccaccugcaugaugugcuacaagcggaaccgcgccacgcgggucgagugcaccaccaucgugaacgggguccgccggagcuucuacguguacgccaacggcggcaagggguucugcaagcuccacaacuggaacugcgugaacugcgacaccuucugcgccggcuccacguucaucagcgacgaggucgcccgcgaccugucccugcaguucaagcggccgaucaaccccaccgaccagagcuccuacaucguggacagcgugaccgucaagaacggguccauccaccucuacuucgacaaggcgggccagaagaccuacgagcgccacagccugucccacuucgugaaccuggacaaccuccgggccaacaacacgaaggggagccugcccaucaacgugaucgucuucgacggcaaguccaagugcgaggagagcuccgccaagagcgccuccguguacuacagccagcugaugugccagcccauccuccugcuggaccaggcccucgugagcgacgucggcgacuccgcggagguggccgugaagauguucgacgccuacgucaacaccuucagcuccaccuucaacgugccgauggagaagcugaagacccugguggccacggccgaggcggagcucgccaagaacgucagccuggacaacgugcuguccaccuucaucagcgccgcccgccagggguucguggacuccgacgucgagaccaaggacgugguggagugccucaagcugagccaccaguccgacaucgaggucaccggcgacagcugcaacaacuacaugcugacguacaacaagguggagaacaugaccccccgggaccucggggcgugcaucgacugcuccgcccgccacaucaacgcccagguggccaagagccacaacaucgcccugaucuggaacgucaaggacuucaugucccugagcgagcagcuccggaagcagauccgcuccgcggccaagaagaacaaccugcccuucaagcugaccugcgccaccacgcgccagguggugaacgucgugaccaccaagaucgcccucaagggcggguga

SEQ ID NO: 18122 - RNA, 5841 nt, Artificial Sequence
  SARS-CoV-2__MT601291.1__non-structural protein 3 (NSP3) CDS gc
auggcccccaccaaggugaccuucggcgacgacacggucaucgaggugcagggguacaagagcgugaacaucaccuucgagcuggacgagcgcaucgacaagguccucaacgagaagugcuccgccuacaccguggagcugggcaccgaggugaacgaguucgcgugcgucguggccgacgccgugaucaagacgcugcagccggucagcgagcuccugaccccccuggggaucgaccucgacgagugguccauggccaccuacuaccuguucgacgagagcggcgaguucaagcuggccucccacauguacugcagcuucuacccccccgacgaggacgaggaggagggggacugcgaggaggaggaguucgagccguccacccaguacgaguacggcacggaggacgacuaccagggcaagccccucgaguucggggcgaccagcgccgcccugcagcccgaggaggagcaggaggaggacuggcuggacgacgacucccagcagaccgugggccagcaggacgggagcgaggacaaccagaccacgaccauccagaccaucguggagguccagccccagcucgagauggagcugaccccgguggugcagacgaucgaggucaacuccuucagcggcuaccugaagcucaccgacaacguguacaucaagaacgccgacaucguggaggaggcgaagaaggucaagcccaccgugguggucaacgccgccaacguguaccugaagcacgggggcggcguggccggggcccugaacaaggcgaccaacaacgccaugcaggucgaguccgacgacuacaucgccacgaacggcccccucaagguggggggcagcugcguccuguccggccacaaccuggccaagcacugccuccacgugguggggcccaacgucaacaagggcgaggacauccagcugcugaagagcgccuacgagaacuucaaccagcacgaggugcuccuggcgccgcugcucuccgccgggaucuucggcgccgaccccauccacagccugcgggugugcgucgacaccgugcgcaccaacguguaccuggccgucuucgacaagaaccucuacgacaagcugguguccagcuuccuggagaugaagagcgagaagcagguggagcagaagaucgccgagauccccaaggaggaggucaagcccuucaucaccgaguccaagccgagcguggagcagcggaagcaggacgacaagaagaucaaggcgugcguggaggaggucacgaccacccucgaggagaccaaguuccugacggagaaccugcuccuguacaucgacaucaacgggaaccugcacuccgacagcgccacccucguguccgacaucgacaucaccuuccugaagaaggacgcccccuacaucgugggcgacgucgugcaggagggcgugcugaccgccgucgugauccccacgaagaaggccgggggcaccaccgagaugcucgcgaaggcccugcgcaaggugcccaccgacaacuacaucacgaccuacccggggcagggccugaacggguacaccgucgaggaggccaagaccgugcucaagaagugcaagagcgccuucuacauccugcccuccaucaucagcaacgagaagcaggagauccugggcaccguguccuggaaccuccgggagaugcuggcgcacgccgaggagacgcgcaagcugaugcccgucugcguggagaccaaggccaucgugagcaccauccagcggaaguacaagggcaucaagauccaggagggggucguggacuacggcgcccgcuucuacuucuacaccuccaagacgaccguggccagccugaucaacacccucaacgaccugaacgagacccuggucacgaugccccucggguacgugacccacggccugaaccuggaggaggcggcccgguacaugcgcucccucaaggugccggccaccgucagcguguccagccccgacgccgugaccgccuacaacggguaccugacguccagcuccaagacccccgaggagcacuucaucgagaccaucagccuggcgggcagcuacaaggacugguccuacagcggccaguccacccagcucgggaucgaguuccugaagcggggcgacaagagcgucuacuacacguccaaccccaccaccuuccaccuggacggggaggugaucaccuucgacaaccucaagacgcugcugagccuccgcgaggugcggaccaucaaggucuucaccaccguggacaacaucaaccugcacacgcagguggucgacauguccaugaccuacggccagcaguucggcccgaccuaccuggacggggccgacgugaccaagaucaagccccacaacagccacgagggcaagacguucuacgugcuccccaacgacgacacccugcgcgucgaggccuucgaguacuaccacaccaccgacccguccuuccuggggcgguacaugagcgcccucaaccacacgaagaaguggaaguacccccaggugaacggccugaccuccaucaagugggccgacaacaacugcuaccuggcgaccgcccuccugacccugcagcagaucgagcucaaguucaacccccccgcccugcaggacgccuacuaccgcgcgcgggccggggaggccgccaacuucugcgcccugauccucgcguacugcaacaagacggugggcgagcugggcgacguccgcgagaccaugagcuaccuguuccagcacgccaaccucgacuccugcaagcgggugcugaacgucgugugcaagaccugcgggcagcagcagaccacccugaagggcguggaggccgucauguacauggggacgcucagcuacgagcaguucaagaagggcgugcagaucccgugcaccugcgggaagcaggccaccaaguaccuggugcagcaggagucccccuucgucaugaugagcgccccccccgcgcaguacgagcugaagcacggcaccuucacgugcgccuccgaguacaccggcaacuaccagugcgggcacuacaagcacaucaccagcaaggagacccucuacugcaucgacggcgcccugcugacgaagagcuccgaguacaaggggccgaucaccgacguguucuacaaggagaacagcuacaccaccacgaucaagcccgugaccuacaagcucgacggcgucgugugcaccgagaucgaccccaagcuggacaacuacuacaagaaggacaacuccuacuucaccgagcagcccaucgaccuggugccgaaccagcccuaccccaacgccagcuucgacaacuucaaguucgucugcgacaacaucaaguucgccgacgaccucaaccagcugacgggguacaagaagcccgcgucccgcgagcugaaggugaccuucuucccggaccucaacggcgacguggucgccaucgacuacaagcacuacacccccagcuucaagaagggcgccaagcugcugcacaagcccaucguguggcacgugaacaacgccaccaacaaggcgacguacaagcccaacaccuggugcauccggugccucugguccaccaagccggucgagaccagcaacuccuucgacgugcugaagagcgaggacgcccaggggauggacaaccuggccugcgaggaccucaagcccguguccgaggaggucguggagaaccccacgauccagaaggacgugcuggagugcaacgucaagaccaccgagguggugggcgacaucauccugaagcccgccaacaacagccucaagaucaccgaggaggucgggcacacggaccugauggccgcguacguggacaacuccagccugaccaucaagaagccgaacgagcucucccgcgugcugggccugaagacccucgccacccacgggcuggccgccgucaacagcgugcccugggacacgaucgccaacuacgcgaagcccuuccugaacaagguggucuccaccaccaccaacaucgugacgcgcugccucaaccgggugugcaccaacuacaugccguacuucuucacccugcugcuccagcugugcaccuucacccgcagcacgaacucccggaucaaggccagcaugcccaccaccaucgccaagaacaccgucaagagcgugggcaaguucugccuggaggccuccuucaacuaccucaagagccccaacuucuccaagcugaucaacaucaucaucugguuccugcuccugagcgugugccugggcucccucaucuacagcacggccgcgcuggggguccugauguccaaccucggcaugcccagcuacugcaccggguaccgcgagggcuaccugaacuccaccaacgugaccaucgccacguacugcaccggcagcaucccgugcuccgugugccugagcgggcucgacucccuggacaccuaccccagccuggagaccauccagaucacgaucuccagcuucaagugggaccucaccgccuucggccuggucgccgagugguuccuggccuacauccucuucacccgguucuucuacgugcuggggcuggcggccaucaugcagcucuucuucuccuacuucgccgugcacuucaucagcaacuccuggcugauguggcugaucaucaaccugguccagauggcccccaucagcgcgauggugcgcauguacaucuucuucgccagcuucuacuacguguggaaguccuacguccacgugguggacggcugcaacagcuccaccugcaugaugugcuacaagcggaaccgcgccacgcgggucgagugcaccaccaucgugaacgggguccgccggagcuucuacguguacgccaacggcggcaagggguucugcaagcuccacaacuggaacugcgugaacugcgacaccuucugcgccggcuccacguucaucagcgacgaggucgcgcgcgaccugucccugcaguucaagcggcccaucaacccgaccgaccagagcuccuacaucguggacagcgugaccgucaagaacggguccauccaccucuacuucgacaaggccggccagaagaccuacgagcgccacagccugucccacuucgugaaccuggacaaccuccgggccaacaacacgaaggggagccugcccaucaacgugaucgucuucgacggcaaguccaagugcgaggagagcuccgccaagagcgccuccguguacuacagccagcugaugugccagcccauccuccugcuggaccaggcgcucgugagcgacgucggcgacuccgccgagguggccgugaagauguucgacgccuacgucaacaccuucagcuccaccuucaacgugcccauggagaagcugaagacccugguggccacggcggaggccgagcucgccaagaacgucagccuggacaacgugcuguccaccuucaucagcgccgcgcgccagggguucguggacuccgacgucgagaccaaggacgugguggagugccucaagcugagccaccaguccgacaucgaggucaccggcgacagcugcaacaacuacaugcugacguacaacaagguggagaacaugaccccgcgggaccucggggccugcaucgacugcuccgcccgccacaucaacgcccagguggccaagagccacaacaucgcgcugaucuggaacgucaaggacuucaugucccugagcgagcagcuccggaagcagauccgcuccgccgccaagaagaacaaccugcccuucaagcugaccugcgccaccacgcgccagguggugaacgucgugaccaccaagaucgcccucaagggcggguga

SEQ ID NO: 18123 - RNA, 5841 nt, Artificial Sequence
  SARS-CoV-2__MT601292.1__non-structural protein 3 (NSP3) CDS gc
auggcccccaccaaggugaccuucggcgacgacacggucaucgaggugcagggguacaagagcgugaacaucaccuucgagcuggacgagcgcaucgacaagguccucaacgagaagugcuccgccuacaccguggagcugggcaccgaggugaacgaguucgcgugcgucguggccgacgccgugaucaagacgcugcagccggucagcgagcuccugaccccccuggggaucgaccucgacgagugguccauggccaccuacuaccuguucgacgagagcggcgaguucaagcuggccucccacauguacugcagcuucuacccccccgacgaggacgaggaggagggggacugcgaggaggaggaguucgagccguccacccaguacgaguacggcacggaggacgacuaccagggcaagccccucgaguucggggcgaccagcgccgcccugcagcccgaggaggagcaggaggaggacuggcuggacgacgacucccagcagaccgugggccagcaggacgggagcgaggacaaccagaccacgaccauccagaccaucguggagguccagccccagcucgagauggagcugaccccgguggugcagacgaucgaggucaacuccuucagcggcuaccugaagcucaccgacaacguguacaucaagaacgccgacaucguggaggaggcgaagaaggucaagcccaccgugguggucaacgccgccaacguguaccugaagcacgggggcggcguggccggggcccugaacaaggcgaccaacaacgccaugcaggucgaguccgacgacuacaucgccacgaacggcccccucaagguggggggcagcugcguccuguccggccacaaccuggccaagcacugccuccacgugguggggcccaacgucaacaagggcgaggacauccagcugcugaagagcgccuacgagaacuucaaccagcacgaggugcuccuggcgccgcugcucuccgccgggaucuucggcgccgaccccauccacagccugcgggugugcgucgacaccgugcgcaccaacguguaccuggccgucuucgacaagaaccucuacgacaagcugguguccagcuuccuggagaugaagagcgagaagcagguggagcagaagaucgccgagauccccaaggaggaggucaagcccuucaucaccgaguccaagccgagcguggagcagcggaagcaggacgacaagaagaucaaggcgugcguggaggaggucacgaccacccucgaggagaccaaguuccugacggagaaccugcuccuguacaucgacaucaacgggaaccugcaccccgacuccgccacccucgugagcgacaucgacaucaccuuccugaagaaggacgcccccuacaucgugggcgacgucgugcaggagggcgugcugaccgccgucgugauccccacgaagaaggccgggggcaccaccgagaugcucgcgaaggcccugcgcaaggugccgaccgacaacuacaucacgaccuaccccgggcagggccugaacggguacaccgucgaggaggccaagaccgugcucaagaagugcaaguccgccuucuacauccugcccagcaucaucuccaacgagaagcaggagauccugggcaccgugagcuggaaccuccgggagaugcuggcgcacgccgaggagacgcgcaagcugaugcccgucugcguggagaccaaggccaucguguccaccauccagcggaaguacaagggcaucaagauccaggagggggucguggacuacggcgcccgcuucuacuucuacaccagcaagacgaccguggccucccugaucaacacccucaacgaccugaacgagacccuggucacgaugccgcucggguacgugacccacggccugaaccuggaggaggcggcccgguacaugcgcagccucaaggugcccgccaccgucuccgugagcucccccgacgccgugaccgccuacaacggguaccugacgagcuccagcaagacccccgaggagcacuucaucgagaccaucucccuggcgggcagcuacaaggacuggagcuacuccggccagagcacccagcucgggaucgaguuccugaagcggggcgacaaguccgucuacuacacgagcaacccgaccaccuuccaccuggacggggaggugaucaccuucgacaaccucaagacgcugcugucccuccgcgaggugcggaccaucaaggucuucaccaccguggacaacaucaaccugcacacgcagguggucgacaugagcaugaccuacggccagcaguucggccccaccuaccuggacggggccgacgugaccaagaucaagccccacaacucccacgagggcaagacguucuacgugcucccgaacgacgacacccugcgcgucgaggccuucgaguacuaccacaccaccgaccccagcuuccuggggcgguacauguccgcccucaaccacacgaagaaguggaaguacccccaggugaacggccugaccagcaucaagugggccgacaacaacugcuaccuggcgaccgcccuccugacccugcagcagaucgagcucaaguucaacucccccgcccugcaggacgccuacuaccgcgcgcgggccggggaggccgccaacuucugcgcccugauccucgcguacugcaacaagacggugggcgagcugggcgacguccgcgagaccaugagcuaccuguuccagcacgccaaccucgacuccugcaagcgggugcugaacgucgugugcaagaccugcgggcagcagcagaccacccugaagggcguggaggccgucauguacauggggacgcucagcuacgagcaguucaagaagggcgugcagaucccgugcaccugcgggaagcaggccaccaaguaccuggugcagcaggagucccccuucgucaugaugagcgccccccccgcgcaguacgagcugaagcacggcaccuucacgugcgccuccgaguacaccggcaacuaccagugcgggcacuacaagcacaucaccagcaaggagacccucuacugcaucgacggcgcccugcugacgaagagcuccgaguacaaggggccgaucaccgacguguucuacaaggagaacagcuacaccaccacgaucaagcccgugaccuacaagcucgacggcgucgugugcaccgagaucgaccccaagcuggacaacuacuacaagaaggacaacuccuacuucaccgagcagcccaucgaccuggugccgaaccagcccuaccccaacgccagcuucgacaacuucaaguucgucugcgacaacaucaaguucgccgacgaccucaaccagcugacgggguacaagaagcccgcgucccgcgagcugaaggugaccuucuucccggaccucaacggcgacguggucgccaucgacuacaagcacuacacccccagcuucaagaagggcgccaagcugcugcacaagcccaucguguggcacgugaacaacgccaccaacaaggcgacguacaagcccaacaccuggugcauccggugccucugguccaccaagccggucgagaccagcaacuccuucgacgugcugaagagcgaggacgcccaggggauggacaaccuggccugcgaggaccucaagcccguguccgaggaggucguggagaaccccacgauccagaaggacgugcuggagugcaacgucaagaccaccgagguggugggcgacaucauccugaagcccgccaacaacagccucaagaucaccgaggaggucgggcacacggaccugauggccgcguacguggacaacuccagccugaccaucaagaagccgaacgagcucucccgcgugcugggccugaagacccucgccacccacgggcuggccgccgucaacagcgugcccugggacacgaucgccaacuacgcgaagcccuuccugaacaagguggucuccaccaccaccaacaucgugacgcgcugccucaaccgggugugcaccaacuacaugccguacuucuucacccugcugcuccagcugugcaccuucacccgcagcacgaacucccggaucaaggccagcaugcccaccaccaucgccaagaacaccgucaagagcgugggcaaguucugccuggaggccuccuucaacuaccucaagagccccaacuucuccaagcugaucaacaucaucaucugguuccugcuccugagcgugugccugggcucccucaucuacagcacggccgcgcuggggguccugauguccaaccucggcaugcccagcuacugcaccggguaccgcgagggcuaccugaacuccaccaacgugaccaucgccacguacugcaccggcagcaucccgugcuccgugugccugagcgggcucgacucccuggacaccuaccccagccuggagaccauccagaucacgaucuccagcuucaagugggaccucaccgccuucggccuggucgccgagugguuccuggccuacauccucuucacccgguucuucuacgugcuggggcuggcggccaucaugcagcucuucuucuccuacuucgccgugcacuucaucagcaacuccuggcugauguggcugaucaucaaccugguccagauggcccccaucagcgcgauggugcgcauguacaucuucuucgccagcuucuacuacguguggaaguccuacguccacgugguggacggcugcaacagcuccaccugcaugaugugcuacaagcggaaccgcgccacgcgggucgagugcaccaccaucgugaacgggguccgccggagcuucuacguguacgccaacggcggcaagggguucugcaagcuccacaacuggaacugcgugaacugcgacaccuucugcgccggcuccacguucaucagcgacgaggucgcgcgcgaccugucccugcaguucaagcggcccaucaacccgaccgaccagagcuccuacaucguggacagcgugaccgucaagaacggguccauccaccucuacuucgacaaggccggccagaagaccuacgagcgccacagccugucccacuucgugaaccuggacaaccuccgggccaacaacacgaaggggagccugcccaucaacgugaucgucuucgacggcaaguccaagugcgaggagagcuccgccaagagcgccuccguguacuacagccagcugaugugccagcccauccuccugcuggaccaggcgcucgugagcgacgucggcgacuccgccgagguggccgugaagauguucgacgccuacgucaacaccuucagcuccaccuucaacgugcccauggagaagcugaagacccugguggccacggcggaggccgagcucgccaagaacgucagccuggacaacgugcuguccaccuucaucagcgccgcgcgccagggguucguggacuccgacgucgagaccaaggacgugguggagugccucaagcugagccaccaguccgacaucgaggucaccggcgacagcugcaacaacuacaugcugacguacaacaagguggagaacaugaccccgcgggaccucggggccugcaucgacugcuccgcccgccacaucaacgcccagguggccaagagccacaacaucgcgcugaucuggaacgucaaggacuucaugucccugagcgagcagcuccggaagcagauccgcuccgccgccaagaagaacaaccugcccuucaagcugaccugcgccaccacgcgccagguggugaacgucgugaccaccaagaucgcccucaagggcggguga

SEQ ID NO: 18124 - RNA, 5841 nt, Artificial Sequence
  SARS-CoV-2__MT584985.1__non-structural protein 3 (NSP3) CDS gc
auggcccccaccaaggugaccuucggcgacgacacggucaucgaggugcagggguacaagagcgugaacaucaccuucgagcuggacgagcgcaucgacaagguccucaaccagaagugcuccgccuacaccguggagcugggcaccgaggugaacgaguucgcgugcgucguggccgacgccgugaucaagacgcugcagccggucagcgagcuccugaccccccuggggaucgaccucgacgagugguccauggccaccuacuaccuguucgacgagagcggcgaguucaagcuggccucccacauguacugcagcuucuacccccccgacgaggacgaggaggagggggacugcgaggaggaggaguucgagccguccacccaguacgaguacggcacggaggacgacuaccagggcaagccccucgaguucggggcgaccagcgccgcccugcagcccgaggaggagcaggaggaggacuggcuggacgacgacucccagcagaccgugggccagcaggacgggagcgaggacaaccagaccacgaccauccagaccaucguggagguccagccccagcucgagauggagcugaccccgguggugcagacgaucgaggucaacuccuucagcggcuaccugaagcucaccgacaacguguacaucaagaacgccgacaucguggaggaggcgaagaaggucaagcccaccgugguggucaacgccgccaacguguaccugaagcacgggggcggcguggccggggcccugaacaaggcgaccaacaacgccaugcaggucgaguccgacgacuacaucgccacgaacggcccccucaagguggggggcagcugcguccuguccggccacaaccuggccaagcacugccuccacgugguggggcccaacgucaacaagggcgaggacauccagcugcugaagagcgccuacgagaacuucaaccagcacgaggugcuccuggcgccgcugcucuccgccgggaucuucggcgccgaccccauccacagccugcgggugugcgucgacaccgugcgcaccaacguguaccuggccgucuucgacaagaaccucuacgacaagcugguguccagcuuccuggagaugaagagcgagaagcagguggagcagaagaucgccgagauccccaaggaggaggucaagcccuucaucaccgaguccaagccgagcguggagcagcggaagcaggacgacaagaagaucaaggcgugcguggaggaggucacgaccacccucgaggagaccaaguuccugacggagaaccugcuccuguacaucgacaucaacgggaaccugcaccccgacuccgccacccucgugagcgacaucgacaucaccuuccugaagaaggacgcccccuacaucgugggcgacgucgugcaggagggcgugcugaccgccgucgugauccccacgaagaaggccgggggcaccaccgagaugcucgcgaaggcccugcgcaaggugccgaccgacaacuacaucacgaccuaccccgggcagggccugaacggguacaccgucgaggaggccaagaccgugcucaagaagugcaaguccgccuucuacauccugcccagcaucaucuccaacgagaagcaggagauccugggcaccgugagcuggaaccuccgggagaugcuggcgcacgccgaggagacgcgcaagcugaugcccgucugcguggagaccaaggccaucguguccaccauccagcggaaguacaagggcaucaagauccaggagggggucguggacuacggcgcccgcuucuacuucuacaccagcaagacgaccguggccucccugaucaacacccucaacgaccugaacgagacccuggucacgaugccgcucggguacgugacccacggccugaaccuggaggaggcggcccgguacaugcgcagccucaaggugcccgccaccgucuccgugagcucccccgacgccgugaccgccuacaacggguaccugacgagcuccagcaagacccccgaggagcacuucaucgagaccaucucccuggcgggcagcuacaaggacuggagcuacuccggccagagcacccagcucgggaucgaguuccugaagcggggcgacaaguccgucuacuacacgagcaacccgaccaccuuccaccuggacggggaggugaucaccuucgacaaccucaagacgcugcugucccuccgcgaggugcggaccaucaaggucuucaccaccguggacaacaucaaccugcacacgcagguggucgacaugagcaugaccuacggccagcaguucggccccaccuaccuggacggggccgacgugaccaagaucaagccccacaacucccacgagggcaagacguucuacgugcucccgaacgacgacacccugcgcgucgaggccuucgaguacuaccacaccaccgaccccagcuuccuggggcgguacauguccgcccucaaccacacgaagaaguggaaguacccccaggugaacggccugaccagcaucaagugggccgacaacaacugcuaccuggcgaccgcccuccugacccugcagcagaucgagcucaaguucaaccccccggcccugcaggacgccuacuaccgcgcgcgggccggggaggccgccaacuucugcgcccugauccucgcguacugcaacaagacggugggcgagcugggcgacguccgcgagaccauguccuaccuguuccagcacgccaaccucgacagcugcaagcgggugcugaacgucgugugcaagaccugcgggcagcagcagaccacccugaagggcguggaggccgucauguacauggggacgcucuccuacgagcaguucaagaagggcgugcagauccccugcaccugcgggaagcaggccaccaaguaccuggugcagcaggagagccccuucgucaugauguccgcccccccggcgcaguacgagcugaagcacggcaccuucacgugcgccagcgaguacaccggcaacuaccagugcgggcacuacaagcacaucaccuccaaggagacccucuacugcaucgacggcgcccugcugacgaagagcagcgaguacaaggggcucaucaccgacguguucuacaaggagaacuccuacaccaccacgaucaagcccgugaccuacaagcuggacggcgucgugugcaccgagaucgaccccaagcuggacaacuacuacaagaaggacaacagcuacuucaccgagcagcccaucgaccucgugccgaaccagcccuaccccaacgccuccuucgacaacuucaaguucgucugcgacaacaucaaguucgccgacgaccugaaccagcugacgggguacaagaagcccgcgagccgcgagcucaaggugaccuucuucccggaccugaacggcgacguggucgccaucgacuacaagcacuacacccccuccuucaagaagggcgccaagcugcuccacaagcccaucguguggcacgugaacaacgccaccaacaaggcgacguacaagcccaacaccuggugcauccggugccuguggagcaccaagccggucgagaccuccaacagcuucgacgugcugaaguccgaggacgcccaggggauggacaaccucgccugcgaggaccugaagcccgugagcgaggaggucguggagaaccccacgauccagaaggacgugcuggagugcaacgucaagaccaccgagguggugggcgacaucauccucaagcccgccaacaacucccugaagaucaccgaggaggucgggcacacggaccugauggccgcguacguggacaacagcucccucaccaucaagaagccgaacgagcugagccgcgugcugggccucaagacccuggccacccacgggcuggccgccgucaacuccgugcccugggacacgaucgccaacuacgcgaagcccuuccucaacaagguggucagcaccaccaccaacaucgugacgcgcugccugaaccgggugugcaccaacuacaugccguacuucuucacccugcuccugcagcugugcaccuucacccgcuccacgaacagccggaucaaggccuccaugcccaccaccaucgccaagaacaccgucaagagcgugggcaaguucugccucgaggccagcuucaacuaccugaagucccccaacuucagcaagcugaucaacaucaucaucugguuccuccugcuguccgugugccucggcagccugaucuacuccacggccgcgcuggggguccucaugagcaaccugggcaugcccuccuacugcaccggguaccgcgagggcuaccugaacagcaccaacgugaccaucgccacguacugcaccggcuccaucccgugcagcgugugccucuccgggcuggacagccuggacaccuaccccucccucgagaccauccagaucacgaucagcuccuucaagugggaccugaccgccuucggccuggucgccgagugguuccucgccuacauccuguucacccgguucuucuacgugcuggggcucgcggccaucaugcagcuguucuucagcuacuucgccgugcacuucaucuccaacagcuggcugauguggcugaucaucaaccucguccagauggcccccaucuccgcgauggugcgcauguacaucuucuucgccagcuucuacuacguguggaagagcuacguccacgugguggacggcugcaacuccagcaccugcaugaugugcuacaagcggaaccgcgccacgcgggucgagugcaccaccaucgugaacgggguccgccgguccuucuacguguacgccaacggcggcaagggguucugcaagcugcacaacuggaacugcgugaacugcgacaccuucugcgccggcagcacguucaucuccgacgaggucgcgcgcgaccugagccuccaguucaagcggcccaucaacccgaccgaccaguccagcuacaucguggacuccgugaccgucaagaacgggagcauccaccuguacuucgacaaggccggccagaagaccuacgagcgccacucccugagccacuucgugaaccucgacaaccugcgggccaacaacacgaaggggucccugcccaucaacgugaucgucuucgacggcaagagcaagugcgaggaguccagcgccaaguccgccagcguguacuacucccagcucaugugccagcccauccugcugcucgaccaggcgcuggugagcgacgucggcgacagcgccgagguggccgugaagauguucgacgccuacgucaacaccuucuccagcaccuucaacgugcccauggagaagcugaagacccucguggccacggcggaggccgagcuggccaagaacgucucccuggacaacgugcucagcaccuucaucuccgccgcgcgccagggguucguggacagcgacgucgagaccaaggacgugguggagugccugaagcugucccaccagagcgacaucgaggucaccggcgacuccugcaacaacuacaugcucacguacaacaagguggagaacaugaccccgcgggaccugggggccugcaucgacugcagcgcccgccacaucaacgcccagguggccaagucccacaacaucgcgcugaucuggaacgucaaggacuucaugagccucuccgagcagcugcggaagcagauccgcagcgccgccaagaagaacaaccugcccuucaagcucaccugcgccaccacgcgccagguggugaacgucgugaccaccaagaucgcccugaagggcggguga

SEQ ID NO: 18125 - RNA, 5841 nt, Artificial Sequence
  SARS-CoV-2__MT585059.1__non-structural protein 3 (NSP3) CDS gc
auggcccccaccaaggugaccuucggcgacgacacggucaucgaggugcagggguacaagagcgugaacaucaccuucgagcuggacgagcgcaucgacaagguccucaacgagaagugcuccgccuacaccguggagcugggcaccgaggugaacgaguucgcgugcgucguggccgacgccgugaucaagacgcugcagccggucagcgagcuccugaccccccuggggaucgaccucgacgagugguccauggccaccuacuaccuguucgacgagagcggcgaguucaagcuggccucccacauguacugcagcuucuacccccccgacgaggacgaggaggagggggacugcgaggaggaggaguucgagccguccacccaguacgaguacggcacggaggacgacuaccagggcaagccccucgaguucggggcgaccagcgccgcccugcagcccgaggaggagcaggaggaggacuggcuggacgacgacucccagcagaccgugggccagcaggacgggagcgaggacaaccagaccacgaccauccagaccaucguggagguccagccccagcucgagauggagcugaccccgguggugcagacgaucgaggucaacuccuucagcggcuaccugaagcucaccgacaacguguacaucaagaacgccgacaucguggaggaggcgaagaaggucaagcccaccgugguggucaacgccgccaacguguaccugaagcacgggggcggcguggccggggcccugaacaaggcgaccaacaacgccaugcaggucgaguccgacgacuacaucgccacgaacggcccccucaagguggggggcagcugcguccuguccggccacaaccuggccaagcacugccuccacgugguggggcccaacgucaacaagggcgaggacauccagcugcugaagagcgccuacgagaacuucaaccagcacgaggugcuccuggcgccgcugcucuccgccgggaucuucggcgccgaccccauccacagccugcgggugugcgucgacaccgugcgcaccaacguguaccuggccgucuucgacaagaaccucuacgacaagcugguguccagcuuccuggagaugaagagcgagaagcagguggagcagaagaucgccgagauccccaaggaggaggucaagcccuucaucaccgaguccaagccgagcguggagcagcggaagcaggacgacaagaagaucaaggcgugcguggaggaggucacgaccacccucgaggagaccaaguuccugacggagaaccugcuccuguacaucgacaucaacgggaaccugcaccccgacuccgccacccucgugagcgacaucgacaucaccuuccugaagaaggacgcccccuacaucgugggcgacgucgugcaggagggcgugcugaccgccgucgugauccccacgaagaaggccgggggcaccaccgagaugcucgcgaaggcccugcgcaaggugccgaccgacaacuacaucacgaccuaccccgggcagggccugaacggguacaccgucgaggaggccaagaccgugcucaagaagugcaaguccgccuucuacauccugcccagcaucaucuccaacgagaagcaggagauccugggcaccgugagcuggaaccuccgggagaugcuggcgcacgccgaggagacgcgcaagcugaugcccgucugcguggagaccaaggccaucguguccaccauccagcacaaguacaagggcaucaagauccaggagggggucguggacuacggcgcccgguucuacuucuacaccagcaagacgaccguggccucccugaucaacacccucaacgaccugaacgagacccuggucacgaugccgcucggguacgugacccacggccugaaccuggaggaggcggcccgcuacaugcggagccucaaggugcccgccaccgucuccgugagcucccccgacgccgugaccgccuacaacggguaccugacgagcuccagcaagacccccgaggagcacuucaucgagaccaucucccuggcgggcagcuacaaggacuggagcuacuccggccagagcacccagcucgggaucgaguuccugaagcgcggcgacaaguccgucuacuacacgagcaacccgaccaccuuccaccuggacggggaggugaucaccuucgacaaccucaagacgcugcugucccuccgggaggugcgcaccaucaaggucuucaccaccguggacaacaucaaccugcacacgcagguggucgacaugagcaugaccuacggccagcaguucggccccaccuaccuggacggggccgacgugaccaagaucaagccccacaacucccacgagggcaagacguucuacgugcucccgaacgacgacacccugcgggucgaggccuucgaguacuaccacaccaccgaccccagcuuccuggggcgcuacauguccgcccucaaccacacgaagaaguggaaguacccccaggugaacggccugaccagcaucaagugggccgacaacaacugcuaccuggcgaccgcccuccugacccugcagcagaucgagcucaaguucaaccccccggcccugcaggacgccuacuaccgggcgcgcgccggggaggccgccaacuucugcgcccugauccucgcguacugcaacaagacggugggcgagcugggcgacguccgggagaccauguccuaccuguuccagcacgccaaccucgacagcugcaagcgcgugcugaacgucgugugcaagaccugcgggcagcagcagaccacccugaagggcguggaggccgucauguacauggggacgcucuccuacgagcaguucaagaagggcgugcagauccccugcaccugcgggaagcaggccaccaaguaccuggugcagcaggagagccccuucgucaugauguccgcccccccggcgcaguacgagcugaagcacggcaccuucacgugcgccagcgaguacaccggcaacuaccagugcgggcacuacaagcacaucaccuccaaggagacccucuacugcaucgacggcgcccugcugacgaagagcagcgaguacaaggggcccaucaccgacguguucuacaaggagaacuccuacaccaccacgaucaagcccgugaccuacaagcucgacggcgucgugugcaccgagaucgaccccaagcuggacaacuacuacaagaaggacaacagcuacuucaccgagcagccgaucgaccuggugcccaaccagcccuaccccaacgccuccuucgacaacuucaaguucgucugcgacaacaucaaguucgccgacgaccucaaccagcugacgggguacaagaagccggcgagccgggagcugaaggugaccuucuuccccgaccucaacggcgacguggucgccaucgacuacaagcacuacacccccuccuucaagaagggcgccaagcugcugcacaagcccaucguguggcacgugaacaacgccaccaacaaggcgacguacaagccgaacaccuggugcauccgcugccucuggagcaccaagcccgucgagaccuccaacagcuucgacgugcugaaguccgaggacgcccaggggauggacaaccuggccugcgaggaccucaagcccgugagcgaggaggucguggagaaccccacgauccagaaggacgugcuggagugcaacgucaagaccaccgagguggugggcgacaucauccugaagccggccaacaacucccucaagaucaccgaggaggucgggcacacggaccugauggccgcguacguggacaacagcucccugaccaucaagaagcccaacgagcucagccgggugcugggccugaagacccucgccacccacgggcuggccgccgucaacuccgugcccugggacacgaucgccaacuacgcgaagccguuccugaacaagguggucagcaccaccaccaacaucgugacgcgcugccucaaccgcgugugcaccaacuacaugcccuacuucuucacccugcugcuccagcugugcaccuucacccgguccacgaacagccgcaucaaggccuccaugcccaccaccaucgccaagaacaccgucaagagcgugggcaaguucugccuggaggccagcuucaacuaccucaagucccccaacuucagcaagcugaucaacaucaucaucugguuccugcuccuguccgugugccugggcagccucaucuacuccacggccgcgcuggggguccugaugagcaaccucggcaugccguccuacugcaccggguaccgggagggcuaccugaacagcaccaacgugaccaucgccacguacugcaccggcuccauccccugcagcgugugccuguccgggcucgacagccuggacaccuaccccucccuggagaccauccagaucacgaucagcuccuucaagugggaccucaccgccuucggccuggucgccgagugguuccuggccuacauccucuucacccgcuucuucuacgugcuggggcuggcggccaucaugcagcucuucuucagcuacuucgccgugcacuucaucuccaacagcuggcugauguggcugaucaucaaccugguccagauggcccccaucuccgcgauggugcggauguacaucuucuucgccagcuucuacuacguguggaagagcuacguccacgugguggacggcugcaacuccagcaccugcaugaugugcuacaagcgcaaccgggccacgcgcgucgagugcaccaccaucgugaacgggguccggcgcuccuucuacguguacgccaacggcggcaagggguucugcaagcuccacaacuggaacugcgugaacugcgacaccuucugcgccggcagcacguucaucuccgacgaggucgcgcgggaccugagccugcaguucaagcgcccgaucaaccccaccgaccaguccagcuacaucguggacuccgugaccgucaagaacgggagcauccaccucuacuucgacaaggccggccagaagaccuacgagcggcacucccugagccacuucgugaaccuggacaaccuccgcgccaacaacacgaaggggucccugcccaucaacgugaucgucuucgacggcaagagcaagugcgaggaguccagcgccaaguccgccagcguguacuacucccagcugaugugccagcccauccuccugcuggaccaggcgcucgugagcgacgucggcgacagcgccgagguggccgugaagauguucgacgccuacgucaacaccuucuccagcaccuucaacgugccgauggagaagcugaagacccugguggccacggcggaggccgagcucgccaagaacgucucccuggacaacgugcugagcaccuucaucuccgccgcgcggcagggguucguggacagcgacgucgagaccaaggacgugguggagugccucaagcugucccaccagagcgacaucgaggucaccggcgacuccugcaacaacuacaugcugacguacaacaagguggagaacaugaccccccgcgaccucggggccugcaucgacugcagcgcccggcacaucaacgcccagguggccaagucccacaacaucgcgcugaucuggaacgucaaggacuucaugagccuguccgagcagcuccgcaagcagauccggagcgccgccaagaagaacaaccugcccuucaagcugaccugcgccaccacgcgccagguggugaacgucgugaccaccaagaucgcccucaagggcggguga

SEQ ID NO: 18126 - RNA, 5841 nt, Artificial Sequence
  SARS-CoV-2__MT585090.1__non-structural protein 3 (NSP3) CDS gc
auggcccccaccaaggugaccuucggcgacgacacggucaucgaggugcagggguacaagagcgugaacaucaccuucgagcuggacgagcgcaucgacaagguccucaacgagaagugcuccgccuacaccguggagcugggcaccgaggugaacgaguucgcgugcgucguggccgacgccgugaucaagacgcugcagccggucagcgagcuccugaccccccuggggaucgaccucgacgagugguccauggccaccuacuaccuguucgacgagagcggcgaguucaagcuggccucccacauguacugcagcuucuacccccccgacgaggacgaggaggagggggacugcgaggaggaggaguucgagccguccacccaguacgaguacggcacggaggacgacuaccagggcaagccccucgaguucggggcgaccagcgccgcccugcagcccgaggaggagcaggaggaggacuggcuggacgacgacucccagcagaccgugggccagcaggacgggagcgaggacaaccagaccacgaccauccagaccaucguggagguccagccccagcucgagauggagcugaccccgguggugcagacgaucgaggucaacuccuucagcggcuaccugaagcucaccgacaacguguacaucaagaacgccgacaucguggaggaggcgaagaaggucaagcccaccgugguggucaacgccgccaacguguaccugaagcacgggggcggcguggccggggcccugaacaaggcgaccaacaacgccaugcaggucgaguccgacgacuacaucgccacgaacggcccccucaagguggggggcagcugcguccuguccggccacaaccuggccaagcacugccuccacgugguggggcccaacgucaacaagggcgaggacauccagcugcugaagagcgccuacgagaacuucaaccagcacgaggugcuccuggcgccgcugcucuccgccgggaucuucggcgccgaccccauccacagccugcgggugugcgucgacaccgugcgcaccaacguguaccuggccgucuucgacaagaaccucuacgacaagcugguguccagcuuccuggagaugaagagcgagaagcagguggagcagaagaucgccgagauccccaaggaggaggucaagcccuucaucaccgaguccaagccgagcguggagcagcggaagcaggacgacaagaagaucaaggcgugcguggaggaggucacgaccacccucgaggagaccaaguuccugacggagaaccugcuccuguacaucgacaucaacgggaaccugcaccccgacuccgccacccucgugagcgacaucgacaucaccuuccugaagaaggacgcccccuacaucgugggcgacgucgugcaggagggcgugcugaccgccgucgugauccccacgaagaaggccgggggcaccaccgagaugcucgcgaaggcccugcgcaaggugccgaccgacaacuacaucacgaccuaccccgggcagggccugaacggguacaccgucgaggaggccaagaccgugcucaagaagugcaaguccgccuucuacauccugcccagcaucaucuccaacgagaagcaggagauccugggcaccgugagcuggaaccuccgggagaugcuggcgcacgccgaggagacgcgcaagcugaugcccgucugcguggagaccaaggccaucguguccaccauccagcggaaguacaagggcaucaagauccaggagggggucguggacuacggcgcccgcuucuacuucuacaccagcaagacgaccguggccucccugaucaacacccucaacgaccugaacgagacccuggucacgaugccgcucggguacgugacccacggccugaaccuggaggaggcggcccgguacaugcgcagccucaaggugcccgccaccgucuccgugagcucccccgacgccgugaccgccuacaacggguaccugacgagcuccagcaagacccccgaggagcacuucaucgagaccaucucccuggcgggcagcuacaaggacuggagcuacuccggccagagcacccagcucgggaucgaguuccugaagcggggcgacaaguccgucuacuacacgagcaacccgaccaccuuccaccuggacggggaggugaucaccuucgacaaccucaagacgcugcugucccuccgcgaggugcggaccaucaaggucuucaccaccguggacaacaucaaccugcacacgcagguggucgacaugagcaugaccuacggccagcaguucggccccaccuaccuggacggggccgacgugaccaagaucaagccccacaacucccacgagggcaagacguucuacgugcucccgaacgacgacacccugcgcgucgaggccuucgaguacuaccacaccaccgaccccagcuuccuggggcgguacauguccgcccucaaccacacgaagaaguggaaguacccccaggugaacggccugaccagcaucaagugggccgacaacaacugcuaccuggcgaccgcccuccugacccugcagcagaucgagcucaaguucaaccccccggcccugcaggacgccuacuaccgcgcgcgggccggggaggccgccaacuucugcgcccugauccucgcguacugcaacaagacggugggcgagcugggcgacguccgcgagaccauguccuaccuguuccagcacgccaaccucgacagcugcaagcgggugcugaacgucgugugcaagaccugcgggcagcagcagaccacccugaagggcguggaggccgucauguacauggggacgcucuccuacgagcaguucaagaagggcgugcagauccccugcaccugcgggaagcaggccaccaaguaccuggugcagcaggagagccccuucgucaugauguccgcccccccggcgcaguacgagcugaagcacggcaccuucacgugcgccagcgaguacaccggcaacuaccagugcgggcacuacaagcacaucaccuccaaggagacccucuacugcaucgacggcgcccugcugacgaagagcagcgaguacaaggggcccaucaccgacguguucuacaaggagaacuccuacaccaccacgaucaagcccgugaccuacaagcucgacggcgucgugugcaccgagaucgaccccaagcuggacaucuacuacaagaaggacaacagcuacuucaccgagcagccgaucgaccuggugcccaaccagcccuaccccaacgccuccuucgacaacuucaaguucgucugcgacaacaucaaguucgccgacgaccucaaccagcugacgggguacaagaagccggcgagccgcgagcugaaggugaccuucuuccccgaccucaacggcgacguggucgccaucgacuacaagcacuacacccccuccuucaagaagggcgccaagcugcugcacaagcccaucguguggcacgugaacaacgccaccaacaaggcgacguacaagccgaacaccuggugcauccggugccucuggagcaccaagcccgucgagaccuccaacagcuucgacgugcugaaguccgaggacgcccaggggauggacaaccuggccugcgaggaccucaagcccgugagcgaggaggucguggagaaccccacgauccagaaggacgugcuggagugcaacgucaagaccaccgagguggugggcgacaucauccugaagccggccaacaacucccucaagaucaccgaggaggucgggcacacggaccugauggccgcguacguggacaacagcucccugaccaucaagaagcccaacgagcucagccgcgugcugggccugaagacccucgccacccacgggcuggccgccgucaacuccgugcccugggacacgaucgccaacuacgcgaagccguuccugaacaagguggucagcaccaccaccaacaucgugacgcgcugccucaaccgggugugcaccaacuacaugcccuacuucuucacccugcugcuccagcugugcaccuucacccgcuccacgaacagccggaucaaggccuccaugcccaccaccaucgccaagaacaccgucaagagcgugggcaaguucugccuggaggccagcuucaacuaccucaagucccccaacuucagcaagcugaucaacaucaucaucugguuccugcuccuguccgugugccugggcagccucaucuacuccacggccgcgcuggggguccugaugagcaaccucggcaugccguccuacugcaccggguaccgcgagggcuaccugaacagcaccaacgugaccaucgccacguacugcaccggcuccauccccugcagcgugugccuguccgggcucgacagccuggacaccuaccccucccuggagaccauccagaucacgaucagcuccuucaagugggaccucaccgccuucggccuggucgccgagugguuccuggccuacauccucuucacccgguucuucuacgugcuggggcuggcggccaucaugcagcucuucuucagcuacuucgccgugcacuucaucuccaacagcuggcugauguggcugaucaucaaccugguccagauggcccccaucuccgcgauggugcgcauguacaucuucuucgccagcuucuacuacguguggaagagcuacguccacgugguggacggcugcaacuccagcaccugcaugaugugcuacaagcggaaccgcgccacgcgggucgagugcaccaccaucgugaacgggguccgccgguccuucuacguguacgccaacggcggcaagggguucugcaagcuccacaacuggaacugcgugaacugcgacaccuucugcgccggcagcacguucaucuccgacgaggucgcgcgcgaccugagccugcaguucaagcggccgaucaaccccaccgaccaguccagcuacaucguggacuccgugaccgucaagaacgggagcauccaccucuacuucgacaaggccggccagaagaccuacgagcgccacucccugagccacuucgugaaccuggacaaccuccgggccaacaacacgaaggggucccugcccaucaacgugaucgucuucgacggcaagagcaagugcgaggaguccagcgccaaguccgccagcguguacuacucccagcugaugugccagcccauccuccugcuggaccaggcgcucgugagcgacgucggcgacagcgccgagguggccgugaagauguucgacgccuacgucaacaccuucuccagcaccuucaacgugccgauggagaagcugaagacccugguggccacggcggaggccgagcucgccaagaacgucucccuggacaacgugcugagcaccuucaucuccgccgcgcgccagggguucguggacagcgacgucgagaccaaggacgugguggagugccucaagcugucccaccagagcgacaucgaggucaccggcgacuccugcaacaacuacaugcugacguacaacaagguggagaacaugaccccccgggaccucggggccugcaucgacugcagcgcccgccacaucaacgcccagguggccaagucccacaacaucgcgcugaucuggaacgucaaggacuucaugagccuguccgagcagcuccggaagcagauccgcagcgccgccaagaagaacaaccugcccuucaagcugaccugcgccaccacgcgccagguggugaacgucgugaccaccaagaucgcccucaagggcggguga

SEQ ID NO: 18127 - RNA, 5841 nt, Artificial Sequence
  SARS-CoV-2__MT479223.1__non-structural protein 3 (NSP3) CDS gc
auggcccccaccaaggugaccuucggcgacgacacggucaucgaggugcagggguacaagagcgugaacaucaccuucgagcuggacgagcgcaucgacaagguccucaacgagaagugcuccgccuacaccguggagcugggcaccgaggugaacgaguucgcgugcgucguggccgacgccgugaucaagacgcugcagccggucagcgagcuccugaccccccuggggaucgaccucgacgagugguccauggccaccuacuaccuguucgacgagagcggcgaguucaagcuggccucccacauguacugcagcuucuacccccccgacgaggacgaggaggagggggacugcgaggaggaggaguucgagccguccacccaguacgaguacggcacggaggacgacuaccagggcaagccccucgaguucggggcgaccagcgccgcccugcagcccgaggaggagcaggaggaggacuggcuggacgacgacucccagcagaccgugggccagcaggacgggagcgaggacaaccagaccacgaccauccagaccaucguggagguccagccccagcucgagauggagcugaccccgguggugcagacgaucgaggucaacuccuucagcggcuaccugaagcucaccgacaacguguacaucaagaacgccgacaucguggaggaggcgaagaaggucaagcccaccgugguggucaacgccgccaacguguaccugaagcacgggggcggcguggccggggcccugaacaaggcgaccaacaacgccaugcaggucgaguccgacgacuacaucgccacgaacggcccccucaagguggggggcagcugcguccuguccggccacaaccuggccaagcacugccuccacgugguggggcccaacgucaacaagggcgaggacauccagcugcugaagagcgccuacgagaacuucaaccagcacgaggugcuccuggcgccgcugcucuccgccgggaucuucggcgccgaccccauccacagccugcgggugugcgucgacaccgugcgcaccaacguguaccuggccgucuucgacaagaaccucuacgacaagcugguguccagcuuccuggagaugaagagcgagaagcagguggagcagaagaucgccgagauccccaaggaggaggucaagcccuucaucaccgaguccaagccgagcguggagcagcggaagcaggacgacaagaagaucaaggcgugcguggaggaggucacgaccacccucgaggagaccaaguuccugacggagaaccugcuccuguacaucgacaucaacgggaaccugcaccccgacuccgccacccucgugagcgacaucgacaucaccuuccugaagaaggacgcccccuacaucgugggcgacgucgugcaggagggcgugcugaccgccgucgugauccccacgaagaaggccgggggcaccaccgagaugcucgcgaaggcccugcgcaaggugccgaccgacaacuacaucacgaccuaccccgggcagggccugaacggguacaccgucgaggaggccaagaccgugcucaagaagugcaaguccgccuucuacauccugcccagcaucaucuccaacgagaagcaggagauccugggcaccgugagcuggaaccuccgggagaugcuggcgcacgccgaggagacgcgcaagcugaugcccgucugcguggagaccaaggccaucguguccaccauccagcggaaguacaagggcaucaagauccaggagggggucguggacuacggcgcccgcuucuacuucuacaccagcaagacgaccguggccucccugaucaacacccucaacgaccugaacgagacccuggucacgaugccgcucggguacgugacccacggccugaaccuggaggaggcggcccgguacaugcgcagccucaaggugcccgccaccgucuccgugagcucccccgacgccgugaccgccuacaacggguaccugacgagcuccagcaagacccccgaggagcacuucaucgagaccaucucccuggcgggcagcuacaaggacuggagcuacuccggccagagcacccagcucgggaucgaguuccugaagcggggcgacaaguccgucuacuacacgagcaacccgaccaccuuccaccuggacggggaggugaucaccuucgacaaccucaagacgcugcugucccuccgcgaggugcggaccaucaaggucuucaccaccguggacaacaucaaccugcacacgcagguggucgacaugagcaugaccuacggccagcaguucggccccaccuaccuggacggggccgacgugaccaagaucaagccccacaacucccacgagggcaagacguucuacgugcucccgaacgacgacacccugcgcgucgaggccuucgaguacuaccacaccaccgaccccagcuuccuggggcgguacauguccgcccucaaccacacgaagaaguggaaguacccccaggugaacggccugaccagcaucaagugggccgacaacaacugcuaccuggcgaccgcccuccugacccugcagcagaucgagcucaaguucaaccccccggcccugcaggacgccuacuaccgcgcgcgggccggggaggccgccaacuucugcgcccugauccucgcguacugcaacaagacggugggcgagcugggcgacguccgcgagaccauguccuaccuguuccagcacgccaaccucgacagcugcaagcgggugcugaacgucgugugcaagaccugcgggcagcagcagaccacccugaagggcguggaggccgucauguacauggggacgcucuccuacgagcaguucaagaagggcgugcagauccccugcaccugcgggaagcaggccaccaaguaccuggugcagcaggagagccccuucgucaugauguccgcccccccggcgcaguacgagcugaagcacggcaccuucacgugcgccagcgaguacaccggcaacuaccagugcgggcacuacaagcacaucaccuccaaggagacccucuacugcaucgacggcgcccugcugacgaagagcagcgaguacaaggggcccaucaccgacguguucuacaaggagaacuccuacaccaccacgaucaagcccgugaccuacaagcucgacggcgucgugugcaccgagaucgaccccaagcuggacaacuacuacaagaaggacaacagcuacuucaccgagcagccgaucgaccuggugcccaaccagcccuaccccaacgccuccuucgacaacuucaaguucgucugcgacaacaucaaguucgccgacgaccucaaccagcugacgggguacaagaagccggcgagccgcgagcugaaggugaccuucuuccccgaccucaacggcgacguggucgccaucgacuacaagcacuacacccccuccuucaagaagggcgccaagcugcugcacaagcccaucguguggcacgugaacaacgccaccaacaaggcgacguacaagccgaacaccuggugcauccggugccucuggagcaccaagcccgucgagaccuccaacagcuucgacgugcugaaguccgaggacgcccaggggauggacaaccuggccugcgaggaccucaagcccgugagcgaggaggucguggagaaccccacgauccagaaggacgugcuggagugcaacgucaagaccaccgagguggugggcgacaucauccugaagccggccaacaacucccucaagaucaccgaggaggucgggcacacggaccugauggccgcguacguggacaacagcucccugaccaucaagaagcccaacgagcucagccgcgugcugggccugaagacccucgccacccacgggcuggccgccgucaacuccgugcccugggacacgaucgccaacuacgcgaagccguuccugaacaagguggucagcaccaccaccaacaucgugacgcgcugccucaaccgggugugcaccaacuacaugcccuacuucuucacccugcugcuccagcugugcaccuucacccgcuccacgaacagccggaucaaggccuccaugcccaccaccaucgccaagaacaccgucaagagcgugggcaaguucugccuggaggccagcuucaacuaccucaagucccccaacuucagcaagcugaucaacaucaucaucugguuccugcuccuguccgugugccugggcagccucaucuacuccacggccgcgcuggggguccugaugagcaaccucggcaugccguccuacugcaccggguaccgcgagggcuaccugaacagcaccaacgugaccaucgccacguacugcaccggcuccauccccugcagcgugugccuguccgggcucgacagccuggacaccuaccccucccuggagaccauccagaucacgaucagcuccuucaagugggaccucaccgccuucggccuggucgccgagugguuccuggccuacauccucuucacccgguucuucuacgugcuggggcuggcggccaucaugcagcucuucuucagcuacuucgccgugcacuucaucuccaacagcuggcugauguggcugaucaucaaccugguccagauggcccccaucuccgcgauggugcgcauguacaucuucuucgccagcuucuacuacguguggaagagcuacguccacgugguggacggcugcaacuccagcaccugcaugaugugcuacaagcggaaccgcgccauccgggucgagugcacgaccaucgugaacgggguccgccgguccuucuacguguacgccaacggcggcaagggguucugcaagcuccacaacuggaacugcgugaacugcgacaccuucugcgccggcagcaccuucaucuccgacgaggucgcgcgcgaccugagccugcaguucaagcggccgaucaaccccacggaccaguccagcuacaucguggacuccgugaccgucaagaacgggagcauccaccucuacuucgacaaggccggccagaagaccuacgagcgccacucccugagccacuucgugaaccuggacaaccuccgggccaacaacaccaaggggucccugcccaucaacgugaucgucuucgacggcaagagcaagugcgaggaguccagcgccaaguccgccagcguguacuacucccagcugaugugccagcccauccuccugcuggaccaggcgcucgugagcgacgucggcgacagcgccgagguggccgugaagauguucgacgccuacgucaacacguucuccagcaccuucaacgugccgauggagaagcugaagacccugguggccaccgcggaggccgagcucgccaagaacgucucccuggacaacgugcugagcacguucaucuccgccgcgcgccagggguucguggacagcgacgucgagaccaaggacgugguggagugccucaagcugucccaccagagcgacaucgaggucaccggcgacuccugcaacaacuacaugcugaccuacaacaagguggagaacaugacgccccgggaccucggggccugcaucgacugcagcgcccgccacaucaacgcccagguggccaagucccacaacaucgcgcugaucuggaacgucaaggacuucaugagccuguccgagcagcuccggaagcagauccgcagcgccgccaagaagaacaaccugcccuucaagcugaccugcgccaccacccgccagguggugaacgucgugacgaccaagaucgcccucaagggcggguga

SEQ ID NO: 18128 - RNA, 5841 nt, Artificial Sequence
  SARS-CoV-2__MT582483.1__non-structural protein 3 (NSP3) CDS gc
auggcccccaccaaggugaccuucggcgacgacacggucaucgaggugcagggguacaagagcgugaacaucaccuucgagcuggacgagcgcaucgacaagguccucaacgagaagugcuccgccuacaccguggagcugggcaccgaggugaacgaguucgcgugcgucgugacggacgccgugaucaagacccugcagccggucagcgagcuccugaccccccuggggaucgaccucgacgagugguccauggccaccuacuaccuguucgacgagagcggcgaguucaagcuggccucccacauguacugcagcuucuacccccccgacgaggacgaggaggagggggacugcgaggaggaggaguucgagccguccacgcaguacgaguacggcaccgaggacgacuaccagggcaagccccucgaguucggggccaccagcgcggcccugcagcccgaggaggagcaggaggaggacuggcuggacgacgacucccagcagaccgugggccagcaggacgggagcgaggacaaccagacgaccaccauccagaccaucguggagguccagccccagcucgagauggagcugacgccgguggugcagaccaucgaggucaacuccuucagcggcuaccugaagcucaccgacaacguguacaucaagaacgccgacaucguggaggaggccaagaaggucaagcccaccgugguggucaacgcggccaacguguaccugaagcacgggggcggcguggccggggcccugaacaaggccacgaacaacgcgaugcaggucgaguccgacgacuacaucgccaccaacggcccccucaagguggggggcagcugcguccuguccggccacaaccuggccaagcacugccuccacgugguggggcccaacgucaacaagggcgaggacauccagcugcugaagagcgccuacgagaacuucaaccagcacgaggugcuccuggccccgcugcucuccgcggggaucuucggcgccgaccccauccacagccugcgggugugcgucgacaccgugcgcaccaacguguaccuggccgucuucgacaagaaccucuacgacaagcugguguccagcuuccuggagaugaagagcgagaagcagguggagcagaagaucgccgagauccccaaggaggaggucaagcccuucaucacggaguccaagccgagcguggagcagcggaagcaggacgacaagaagaucaaggccugcguggaggaggucaccaccacccucgaggagacgaaguuccugaccgagaaccugcuccuguacaucgacaucaacgggaaccugcaccccgacuccgcgacccucgugagcgacaucgacaucaccuuccugaagaaggacgcccccuacaucgugggcgacgucgugcaggagggcgugcugacggccgucgugauccccaccaagaaggccgggggcaccaccgagaugcucgccaaggcgcugcgcaaggugccgacggacaacuacaucaccaccuaccccgggcagggccugaacggguacaccgucgaggaggccaagaccgugcucaagaagugcaaguccgccuucuacauccugcccagcaucaucuccaacgagaagcaggagauccugggcacggugagcuggaaccuccgggagaugcuggcccacgcggaggagacccgcaagcugaugcccgucugcguggagaccaaggccaucguguccaccauccagcggaaguacaagggcaucaagauccaggagggggucguggacuacggcgcccgcuucuacuucuacacgagcaagaccaccguggccucccugaucaacacccucaacgaccugaacgagacgcuggucaccaugccgcucggguacgugacccacggccugaaccuggaggaggccgcgcgguacaugcgcagccucaaggugcccgccaccgucuccgugagcucccccgacgccgugacggccuacaacggguaccugaccagcuccagcaagacccccgaggagcacuucaucgagaccaucucccuggccggcagcuacaaggacuggagcuacuccggccagagcacgcagcucgggaucgaguuccugaagcggggcgacaaguccgucuacuacaccagcaacccgaccaccuuccaccuggacggggaggugaucacguucgacaaccucaagacccugcugucccuccgcgaggugcggaccaucaaggucuucaccacgguggacaacaucaaccugcacacccagguggucgacaugagcaugaccuacggccagcaguucggccccaccuaccuggacggggcggacgugacgaagaucaagccccacaacucccacgagggcaagaccuucuacgugcucccgaacgacgacacccugcgcgucgaggccuucgaguacuaccacaccacggaccccagcuuccuggggcgguacauguccgcccucaaccacaccaagaaguggaaguacccccaggugaacggccugaccagcaucaagugggccgacaacaacugcuaccuggccaccgcgcuccugacgcugcagcagaucgagcucaaguucaaccccccggcccugcaggacgccuacuaccgcgcccgggcgggggaggccgccaacuucugcgcccugauccucgccuacugcaacaagaccgugggcgagcugggcgacguccgcgagaccauguccuaccuguuccagcacgcgaaccucgacagcugcaagcgggugcugaacgucgugugcaagaccugcgggcagcagcagaccacgcugaagggcguggaggccgucauguacauggggacccucuccuacgagcaguucaagaagggcgugcagauccccugcaccugcgggaagcaggccaccaaguaccuggugcagcaggagagccccuucgucaugauguccgcccccccggcccaguacgagcugaagcacggcacguucaccugcgcgagcgaguacaccggcaacuaccagugcgggcacuacaagcacaucaccuccaaggagacgcucuacugcaucgacggcgcccugcugaccaagagcagcgaguacaaggggcccaucaccgacguguucuacaaggagaacuccuacaccacgaccaucaagcccgugaccuacaagcucgacggcgucgugugcaccgagaucgaccccaagcuggacaacuacuacaagaaggacaacagcuacuucacggagcagccgaucgaccuggugcccaaccagcccuaccccaacgccuccuucgacaacuucaaguucgucugcgacaacaucaaguucgccgacgaccucaaccagcugaccggguacaagaagccggccagccgcgagcugaaggugaccuucuuccccgaccucaacggcgacguggucgcgaucgacuacaagcacuacacccccuccuucaagaagggcgccaagcugcugcacaagcccaucguguggcacgugaacaacgccacgaacaaggccaccuacaagccgaacaccuggugcauccggugccucuggagcaccaagcccgucgagacguccaacagcuucgacgugcugaaguccgaggacgcgcaggggauggacaaccuggccugcgaggaccucaagcccgugagcgaggaggucguggagaaccccaccauccagaaggacgugcuggagugcaacgucaagaccaccgagguggugggcgacaucauccugaagccggccaacaacucccucaagaucacggaggaggucgggcacaccgaccugauggccgccuacguggacaacagcucccugaccaucaagaagcccaacgagcucagccgcgugcugggccugaagacccucgcgacgcacgggcuggccgccgucaacuccgugcccugggacaccaucgccaacuacgccaagccguuccugaacaagguggucagcaccaccacgaacaucgugacccgcugccucaaccgggugugcaccaacuacaugcccuacuucuucacccugcugcuccagcugugcaccuucacgcgcuccaccaacagccggaucaaggcguccaugcccaccaccaucgccaagaacacggucaagagcgugggcaaguucugccuggaggccagcuucaacuaccucaagucccccaacuucagcaagcugaucaacaucaucaucugguuccugcuccuguccgugugccugggcagccucaucuacuccaccgccgcccuggggguccugaugagcaaccucggcaugccguccuacugcaccggguaccgcgagggcuaccugaacagcaccaacgugacgaucgcgaccuacugcaccggcuccauccccugcagcgugugccuguccgggcucgacagccuggacaccuaccccucccuggagacgauccagaucaccaucagcuccuucaagugggaccucaccgccuucggccuggucgccgagugguuccuggccuacauccucuucacccgguucuucuacgugcuggggcuggccgcgaucaugcagcucuucuucagcuacuucgccgugcacuucaucuccaacagcuggcugauguggcugaucaucaaccugguccagauggcccccaucuccgccauggugcgcauguacaucuucuucgcgagcuucuacuacguguggaagagcuacguccacgugguggacggcugcaacuccagcacgugcaugaugugcuacaagcggaaccgcgccacccgggucgagugcaccaccaucgugaacgggguccgccgguccuucuacguguacgccaacggcggcaagggguucugcaagcuccacaacuggaacugcgugaacugcgacacguucugcgccggcagcaccuucaucuccgacgaggucgcccgcgaccugagccugcaguucaagcggccgaucaaccccaccgaccaguccagcuacaucguggacuccgugaccgucaagaacgggagcauccaccucuacuucgacaaggcgggccagaagacguacgagcgccacucccugagccacuucgugaaccuggacaaccuccgggccaacaacaccaaggggucccugcccaucaacgugaucgucuucgacggcaagagcaagugcgaggaguccagcgccaaguccgccagcguguacuacucccagcugaugugccagcccauccuccugcuggaccaggcccucgugagcgacgucggcgacagcgcggagguggccgugaagauguucgacgccuacgucaacaccuucuccagcaccuucaacgugccgauggagaagcugaagacgcugguggccaccgccgaggcggagcucgccaagaacgucucccuggacaacgugcugagcaccuucaucuccgccgcccgccagggguucguggacagcgacgucgagaccaaggacgugguggagugccucaagcugucccaccagagcgacaucgaggucacgggcgacuccugcaacaacuacaugcugaccuacaacaagguggagaacaugaccccccgggaccucggggcgugcaucgacugcagcgcccgccacaucaacgcccagguggccaagucccacaacaucgcccugaucuggaacgucaaggacuucaugagccuguccgagcagcuccggaagcagauccgcagcgcggccaagaagaacaaccugcccuucaagcugaccugcgccacgacccgccagguggugaacgucgugaccaccaagaucgcccucaagggcggguga

SEQ ID NO: 18129 - RNA, 5841 nt, Artificial Sequence
  SARS-CoV-2__MT582496.1__non-structural protein 3 (NSP3) CDS gc
auggcccccaccaaggugaccuucggcgacgacacggucaucgaggugcagggguacaagagcgugaacaucaccuucgagcuggacgagcgcaucgacaagguccucaacgagaagugcuccgccuacaccguggagcugggcaccgaggugaacgaguucgcgugcgucgugacggacgccgugaucaagacccugcagccggucagcgagcuccugaccccccuggggaucgaccucgacgagugguccauggccaccuacuaccuguucgacgagagcggcgaguucaagcuggccucccacauguacugcagcuucuacccccccgacgaggacgaggaggagggggacugcgaggaggaggaguucgagccguccacgcaguacgaguacggcaccgaggacgacuaccagggcaagccccucgaguucggggccaccagcgcggcccugcagcccgaggaggagcaggaggaggacuggcuggacgacgacucccagcagaccgugggccagcaggacgggagcgaggacaaccagacgaccaccauccagaccaucguggagguccagccccagcucgagauggagcugacgccgguggugcagaccaucgaggucaacuccuucagcggcuaccugaagcucaccgacaacguguacaucaagaacgccgacaucguggaggaggccaagaaggucaagcccaccgugguggucaacgcggccaacguguaccugaagcacgggggcggcguggccggggcccugaacaaggccacgaacaacgcgaugcaggucgaguccgacgacuacaucgccaccaacggcccccucaagguggggggcagcugcguccuguccggccacaaccuggccaagcacugccuccacgugguggggcccaacgucaacaagggcgaggacauccagcugcugaagagcgccuacgagaacuucaaccagcacgaggugcuccuggccccgcugcucuccgcggggaucuucggcgccgaccccauccacagccugcgggugugcgucgacaccgugcgcaccaacguguaccuggccgucuucgacaagaaccucuacgacaagcugguguccagcuuccuggagaugaagagcgagaagcagguggagcagaagaucgccgagauccccaaggaggaggucaagcccuucaucacggaguccaagccgagcguggagcagcggaagcaggacgacaagaagaucaaggccugcguggaggaggucaccaccacccucgaggagacgaaguuccugaccgagaaccugcuccuguacaucgacaucaacgggaaccugcaccccgacuccgcgacccucgugagcgacaucgacaucaccuuccugaagaaggacgcccccuacaucgugggcgacgucgugcaggagggcgugcugacggccgucgugauccccaccaagaaggccgggggcaccaccgagaugcucgccaaggcgcugcgcaaggugccgacggacaacuacaucaccaccuaccccgggcagggccugaacggguacaccgucgaggaggccaagaccgugcucaagaagugcaaguccgccuucuacauccugcccagcaucaucuccaacgagaagcaggagauccugggcacggugagcuggaaccuccgggagaugcuggcccacgcggaggagacccgcaagcugaugcccgucugcguggagaccaaggccaucguguccaccauccagcggaaguacaagggcaucaagauccaggagggggucguggacuacggcgcccgcuucuacuucuacacgagcaagaccaccguggccucccugaucaacacccucaacgaccugaacgagacgcuggucaccaugccgcucggguacgugacccacggccugaaccuggaggaggccgcgugguacaugcggagccucaaggugcccgccaccgucuccgugagcucccccgacgccgugacggccuacaacggguaccugaccagcuccagcaagacccccgaggagcacuucaucgagaccaucucccuggccggcagcuacaaggacuggagcuacuccggccagagcacgcagcucgggaucgaguuccugaagcgcggcgacaaguccgucuacuacaccagcaacccgaccaccuuccaccuggacggggaggugaucacguucgacaaccucaagacccugcugucccuccgggaggugcgcaccaucaaggucuucaccacgguggacaacaucaaccugcacacccagguggucgacaugagcaugaccuacggccagcaguucggccccaccuaccuggacggggcggacgugacgaagaucaagccccacaacucccacgagggcaagaccuucuacgugcucccgaacgacgacacccugcgggucgaggccuucgaguacuaccacaccacggaccccagcuuccuggggcgcuacauguccgcccucaaccacaccaagaaguggaaguacccccaggugaacggccugaccagcaucaagugggccgacaacaacugcuaccuggccaccgcgcuccugacgcugcagcagaucgagcucaaguucaaccccccggcccugcaggacgccuacuaccgggcccgcgcgggggaggccgccaacuucugcgcccugauccucgccuacugcaacaagaccgugggcgagcugggcgacguccgggagaccauguccuaccuguuccagcacgcgaaccucgacagcugcaagcgcgugcugaacgucgugugcaagaccugcgggcagcagcagaccacgcugaagggcguggaggccgucauguacauggggacccucuccuacgagcaguucaagaagggcgugcagauccccugcaccugcgggaagcaggccaccaaguaccuggugcagcaggagagccccuucgucaugauguccgcccccccggcccaguacgagcugaagcacggcacguucaccugcgcgagcgaguacaccggcaacuaccagugcgggcacuacaagcacaucaccuccaaggagacgcucuacugcaucgacggcgcccugcugaccaagagcagcgaguacaaggggcccaucaccgacguguucuacaaggagaacuccuacaccacgaccaucaagcccgugaccuacaagcucgacggcgucgugugcaccgagaucgaccccaagcuggacaacuacuacaagaaggacaacagcuacuucacggagcagccgaucgaccuggugcccaaccagcccuaccccaacgccuccuucgacaacuucaaguucgucugcgacaacaucaaguucgccgacgaccucaaccagcugaccggguacaagaagccggccagccgggagcugaaggugaccuucuuccccgaccucaacggcgacguggucgcgaucgacuacaagcacuacacccccuccuucaagaagggcgccaagcugcugcacaagcccaucguguggcacgugaacaacgccacgaacaaggccaccuacaagccgaacaccuggugcauccgcugccucuggagcaccaagcccgucgagacguccaacagcuucgacgugcugaaguccgaggacgcgcaggggauggacaaccuggccugcgaggaccucaagcccgugagcgaggaggucguggagaaccccaccauccagaaggacgugcuggagugcaacgucaagaccaccgagguggugggcgacaucauccugaagccggccaacaacucccucaagaucacggaggaggucgggcacaccgaccugauggccgccuacguggacaacagcucccugaccaucaagaagcccaacgagcucagccgggugcugggccugaagacccucgcgacgcacgggcuggccgccgucaacuccgugcccugggacaccaucgccaacuacgccaagccguuccugaacaagguggucagcaccaccacgaacaucgugacccgcugccucaaccgcgugugcaccaacuacaugcccuacuucuucacccugcugcuccagcugugcaccuucacgcgguccaccaacagccgcaucaaggcguccaugcccaccaccaucgccaagaacacggucaagagcgugggcaaguucugccuggaggccagcuucaacuaccucaagucccccaacuucagcaagcugaucaacaucaucaucugguuccugcuccuguccgugugccugggcagccucaucuacuccaccgccgcccuggggguccugaugagcaaccucggcaugccguccuacugcaccggguaccgggagggcuaccugaacagcaccaacgugacgaucgcgaccuacugcaccggcuccauccccugcagcgugugccuguccgggcucgacagccuggacaccuaccccucccuggagacgauccagaucaccaucagcuccuucaagugggaccucaccgccuucggccuggucgccgagugguuccuggccuacauccucuucacccgcuucuucuacgugcuggggcuggccgcgaucaugcagcucuucuucagcuacuucgccgugcacuucaucuccaacagcuggcugauguggcugaucaucaaccugguccagauggcccccaucuccgccauggugcggauguacaucuucuucgcgagcuucuacuacguguggaagagcuacguccacgugguggacggcugcaacuccagcacgugcaugaugugcuacaagcgcaaccgggccacccgcgucgagugcaccaccaucgugaacgggguccggcgcuccuucuacguguacgccaacggcggcaagggguucugcaagcuccacaacuggaacugcgugaacugcgacacguucugcgccggcagcaccuucaucuccgacgaggucgcccgggaccugagccugcaguucaagcgcccgaucaaccccaccgaccaguccagcuacaucguggacuccgugaccgucaagaacgggagcauccaccucuacuucgacaaggcgggccagaagacguacgagcggcacucccugagccacuucgugaaccuggacaaccuccgcgccaacaacaccaaggggucccugcccaucaacgugaucgucuucgacggcaagagcaagugcgaggaguccagcgccaaguccgccagcguguacuacucccagcugaugugccagcccauccuccugcuggaccaggcccucgugagcgacgucggcgacagcgcggagguggccgugaagauguucgacgccuacgucaacaccuucuccagcaccuucaacgugccgauggagaagcugaagacgcugguggccaccgccgaggcggagcucgccaagaacgucucccuggacaacgugcugagcaccuucaucuccgccgcccggcagggguucguggacagcgacgucgagaccaaggacgugguggagugccucaagcugucccaccagagcgacaucgaggucacgggcgacuccugcaacaacuacaugcugaccuacaacaagguggagaacaugaccccccgcgaccucggggcgugcaucgacugcagcgcccggcacaucaacgcccagguggccaagucccacaacaucgcccugaucuggaacgucaaggacuucaugagccuguccgagcagcuccgcaagcagauccggagcgcggccaagaagaacaaccugcccuucaagcugaccugcgccacgacccgccagguggugaacgucgugaccaccaagaucgcccucaagggcggguga

SEQ ID NO: 18130 - RNA, 5841 nt, Artificial Sequence
  SARS-CoV-2__MT499218.1__non-structural protein 3 (NSP3) CDS gc
auggcccccaccaaggugaccuucggcgacgacacggucaucgaggugcagggguacaagagcgugaacaucaccuucgagcuggacgagcgcaucgacaagguccucaacgagaagugcuccgccuacaccguggagcugggcaccgaggugaacgaguucgcgugcgucguggccgacgccgugaucaagacgcugcagccggucagcgagcuccugaccccccuggggaucgaccucgacgagugguccauggccaccuacuaccuguucgacgagagcggcgaguucaagcuggccucccacauguacugcagcuucuacccccccgacgaggacgaggaggagggggacugcgaggaggaggaguucgagccguccacccaguacgaguacggcacggaggacgacuaccagggcaagccccucgaguucggggcgaccagcgccgcccugcagcccgaggaggagcaggaggaggacuggcuggacgacgacucccagcagaccgugggccagcaggacgggagcgaggacaaccagaccacgaccauccagaccaucguggagguccagccccagcucgagauggagcugaccccgguggugcagacgaucgaggucaacuccuucagcggcuaccugaagcucaccgacaacguguacaucaagaacgccgacaucguggaggaggcgaagaaggucaagcccaccgugguggucaacgccgccaacguguaccugaagcacgggggcggcguggccggggcccugaacaaggcgaccaacaacgccaugcaggucgaguccgacgacuacaucgccacgaacggcccccucaagguggggggcagcugcguccuguccggccacaaccuggccaagcacugccuccacgugguggggcccaacgucaacaagggcgaggacauccagcugcugaagagcgccuacgagaacuucaaccagcacgaggugcuccuggcgccgcugcucuccgccgggaucuucggcgccgaccccauccacagccugcgggugugcgucgacaccgugcgcaccaacguguaccuggccgucuucgacaagaaccucuacgacaagcugguguccagcuuccuggagaugaagagcgagaagcagguggagcagaagaucgccgagauccccaaggaggaguucaagcccuucaucaccgaguccaagccgagcgucgagcagcggaagcaggacgacaagaagaucaaggcgugcguggaggaggugacgaccacccucgaggagaccaaguuccugacggagaaccugcuccuguacaucgacaucaacgggaaccugcaccccgacuccgccacccucgucagcgacaucgacaucaccuuccugaagaaggacgcccccuacaucgugggcgacgugguccaggagggcgugcugaccgccguggucauccccacgaagaaggccgggggcaccaccgagaugcucgcgaaggcccugcgcaaggugccgaccgacaacuacaucacgaccuaccccgggcagggccugaacggguacaccguggaggaggccaagaccguccucaagaagugcaaguccgccuucuacauccugcccagcaucaucuccaacgagaagcaggagauccugggcaccgugagcuggaaccuccgggagaugcuggcgcacgccgaggagacgcgcaagcugaugcccgugugcgucgagaccaaggccaucguguccaccauccagcggaaguacaagggcaucaagauccaggaggggguggucgacuacggcgcccgcuucuacuucuacaccagcaagacgaccguggccucccugaucaacacccucaacgaccugaacgagacccuggugacgaugccgcucggguacgucacccacggccugaaccuggaggaggcggcccgguacaugcgcagccucaaggugcccgccaccguguccgucagcucccccgacgccgugaccgccuacaacggguaccugacgagcuccagcaagacccccgaggagcacuucaucgagaccaucucccuggcgggcagcuacaaggacuggagcuacuccggccagagcacccagcucgggaucgaguuccugaagcggggcgacaaguccguguacuacacgagcaacccgaccaccuuccaccuggacggggaggucaucaccuucgacaaccucaagacgcugcugucccuccgcgaggugcggaccaucaagguguucaccaccgucgacaacaucaaccugcacacgcaggugguggacaugagcaugaccuacggccagcaguucggccccaccuaccuggacggggccgacgucaccaagaucaagccccacaacucccacgagggcaagacguucuacgugcucccgaacgacgacacccugcgcguggaggccuucgaguacuaccacaccaccgaccccagcuuccuggggcgguacauguccgcccucaaccacacgaagaaguggaaguacccccaggucaacggccugaccagcaucaagugggccgacaacaacugcuaccuggcgaccgcccuccugacccugcagcagaucgagcucaaguucaaccccccggcccugcaggacgccuacuaccgcgcgcgggccggggaggccgccaacuucugcgcccugauccucgcguacugcaacaagacggugggcgagcugggcgacgugcgcgagaccauguccuaccuguuccagcacgccaaccucgacagcugcaagcggguccugaacguggucugcaagaccugcgggcagcagcagaccacccugaagggcguggaggccgugauguacauggggacgcucuccuacgagcaguucaagaagggcguccagauccccugcaccugcgggaagcaggccaccaaguaccuggugcagcaggagagccccuucgugaugauguccgcccccccggcgcaguacgagcugaagcacggcaccuucacgugcgccagcgaguacaccggcaacuaccagugcgggcacuacaagcacaucaccuccaaggagacccucuacugcaucgacggcgcccugcugacgaagagcagcgaguacaaggggcccaucaccgacgucuucuacaaggagaacuccuacaccaccacgaucaagcccgugaccuacaagcucgacggcguggucugcaccgagaucgaccccaagcuggacaacuacuacaagaaggacaacagcuacuucaccgagcagccgaucgaccuggugcccaaccagcccuaccccaacgccuccuucgacaacuucaaguucgugugcgacaacaucaaguucgccgacgaccucaaccagcugacgggguacaagaagccggcgagccgcgagcugaaggucaccuucuuccccgaccucaacggcgacgugguggccaucgacuacaagcacuacacccccuccuucaagaagggcgccaagcugcugcacaagcccaucgucuggcacgugaacaacgccaccaacaaggcgacguacaagccgaacaccuggugcauccggugccucuggagcaccaagcccguggagaccuccaacagcuucgacguccugaaguccgaggacgcccaggggauggacaaccuggccugcgaggaccucaagcccgugagcgaggagguggucgagaaccccacgauccagaaggacgugcuggagugcaacgugaagaccaccgaggucgugggcgacaucauccugaagccggccaacaacucccucaagaucaccgaggagguggggcacacggaccugauggccgcguacgucgacaacagcucccugaccaucaagaagcccaacgagcucagccgcgugcugggccugaagacccucgccacccacgggcuggccgccgugaacuccguccccugggacacgaucgccaacuacgcgaagccguuccugaacaagguggugagcaccaccaccaacaucgucacgcgcugccucaaccgggugugcaccaacuacaugcccuacuucuucacccugcugcuccagcugugcaccuucacccgcuccacgaacagccggaucaaggccuccaugcccaccaccaucgccaagaacaccgugaagagcgucggcaaguucugccuggaggccagcuucaacuaccucaagucccccaacuucagcaagcugaucaacaucaucaucugguuccugcuccuguccgugugccugggcagccucaucuacuccacggccgcgcugggggugcugaugagcaaccucggcaugccguccuacugcaccggguaccgcgagggcuaccugaacagcaccaacgucaccaucgccacguacugcaccggcuccauccccugcagcgugugccuguccgggcucgacagccuggacaccuaccccucccuggagaccauccagaucacgaucagcuccuucaagugggaccucaccgccuucggccugguggccgagugguuccuggccuacauccucuucacccgguucuucuacguccuggggcuggcggccaucaugcagcucuucuucagcuacuucgccgugcacuucaucuccaacagcuggcugauguggcugaucaucaaccuggugcagauggcccccaucuccgcgaugguccgcauguacaucuucuucgccagcuucuacuacguguggaagagcuacgugcacgucguggacggcugcaacuccagcaccugcaugaugugcuacaagcggaaccgcgccacgcggguggagugcaccaccaucgucaacggggugcgccgguccuucuacgucuacgccaacggcggcaagggguucugcaagcuccacaacuggaacugcgugaacugcgacaccuucugcgccggcagcacguucaucuccgacgagguggcgcgcgaccugagccugcaguucaagcggccgaucaaccccaccgaccaguccagcuacaucgucgacuccgugaccgugaagaacgggagcauccaccucuacuucgacaaggccggccagaagaccuacgagcgccacucccugagccacuucgucaaccuggacaaccuccgggccaacaacacgaaggggucccugcccaucaacgugaucguguucgacggcaagagcaagugcgaggaguccagcgccaaguccgccagcgucuacuacucccagcugaugugccagcccauccuccugcuggaccaggcgcucgugagcgacgugggcgacagcgccgaggucgccgugaagauguucgacgccuacgugaacaccuucuccagcaccuucaacgucccgauggagaagcugaagacccugguggccacggcggaggccgagcucgccaagaacgugucccuggacaacguccugagcaccuucaucuccgccgcgcgccagggguucguggacagcgacguggagaccaaggacgucguggagugccucaagcugucccaccagagcgacaucgaggugaccggcgacuccugcaacaacuacaugcugacguacaacaaggucgagaacaugaccccccgggaccucggggccugcaucgacugcagcgcccgccacaucaacgcccagguggccaagucccacaacaucgcgcugaucuggaacgugaaggacuucaugagccuguccgagcagcuccggaagcagauccgcagcgccgccaagaagaacaaccugcccuucaagcugaccugcgccaccacgcgccaggucgugaacguggucaccaccaagaucgcccucaagggcggguga

SEQ ID NO: 18131 - RNA, 5841 nt, Artificial Sequence
  SARS-CoV-2__MT576035.1__non-structural protein 3 (NSP3) CDS gc
auggcccccaccaaggugaccuucggcgacgacacggucaucgaggugcagggguacaagagcgugaacaucaccuucgagcuggacgagcgcaucgacaagguccucaacgagaagugcuccgccuacaccguggagcugggcaccgaggugaacgaguucgcgugcgucguggccgacgccgugaucaagacgcugcagccggucagcgagcuccugaccccccuggggaucgaccucgacgagugguccauggccaccuacuaccuguucgacgagagcggcgaguucaagcuggccucccacauguacugcagcuucuacccccccgacgaggacgaggaggagggggacugcgaggaggaggaguucgagccguccacccaguacgaguacggcacggaggacgacuaccagggcaagccccucgaguucggggcgaccagcgccgcccugcagcccgaggaggagcaggaggaggacuggcuggacgacgacucccagcagaccgugggccagcaggacgggagcgaggacaaccagaccacgaccauccagaccaucguggagguccagccccagcucgagauggagcugaccccgguggugcagacgaucgaggucaacuccuucagcggcuaccugaagcucaccgacaacguguacaucaagaacgccgacaucguggaggaggcgaagaaggucaagcccaccgugguggucaacgccgccaacguguaccugaagcacgggggcggcguggccggggcccugaacaaggcgaccaacaacgccaugcaggucgaguccgacgacuacaucgccacgaacggcccccucaagguggggggcagcugcguccuguccggccacaaccuggccaagcacugccuccacgugguggggcccaacgucaacaagggcgaggacauccagcugcugaagagcgccuacgagaacuucaaccagcacgaggugcuccuggcgccgcugcucuccgccgggaucuucggcgccgaccccauccacagccugcgggugugcgucgacaccgugcgcaccaacguguaccuggccgucuucgacaagaaccucuacgacaagcugguguccagcuuccuggagaugaagagcgagaagcagguggagcagaagaucgccgagauccccaaggaggaggucaagcccuucaucaccgaguccaagccgagcguggagcagcggaagcaggacgacaagaagaucaaggcgugcguggaggaggucacgaccacccucgaggagaccaaguuccugacggagaaccugcuccuguacaucgacaucaacgggaaccugcaccccgacuccgccacccucgugagcgacaucgacaucaccuuccugaagaaggacgcccccuacaucgugggcgacgucgugcaggagggcgugcugaccgccgucgugauccccacgaagaaggccgggggcaccaccgagaugcucgcgaaggcccugcgcaaggugccgaccgacaacuacaucacgaccuaccccgggcagggccugaacggguacaccgucgaggaggccaagaccgugcucaagaagugcaaguccgccuucuacauccugcccagcaucaucuccaacgagaagcaggagauccugggcaccgugagcuggaaccuccgggagaugcuggcgcacgccgaggagacgcgcaagcugaugcccgucugcguggagaccaaggccaucguguccaccauccagcggaaguacaagggcaucaagauccaggagggggucguggacuacggcgcccgcuucuacuucuacaccagcaagacgaccguggccucccugaucaacacccucaacgaccugaacgagacccuggucacgaugccgcucggguacgugacccacggccugaaccuggaggaggcggcccgguacaugcgcagccucaaggugcccgccaccgucuccgugagcucccccgacgccgugaccgccuacaacggguaccugacgagcuccagcaagacccccgaggagcacuucaucgagaccaucucccuggcgggcagcuacaaggacuggagcuacuccggccagagcacccagcucgggaucgaguuccugaagcggggcgacaaguccgucuacuacacgagcaacccgaccaccuuccaccuggacggggaggugaucaccuucgacaaccucaagacgcugcugucccuccgcgaggugcggaccaucaaggucuucaccaccguggacaacaucaaccugcacacgcagguggucgacaugagcaucaccuacggccagcaguucggccccaccuaccuggacggggccgacgugaccaagaucaagccccacaacucccacgagggcaagacguucuacgugcucccgaacgacgacacccugcgcgucgaggccuucgaguacuaccacaccaccgaccccagcuuccuggggcgguacauguccgcccucaaccacacgaagaaguggaaguacccccaggugaacggccugaccagcaucaagugggccgacaacaacugcuaccuggcgaccgcccuccugacccugcagcagaucgagcucaaguucaaccccccggcccugcaggacgccuacuaccgcgcgcgggccggggaggccgccaacuucugcgcccugauccucgcguacugcaacaagacggugggcgagcugggcgacguccgcgagaccauguccuaccuguuccagcacgccaaccucgacagcugcaagcgggugcugaacgucgugugcaagaccugcgggcagcagcagaccacccugaagggcguggaggccgucauguacauggggacgcucuccuacgagcaguucaagaagggcgugcagauccccugcaccugcgggaagcaggccaccaaguaccuggugcagcaggagagccccuucgucaugauguccgcccccccggcgcaguacgagcugaagcacggcaccuucacgugcgccagcgaguacaccggcaacuaccagugcgggcacuacaagcacaucaccuccaaggagacccucuacugcaucgacggcgcccugcugacgaagagcagcgaguacaaggggcccaucaccgacguguucuacaaggagaacuccuacaccaccacgaucaagcccgugaccuacaagcucgacggcgucgugugcaccgagaucgaccccaagcuggacaacuacuacaagaaggacaacagcuacuucaccgagcagccgaucgaccuggugcccaaccagcccuaccccaacgccuccuucgacaacuucaaguucgucugcgacaacaucaaguucgccgacgaccucaaccagcugacgggguacaagaagccggcgagccgcgagcugaaggugaccuucuuccccgaccucaacggcgacguggucgccaucgacuacaagcacuacacccccuccuucaagaagggcgccaagcugcugcacaagcccaucguguggcacgugaacaacgccaccaacaaggcgacguacaagccgaacaccuggugcauccggugccucuggagcaccaagcccgucgagaccuccaacagcuucgacgugcugaaguccgaggacgcccaggggauggacaaccuggccugcgaggaccucaagcccgugagcgaggaggucguggagaaccccacgauccagaaggacgugcuggagugcaacgucaagaccaccgagguggugggcgacaucauccugaagccggccaacaacucccucaagaucaccgaggaggucgggcacacggaccugauggccgcguacguggacaacagcucccugaccaucaagaagcccaacgagcucagccgcgugcugggccugaagacccucgccacccacgggcuggccgccgucaacuccgugcccugggacacgaucgccaacuacgcgaagccguuccugaacaagguggucagcaccaccaccaacaucgugacgcgcugccucaaccgggugugcaccaacuacaugcccuacuucuucacccugcugcuccagcugugcaccuucacccgcuccacgaacagccggaucaaggccuccaugcccaccaccaucgccaagaacaccgucaagagcgugggcaaguucugccuggaggccagcuucaacuaccucaagucccccaacuucagcaagcugaucaacaucaucaucugguuccugcuccuguccgugugccugggcagccucaucuacuccacggccgcgcuggggguccugaugagcaaccucggcaugccguccuacugcaccggguaccgcgagggcuaccugaacagcaccaacgugaccaucgccacguacugcaccggcuccauccccugcagcgugugccuguccgggcucgacagccuggacaccuaccccucccuggagaccauccagaucacgaucagcuccuucaagugggaccucaccgccuucggccuggucgccgagugguuccuggccuacauccucuucacccgguucuucuacgugcuggggcuggcggccaucaugcagcucuucuucagcuacuucgccgugcacuucaucuccaacagcuggcugauguggcugaucaucaaccugguccagauggcccccaucuccgcgauggugcgcauguacaucuucuucgccagcuucuacuacguguggaagagcuacguccacgugguggacggcugcaacuccagcaccugcaugaugugcuacaagcggaaccgcgccacgcgggucgagugcaccaccaucgugaacgggguccgccgguccuucuacguguacgccaacggcggcaagggguucugcaagcuccacaacuggaacugcgugaacugcgacaccuucugcgccggcagcacguucaucuccgacgaggucgcgcgcgaccugagccugcaguucaagcggccgaucaaccccaccgaccaguccagcuacaucguggacuccgugaccgucaagaacgggagcauccaccucuacuucgacaaggccggccagaagaccuacgagcgccacucccugagccacuucgugaaccuggacaaccuccgggccaacaacacgaaggggucccugcccaucaacgugaucgucuucgacggcaagagcaagugcgaggaguccagcgccaaguccgccagcguguacuacucccagcugaugugccagcccauccuccugcuggaccaggcgcucgugagcgacgucggcgacagcgccgagguggccgugaagauguucgacgccuacgucaacaccuucuccagcaccuucaacgugccgauggagaagcugaagacccugguggccacggcggaggccgagcucgccaagaacgucucccuggacaacgugcugagcaccuucaucuccgccgcgcgccagggguucguggacagcgacgucgagaccaaggacgugguggagugccucaagcugucccaccagagcgacaucgaggucaccggcgacuccugcaacaacuacaugcugacguacaacaagguggagaacaugaccccccgggaccucggggccugcaucgacugcagcgcccgccacaucaacgcccagguggccaagucccacaacaucgcgcugaucuggaacgucaaggacuucaugagccuguccgagcagcuccggaagcagauccgcagcgccgccaagaagaacaaccugcccuucaagcugaccugcgccaccacgcgccagguggugaacgucgugaccaccaagaucgcccucaagggcggguga

SEQ ID NO: 18132 - RNA, 5841 nt, Artificial Sequence
  SARS-CoV-2__MT576041.1__non-structural protein 3 (NSP3) CDS gc
auggcccccaccaaggugaccuucggcgacgacacggucaucgaggugcagggguacaagagcgugaacaucaccuucgagcuggacgagcgcaucgacaagguccucaacgagaagugcuccgccuacaccguggagcugggcaccgaggugaacgaguucgcgugcgucguggccgacgccgugaucaagacgcugcagccggucagcgagcuccugaccccccuggggaucgaccucgacgagugguccauggccaccuacuaccuguucgacgagagcggcgaguucaagcuggccucccacauguacugcagcuucuacccccccgacgaggacgaggaggagggggacugcgaggaggaggaguucgagccguccacccaguacgaguacggcacggaggacgacuaccagggcaagccccucgaguucggggcgaccagcgccgcccugcagcccgaggaggagcaggaggaggacuggcuggacgacgacucccagcagaccgugggccagcaggacgggagcgaggacaaccagaccacgaccauccagaccaucguggagguccagccccagcucgagauggagcugaccccgguggugcagacgaucgaggucaacuccuucagcggcuaccugaagcucaccgacaacguguacaucaagaacgccgacaucguggaggaggcgaagaaggucaagcccaccgugguggucaacgccgccaacguguaccugaagcacgggggcggcguggccggggcccugaacaaggcgaccaacaacgccaugcaggucgaguccgacgacuacaucgccacgaacggcccccucaagguggggggcagcugcguccuguccggccacaaccuggccaagcacugccuccacgugguggggcccaacgucaacaagggcgaggacauccagcugcugaagagcgccuacgagaacuucaaccagcacgaggugcuccuggcgccgcugcucuccgccgggaucuucggcgccgaccccauccacagccugcgggugugcgucgacaccgugcgcaccaacguguaccuggccgucuucgacaagaaccucuacgacaagcugguguccagcuuccuggagaugaagagcgagaagcagguggagcagaagaucgccgagauccccaaggaggaggucaagcccuucaucaccgaguccaagccgagcguggagcagcggaagcaggacgacaagaagaucaaggcgugcguggaggaggucacgaccacccucgaggagaccaaguuccugacggagaaccugcuccuguacaucgacaucaacgggaaccugcaccccgacuccaccacccucgugagcgacaucgacaucaccuuccugaagaaggacgcccccuacaucgugggcgacgucgugcaggagggcgugcugacggccgucgugauccccaccaagaaggccgggggcaccaccgagaugcucgccaaggcgcugcgcaaggugccgacggacaacuacaucaccaccuaccccgggcagggccugaacggguacaccgucgaggaggccaagaccgugcucaagaagugcaaguccgccuucuacauccugcccagcaucaucuccaacgagaagcaggagauccugggcacggugagcuggaaccuccgggagaugcuggcccacgcggaggagacccgcaagcugaugcccgucugcguggagaccaaggccaucguguccaccauccagcggaaguacaagggcaucaagauccaggagggggucguggacuacggcgcccgcuucuacuucuacacgagcaagaccaccguggccucccugaucaacacccucaacgaccugaacgagacgcuggucaccaugccgcucggguacgugacccacggccugaaccuggaggaggccgcgcgguacaugcgcagccucaaggugcccgccaccgucuccgugagcucccccgacgccgugacggccuacaacggguaccugaccagcuccagcaagacccccgaggagcacuucaucgagaccaucucccuggccggcagcuacaaggacuggagcuacuccggccagagcacgcagcucgggaucgaguuccugaagcggggcgacaaguccgucuacuacaccagcaacccgaccaccuuccaccuggacggggaggugaucacguucgacaaccucaagacccugcugucccuccgcgaggugcggaccaucaaggucuucaccacgguggacaacaucaaccugcacacccagguggucgacaugagcaugaccuacggccagcaguucggccccaccuaccuggacggggcggacgugacgaagaucaagccccacaacucccacgagggcaagaccuucuacgugcucccgaacgacgacacccugcgcgucgaggccuucgaguacuaccacaccacggaccccagcuuccuggggcgguacauguccgcccucaaccacaccaagaaguggaaguacccccaggugaacggccugaccagcaucaagugggccgacaacaacugcuaccuggccaccgcgcuccugacgcugcagcagaucgagcucaaguucaaccccccggcccugcaggacgccuacuaccgcgcccgggcgggggaggccgccaacuucugcgcccugauccucgccuacugcaacaagaccgugggcgagcugggcgacguccgcgagaccauguccuaccuguuccagcacgcgaaccucgacagcugcaagcgggugcugaacgucgugugcaagaccugcgggcagcagcagaccacgcugaagggcguggaggccgucaucuacauggggacccucuccuacgagcaguucaagaagggcgugcagauccccugcaccugcgggaagcaggccaccaaguaccuggugcagcaggagagccccuucgucaugauguccgcccccccggcccaguacgagcugaagcacggcacguucaccugcgcgagcgaguacaccggcaacuaccagugcgggcacuacaagcacaucaccuccaaggagacgcucuacugcaucgacggcgcccugcugaccaagagcagcgaguacaaggggcccaucaccgacguguucuacaaggagaacuccuacaccacgaccaucaagcccgugaccuacaagcucgacggcgucgugugcaccgagaucgaccccaagcuggacaacuacuacaagaaggacaacagcuacuucacggagcagccgaucgaccuggugcccaaccagcccuaccccaacgccuccuucgacaacuucaaguucgucugcgacaacaucaaguucgccgacgaccucaaccagcugaccggguacaagaagccggccagccgcgagcugaaggugaccuucuuccccgaccucaacggcgacguggucgcgaucgacuacaagcacuacacccccuccuucaagaagggcgccaagcugcugcacaagcccaucguguggcacgugaacaacgccacgaacaaggccaccuacaagccgaacaccuggugcauccggugccucuggagcaccaagcccgucgagacguccaacagcuucgacgugcugaaguccgaggacgcgcaggggauggacaaccuggccugcgaggaccucaagcccgugagcgaggaggucguggagaaccccaccauccagaaggacgugcuggagugcaacgucaagaccaccgagguggugggcgacaucauccugaagccggccaacaacucccucaagaucacggaggaggucgggcacaccgaccugauggccgccuacguggacaacagcucccugaccaucaagaagcccaacgagcucagccgcgugcugggccugaagacccucgcgacgcacgggcuggccgccgucaacuccgugcccugggacaccaucgccaacuacgccaagccguuccugaacaagguggucagcaccaccacgaacaucgugacccgcugccucaaccgggugugcaccaacuacaugcccuacuucuucacccugcugcuccagcugugcaccuucacgcgcuccaccaacagccggaucaaggcguccaugcccaccaccaucgccaagaacacggucaagagcgugggcaaguucugccuggaggccagcuucaacuaccucaagucccccaacuucagcaagcugaucaacaucaucaucugguuccugcuccuguccgugugccugggcagccucaucuacuccaccgccgcccuggggguccugaugagcaaccucggcaugccguccuacugcaccggguaccgcgagggcuaccugaacagcaccaacgugacgaucgcgaccuacugcaccggcuccauccccugcagcgugugccuguccgggcucgacagccuggacaccuaccccucccuggagacgauccagaucaccaucagcuccuucaagugggaccucaccgccuucggccuggucgccgagugguuccuggccuacauccucuucacccgguucuucuacgugcuggggcuggccgcgaucaugcagcucuucuucagcuacuucgccgugcacuucaucuccaacagcuggcugauguggcugaucaucaaccugguccagauggcccccaucuccgccauggugcgcauguacaucuucuucgcgagcuucuacuacguguggaagagcuacguccacgugguggacggcugcaacuccagcacgugcaugaugugcuacaagcggaaccgcgccacccgggucgagugcaccaccaucgugaacgggguccgccgguccuucuacguguacgccaacggcggcaagggguucugcaagcuccacaacuggaacugcgugaacugcgacacguucugcgccggcagcaccuucaucuccgacgaggucgcccgcgaccugagccugcaguucaagcggccgaucaaccccaccgaccaguccagcuacaucguggacuccgugaccgucaagaacgggagcauccaccucuacuucgacaaggcgggccagaagacguacgagcgccacucccugagccacuucgugaaccuggacaaccuccgggccaacaacaccaaggggucccugcccaucaacgugaucgucuucgacggcaagagcaagugcgaggaguccagcgccaaguccgccagcguguacuacucccagcugaugugccagcccauccuccugcuggaccaggcccucgugagcgacgucggcgacagcgcggagguggccgugaagauguucgacgccuacgucaacaccuucuccagcaccuucaacgugccgauggagaagcugaagacgcugguggccaccgccgaggcggagcucgccaagaacgucucccuggacaacgugcugagcaccuucaucuccgccgcccgccagggguucguggacagcgacgucgagaccaaggacgugguggagugccucaagcugucccaccagagcgacaucgaggucacgggcgacuccugcaacaacuacaugcugaccuacaacaagguggagaacaugaccccccgggaccucggggcgugcaucgacugcagcgcccgccacaucaacgcccagguggccaagucccacaacaucgcccugaucuggaacgucaaggacuucaugagccuguccgagcagcuccggaagcagauccgcagcgacgcgaagaagaacaaccugcccuucaagcugaccugcgccacgacccgccagguggugaacgucgugaccaccaagaucgcccucaagggcggguga

SEQ ID NO: 18133 - RNA, 5841 nt, Artificial Sequence
  SARS-CoV-2__MT576044.1__non-structural protein 3 (NSP3) CDS gc
auggcccccaccaaggugaccuucggcgacgacacggucaucgaggugcagggguacaagagcgugaacaucaccuucgagcuggacgagcgcaucgacaagguccucaacgagaagugcuccgccuacaccguggagcugggcaccgaggugaacgaguucgcgugcgucguggccgacgccgugaucaagacgcugcagccggucagcgagcuccugaccccccuggggaucgaccucgacgagugguccauggccaccuacuaccuguucgacgagagcggcgaguucaagcuggccucccacauguacugcagcuucuacccccccgacgaggacgaggaggagggggacugcgaggaggaggaguucgagccguccacccaguacgaguacggcacggaggacgacuaccagggcaagccccucgaguucggggcgaccagcgccgcccugcagcccgaggaggagcaggaggaggacuggcuggacgacgacucccagcagaccgugggccagcaggacgggagcgaggacaaccagaccacgaccauccagaccaucguggagguccagccccagcucgagauggagcugaccccgguggugcagacgaucgaggucaacuccuucagcggcuaccugaagcucaccgacaacguguacaucaagaacgccgacaucguggaggaggcgaagaaggucaagcccaccgugguggucaacgccgccaacguguaccugaagcacgggggcggcguggccggggcccugaacaaggcgaccaacaacgccaugcaggucgaguccgacgacuacaucgccacgaacggcccccucaagguggggggcagcugcguccuguccggccacaaccuggccaagcacugccuccacgugguggggcccaacgucaacaagggcgaggacauccagcugcugaagagcgccuacgagaacuucaaccagcacgaggugcuccuggcgccgcugcucuccgccgggaucuucggcgccgaccccauccacagccugcgggugugcgucgacaccgugcgcaccaacguguaccuggccgucuucgacaagaaccucuacgacaagcugguguccagcuuccuggagaugaagagcgagaagcagguggagcagaagaucgccgagauccccaaggaggaggucaagcccuucaucaccgaguccaagccgagcguggagcagcggaagcaggacgacaagaagaucaaggcgugcguggaggaggucacgaccacccucgaggagaccaaguuccugacggagaaccugcuccuguacaucgacaucaacgggaaccugcaccccgacuccgccacccucgugagcgacaucgacaucaccuuccugaagaaggacgcccccuacaucgugggcgacgucgugcaggagggcgugcugaccgccgucgugauccccacgaagaaggccgggggcaccaccgagaugcucgcgaaggcccugcgcaaggugccgaccgacaacuacaucacgaccuaccccgggcagggccugaacggguacaccgucgaggaggccaagaccgugcucaagaagugcaaguccgccuucuacauccugcccagcaucaucuccaacgagaagcaggagauccugggcaccgugagcuggaaccuccgggagaugcuggcgcacgccgaggagacgcgcaagcugaugcccgucugcguggagaccaaggccaucguguccaccauccagcggaaguacaagggcaucaagauccaggagggggucguggacuacggcgcccgcuucuacuucuacaccagcaagacgaccguggccucccugaucaacacccucaacgaccugaacgagacccuggucacgaugccgcucggguacgugacccacggccugaaccuggaggaggcggcccgguacaugcgcagccucaaggugcccgccaccgucuccgugagcucccccgacgccgugaccgccuacaacggguaccugacgagcuccagcaagacccccgaggagcacuucaucgagaccaucucccuggcgggcagcuacaaggacuggagcuacuccggccagagcacccagcucgggaucgaguuccugaagcggggcgacaaguccgucuacuacacgagcaacccgaccaccuuccaccuggacggggaggugaucaccuucgacaaccucaagacgcugcugucccuccgcgaggugcggaccaucaaggucuucaccaccguggacaacaucaaccugcacacgcagguggucgacaugagcaugaccuacggccagcaguucggccccaccuaccuggacggggccgacgugaccaagaucaagccccacaacucccacgagggcaagacguucuacgugcucccgaacgacgacacccugcgcgucgaggccuucgaguacuaccacaccaccgaccccagcuuccuggggcgguacauguccgcccucaaccacacgaagaaguggaaguacccccaggugaacggccugaccagcaucaagugggccgacaacaacugcuaccuggcgaccgcccuccugacccugcagcagaucgagcucaaguucaaccccccggcccugcaggacgccuacuaccgcgcgcgggccggggaggccgccaacuucugcgcccugauccucgcguacugcaacaagacggugggcgagcugggcgacguccgcgagaccauguccuaccuguuccagcacgccaaccucgacagcugcaagcgggugcugaacgucgugugcaagaccugcgggcagcagcagaccacccugaagggcguggaggccgucauguacauggggacgcucuccuacgagcaguucaagaagggcgugcagauccccugcaccugcgggaagcaggccaccaaguaccuggugcagcaggagagccccuucgucaugauguccgcccccccggcgcaguacgagcugaagcacggcaccuucacgugcgccagcgaguacaccggcaacuaccagugcgggcacuacaagcacaucaccuccaaggagacccucuacugcaucgacggcgcccugcugacgaagagcagcgaguacaaggggcccaucaccgacguguucuacaaggagaacuccuacaccaccacgaucaagcccgugaccuacaagcucgacggcgucgugugcaccgagaucgaccccaagcuggacaacuacuacaagaaggacaacagcuacuucaccgagcagccgaucgaccuggugcccaaccagcccuaccccaacgccuccuucgacaacuucaaguucgucugcgacaacaucaaguucgccgacgaccucaaccagcugacgggguacaagaagccggcgagccgcgagcugaaggugaccuucuuccccgaccucaacggcgacguggucgccaucgacuacaagcacuacacccccuccuucaagaagggcgccaagcugcugcacaagcccaucguguggcacgugaacaacgccaccaacaaggcgacguacaagccgaacaccuggugcauccggugccucuggagcaccaagcccgucgagaccuccaacagcuucgacgugcugaaguccgaggacgcccaggggauggacaaccuggccugcgaggaccucaagcccgugagcgaggaggucguggagaaccccacgauccagaaggacgugcuggagugcaacgucaagaccaccgagguggugggcgacaucauccugaagccggccaacaacucccucaagaucaccgaggaggucgggcacacggaccugauggccgcguacguggacaacagcucccugaccaucaagaagcccaacgagcucagccgcgugcugggccugaagacccucgccacccacgggcuggccgccgucaacuccgugcccugggacacgaucgccaacuacgcgaagccguuccugaacaagguggucagcaccaccaccaacaucgugacgcgcugccucaaccgggugugcaccaacuacaugcccuacuucuucacccugcugcuccagcugugcaccuucacccgcuccacgaacagccggaucaaggccuccaugcccaccaccaucgccaagaacaccgucaagagcgugggcaaguucugccuggaggccagcuucaacuaccucaagucccccaacuucagcaagcugaucaacaucaucaucugguuccugcuccuguccgugugccugggcagccucaucuacuccacggccgcgcuggggguccugaugagcaaccucggcaugccguccuacugcaccggguaccgcgagggcuaccugaacagcaccaacgugaccaucgccacguacugcaccggcuccauccccugcagcgugugccuguccgggcucgacagccuggacaccuaccccucccuggagaccauccagaucacgaucagcuccuucaagugggaccucaccgccuucggcgucguggccgagugguuccuggccuacauccuguucacccgguucuucuacgugcucgggcuggcggccaucaugcagcuguucuucagcuacuucgccguccacuucaucuccaacagcuggcucauguggcugaucaucaaccuggugcagauggcccccaucuccgcgauggugcgcauguacaucuucuucgccagcuucuacuacgucuggaagagcuacgugcacguggucgacggcugcaacuccagcaccugcaugaugugcuacaagcggaaccgcgccacgcggguggagugcaccaccaucgucaacggggugcgccgguccuucuacguguacgccaacggcggcaagggguucugcaagcugcacaacuggaacugcgucaacugcgacaccuucugcgccggcagcacguucaucuccgacgagguggcgcgcgaccucagccugcaguucaagcggccgaucaaccccaccgaccaguccagcuacaucguggacuccgucaccgugaagaacgggagcauccaccuguacuucgacaaggccggccagaagaccuacgagcgccacucccucagccacuucgugaaccuggacaaccugcgggccaacaacacgaaggggucccuccccaucaacgucaucguguucgacggcaagagcaagugcgaggaguccagcgccaaguccgccagcguguacuacucccagcugaugugccagcccauccugcuccuggaccaggcgcuggucagcgacgugggcgacagcgccgagguggccgucaagauguucgacgccuacgugaacaccuucuccagcaccuucaacgugccgauggagaagcucaagacccuggucgccacggcggaggccgagcuggccaagaacgugucccucgacaacgugcugagcaccuucaucuccgccgcgcgccagggguucgucgacagcgacguggagaccaaggacguggucgagugccugaagcucucccaccagagcgacaucgaggugaccggcgacuccugcaacaacuacaugcugacguacaacaagguggagaacaugaccccccgggaccugggggccugcaucgacugcagcgcccgccacaucaacgcccaggucgccaagucccacaacaucgcgcucaucuggaacgugaaggacuucaugagccuguccgagcagcugcggaagcagauccgcagcgccgccaagaagaacaaccuccccuucaagcugaccugcgccaccacgcgccagguggucaacguggugaccaccaagaucgcccugaagggcggguga

SEQ ID NO: 18134 - RNA, 5841 nt, Artificial Sequence
  SARS-CoV-2__MT576530.1__non-structural protein 3 (NSP3) CDS gc
auggcccccaccaaggugaccuucggcgacgacacggucaucgaggugcagggguacaagagcgugaacaucaccuucgagcuggacgagcgcaucgacaagguccucaacgagaagugcuccgccuacaccguggagcugggcaccgaggugaacgaguucgcgugcgucguggccgacgccgugaucaagacgcugcagccggucagcgagcuccugaccccccuggggaucgaccucgacgagugguccauggccaccuacuaccuguucgacgagagcggcgaguucaagcuggccucccacauguacugcagcuucuacccccccgacgaggacgaggaggagggggacugcgaggaggaggaguucgagccguccacccaguacgaguacggcacggaggacgacuaccagggcaagccccucgaguucggggcgaccagcgccgcccugcagcccgaggaggagcaggaggaggacuggcuggacgacgacucccagcagaccgugggccagcaggacgggagcgaggacaaccagaccacgaccauccagaccaucguggagguccagccccagcucgagauggagcugaccccgguggugcagacgaucgaggucaacuccuucagcggcuaccugaagcucaccgacaacguguacaucaagaacgccgacaucguggaggaggcgaagaaggucaagcccaccgugguggucaacgccgccaacguguaccugaagcacgggggcggcguggccggggcccugaacaaggcgaccaacaacgccaugcaggucgaguccgacgacuacaucgccacgaacggcccccucaagguggggggcagcugcguccuguccggccacaaccuggccaagcacugccuccacgugguggggcccaacgucaacaagggcgaggacauccagcugcugaagagcgccuacgagaacuucaaccagcacgaggugcuccuggcgccgcugcucuccgccgggaucuucggcgccgaccccauccacagccugcgggugugcgucgacaccgugcgcaccaacguguaccuggccgucuucgacaagaaccucuacgacaagcugguguccagcuuccuggagaugaagagcgagaagcagguggagcagaagaucgccgagauccccaaggaggaggucaagcccuucaucaccgaguccaagccgagcguggagcagcggaagcaggacgacaagaagaucaaggcgugcguggaggaggucacgaccacccucgaggagaccaaguuccugacggagaaccugcuccuguacaucgacaucaacgggaaccugcaccccgacuccgccacccucgugagcgacaucgacaucaccuuccugaagaaggacgcccccuacaucgugggcgacgucgugcaggagggcgugcugaccgccgucgugauccccacgaagaaggccgggggcaccaccgagaugcucgcgaaggcccugcgcaaggugccgaccgacaacuacaucacgaccuaccccgggcagggccugaacggguacaccgucgaggaggccaagaccgugcucaagaagugcaaguccgccuucuacauccugcccagcaucaucuccaacgagaagcaggagauccugggcaccgugagcuggaaccuccgggagaugcuggcgcacgccgaggagacgcgcaagcugaugcccgucugcguggagaccaaggccaucguguccaccauccagcggaaguacaagggcaucaagauccaggagggggucguggacuacggcgcccgcuucuacuucuacaccagcaagacgaccguggccucccugaucaacacccucaacgaccugaacgagacccuggucacgaugccgcucggguacgugacccacggccugaaccuggaggaggcggcccgguacaugcgcagccucaaggugcccgccaccgucuccgugagcucccccgacgccgugaccgccuacaacggguaccugacgagcuccagcaagacccccgaggagcacuucaucgagaccaucucccuggcgggcagcuacaaggacuggagcuacuccggccagagcacccagcucgggaucgaguuccugaagcggggcgacaaguccgucuacuacacgagcaacccgaccaccuuccaccuggacggggaggugaucaccuucgacaaccucaagacgcugcugucccuccgcgaggugcggaccaucaaggucuucaccaccguggacaacaucaaccugcacacgcagguggucgacaugagcaugaccuacggccagcaguucggccccaccuaccuggacggggccgacgugaccaagaucaagccccacaacucccacgagggcaagacguucuacgugcucccgaacgacgacacccugcgcgucgaggccuucgaguacuaccacaccaccgaccccagcuuccuggggcgguacauguccgcccucaaccacacgaagaaguggaaguacccccaggugaacggccugaccagcaucaagugggccgacaacaacugcuaccuggcgaccgcccuccugacccugcagcagaucgagcucaaguucaaccccccggcccugcaggacgccuacuaccgcgcgcgggccggggaggccgccaacuucugcgcccugauccucgcguacugcaacaagacggugggcgagcugggcgacguccgcgagaccauguccuaccuguuccagcacgccaaccucgacagcugcaagcgggugcugaacgucgugugcaagaccugcgggcagcagcagaccacccugaagggcguggaggccgucauguacauggggacgcucuccuacgagcaguucaagaagggcgugcagauccccugcaccugcgggaagcaggccaccaaguaccuggugcagcaggagagccccuucgucaugauguccgcccccccggcgcaguacgagcugaagcacggcaccuucacgugcgccagcgaguacaccggcaacuaccagugcgggcacuacaagcacaucaccuccaaggagacccucuacugcaucgacggcgcccugcugacgaagagcagcgaguacaaggggcccaucaccgacguguucuacaaggagaacuccuacaccaccacgaucaagcccgugaccuacaagcucgacggcgucgugugcaccgagaucgaccccaagcuggacaacuacuacaagaaggacaacagcuacuucaccgagcagccgaucgaccuggugcccaaccagcccuaccccaacgccuccuucgacaacuucaaguucgucugcgacaacaucaaguucgccgacgaccucaaccagcugacgggguacaagaagccggcgagccgcgagcugaaggugaccuucuuccccgaccucaacggcgacguggucgccaucgacuacaagcacuacacccccuccuucaagaagggcgccaagcugcugcacaagcccaucguguggcacgugaacaacgccaccaacaaggcgacguacaagccgaacaccuggugcauccggugccucuggagcaccaagcccgucgagaccuccaacagcuucgacgugcugaaguccgaggacgcccaggggauggacaaccuggccugcgaggaccucaagcccgugagcgaggaggucguggagaaccccacgauccagaaggacgugcuggagugcaacgucaagaccaccgagguggugggcgacaucauccugaagccggccaacaacucccucaagaucaccgaggaggucgggcacaucgaccugauggccgcguacguggacaacagcucccugacgaucaagaagcccaacgagcucagccgcgugcugggccugaagacccucgccacccacgggcuggccgccgucaacuccgugcccugggacaccaucgccaacuacgcgaagccguuccugaacaagguggucagcacgaccaccaacaucgugacccgcugccucaaccgggugugcacgaacuacaugcccuacuucuucacccugcugcuccagcugugcaccuucacccgcuccaccaacagccggaucaaggccuccaugcccacgaccaucgccaagaacaccgucaagagcgugggcaaguucugccuggaggccagcuucaacuaccucaagucccccaacuucagcaagcugaucaacaucaucaucugguuccugcuccuguccgugugccugggcagccucaucuacuccaccgccgcgcuggggguccugaugagcaaccucggcaugccguccuacugcacgggguaccgcgagggcuaccugaacagcaccaacgugaccaucgccaccuacugcacgggcuccauccccugcagcgugugccuguccgggcucgacagccuggacaccuaccccucccuggagaccauccagaucaccaucagcuccuucaagugggaccucacggccuucggccuggucgccgagugguuccuggccuacauccucuucacccgguucuucuacgugcuggggcuggcggccaucaugcagcucuucuucagcuacuucgccgugcacuucaucuccaacagcuggcugauguggcugaucaucaaccugguccagauggcccccaucuccgcgauggugcgcauguacaucuucuucgccagcuucuacuacguguggaagagcuacguccacgugguggacggcugcaacuccagcaccugcaugaugugcuacaagcggaaccgcgccacccgggucgagugcacgaccaucgugaacgggguccgccgguccuucuacguguacgccaacggcggcaagggguucugcaagcuccacaacuggaacugcgugaacugcgacaccuucugcgccggcagcaccuucaucuccgacgaggucgcgcgcgaccugagccugcaguucaagcggccgaucaaccccacggaccaguccagcuacaucguggacuccgugaccgucaagaacgggagcauccaccucuacuucgacaaggccggccagaagaccuacgagcgccacucccugagccacuucgugaaccuggacaaccuccgggccaacaacaccaaggggucccugcccaucaacgugaucgucuucgacggcaagagcaagugcgaggaguccagcgccaaguccgccagcguguacuacucccagcugaugugccagcccauccuccugcuggaccaggcgcucgugagcgacgucggcgacagcgccgagguggccgugaagauguucgacgccuacgucaacacguucuccagcaccuucaacgugccgauggagaagcugaagacccugguggccaccgcggaggccgagcucgccaagaacgucucccuggacaacgugcugagcacguucaucuccgccgcgcgccagggguucguggacagcgacgucgagaccaaggacgugguggagugccucaagcugucccaccagagcgacaucgaggucaccggcgacuccugcaacaacuacaugcugaccuacaacaagguggagaacaugacgccccgggaccucggggccugcaucgacugcagcgcccgccacaucaacgcccagguggccaagucccacaacaucgcgcugaucuggaacgucaaggacuucaugagccuguccgagcagcuccggaagcagauccgcagcgccgccaagaagaacaaccugcccuucaagcugaccugcgccaccacccgccagguggugaacgucgugacgaccaagaucgcccucaagggcggguga

SEQ ID NO: 18135 - RNA, 5841 nt, Artificial Sequence
  SARS-CoV-2__MT576639.1__non-structural protein 3 (NSP3) CDS gc
auggcccccaccaaggugaccuucggcgacgacacggucaucgaggugcagggguacaagagcgugaacaucaccuucgagcuggacgagcgcaucgacaagguccucaacgagaagugcuccgccuacaccguggagcugggcaccgaggugaacgaguucgcgugcgucguggccgacgccgugaucaagacgcugcagccggucagcgagcuccugaccccccuggggaucgaccucgacgagugguccauggccaccuacuaccuguucgacgagagcggcgaguucaagcuggccucccacauguacugcagcuucuacccccccgacgaggacgaggaggagggggacugcgaggaggaggaguucgagccguccacccaguacgaguacggcacggaggacgacuaccagggcaagccccucgaguucggggcgaccagcgccgcccugcagcccgaggaggagcaggaggaggacuggcuggacgacgacucccagcagaccgugggccagcaggacgggagcgaggacaaccagaccacgaccauccagaccaucguggagguccagccccagcucgagauggagcugaccccgguggugcagacgaucgaggucaacuccuucagcggcuaccugaagcucaccgacaacguguacaucaagaacgccgacaucguggaggaggcgaagaaggucaagcccaccgugguggucaacgccgccaacguguaccugaagcacgggggcggcguggccggggcccugaacaaggcgaccaacaacgccaugcaggucgaguccgacgacuacaucgccacgaacggcccccucaagguggggggcagcugcguccuguccggccacaaccuggccaagcacugccuccacgugguggggcccaacgucaacaagggcgaggacauccagcugcugaagagcgccuacgagaacuucaaccagcacgaggugcuccuggcgccgcugcucuccgccgggaucuucggcgccgaccccauccacagccugcgggugugcgucgacaccgugcgcaccaacguguaccuggccgucuucgacaagaaccucuacgacaagcugguguccagcuuccuggagaugaagagcgagaagcagguggagcagaagaucgccgagauccccaaggaggaggucaagcccuucaucaccgaguccaagccgagcguggagcagcggaagcaggacgacaagaagaucaaggcgugcguggaggaggucacgaucacccucgaggagaccaaguuccugaccgagaaccugcuccuguacaucgacaucaacgggaaccugcaccccgacuccgccacgcucgugagcgacaucgacaucaccuuccugaagaaggacgcccccuacaucgugggcgacgucgugcaggagggcgugcugaccgccgucgugauccccaccaagaaggccgggggcacgaccgagaugcucgcgaaggcccugcgcaaggugccgaccgacaacuacaucaccacguaccccgggcagggccugaacggguacaccgucgaggaggccaagaccgugcucaagaagugcaaguccgccuucuacauccugcccagcaucaucuccaacgagaagcaggagauccugggcaccgugagcuggaaccuccgggagaugcuggcgcacgccgaggagacccgcaagcugaugcccgucugcguggagacgaaggccaucguguccaccauccagcggaaguacaagggcaucaagauccaggagggggucguggacuacggcgcccgcuucuacuucuacaccagcaagaucaccguggccucccugaucaacacgcucaacgaccugaacgagacccuggucaccaugccgcucggguacgugacccacggccugaaccuggaggaggcggcccgguacaugcgcagccucaaggugcccgccacggucuccgugagcucccccgacgccgugaccgccuacaacggguaccugaccagcuccagcaagacccccgaggagcacuucaucgagacgaucucccuggcgggcagcuacaaggacuggagcuacuccggccagagcacccagcucgggaucgaguuccugaagcggggcgacaaguccgucuacuacaccagcaacccgaccacguuccaccuggacggggaggugaucaccuucgacaaccucaagacccugcugucccuccgcgaggugcggaccaucaaggucuucacgaccguggacaacaucaaccugcacacccagguggucgacaugagcaugaccuacggccagcaguucggccccacguaccuggacggggccgacgugaccaagaucaagccccacaacucccacgagggcaagaccuucuacgugcucccgaacgacgacacccugcgcgucgaggccuucgaguacuaccacacgaccgaccccagcuuccuggggcgguacauguccgcccucaaccacaccaagaaguggaaguacccccaggugaacggccugaccagcaucaagugggccgacaacaacugcuaccuggcgacggcccuccugacccugcagcagaucgagcucaaguucaaccccccggcccugcaggacgccuacuaccgcgcgcgggccggggaggccgccaacuucugcgcccugauccucgcguacugcaacaagaccgugggcgagcugggcgacguccgcgagaccauguccuaccuguuccagcacgccaaccucgacagcugcaagcgggugcugaacgucgugugcaagacgugcgggcagcagcagaccacccugaagggcguggaggccgucauguacauggggacccucuccuacgagcaguucaagaagggcgugcagauccccugcaccugcgggaagcaggccacgaaguaccuggugcagcaggagagccccuucgucaugauguccgcccccccggcgcaguacgagcugaagcacggcaccuucaccugcgccagcgaguacaccggcaacuaccagugcgggcacuacaagcacaucacguccaaggagacccucuacugcaucgacggcgcccugcugaccaagagcagcgaguacaaggggcccaucaccgacguguucuacaaggagaacuccuacacgaccaccaucaagcccgugaccuacaagcucgacggcgucgugugcacggagaucgaccccaagcuggacaacuacuacaagaaggacaacagcuacuucaccgagcagccgaucgaccuggugcccaaccagcccuaccccaacgccuccuucgacaacuucaaguucgucugcgacaacaucaaguucgccgacgaccucaaccagcugaccggguacaagaagccggcgagccgcgagcugaaggugaccuucuuccccgaccucaacggcgacguggucgccaucgacuacaagcacuacacgcccuccuucaagaagggcgccaagcugcugcacaagcccaucguguggcacgugaacaacgccaccaacaaggcgaccuacaagccgaacaccuggugcauccggugccucuggagcacgaagcccgucgagaccuccaacagcuucgacgugcugaaguccgaggacgcccaggggauggacaaccuggccugcgaggaccucaagcccgugagcgaggaggucguggagaaccccaccauccagaaggacgugcuggagugcaacgucaagaccacggagguggugggcgacaucauccugaagccggccaacaacucccucaagaucaccgaggaggucgggcacaccgaccugauggccgcguacguggacaacagcucccugaccaucaagaagcccaacgagcucagccgcgugcugggccugaagacgcucgccacccacgggcuggccgccgucaacuccgugcccugggacaccaucgccaacuacgcgaagccguuccugaacaagguggucagcaccacgaccaacaucgugacccgcugccucaaccgggugugcaccaacuacaugcccuacuucuucacgcugcugcuccagcugugcaccuucacccgcuccaccaacagccggaucaaggccuccaugcccaccacgaucgccaagaacaccgucaagagcgugggcaaguucugccuggaggccagcuucaacuaccucaagucccccaacuucagcaagcugaucaacaucaucaucugguuccugcuccuguccgugugccugggcagccucaucuacuccaccgccgcgcuggggguccugaugagcaaccucggcaugccguccuacugcaccggguaccgcgagggcuaccugaacagcacgaacgugaccaucgccaccuacugcaccggcuccauccccugcagcgugugccuguccgggcucgacagccuggacacguaccccucccuggagaccauccagaucaccaucagcuccuucaagugggaccucaccgccuucggccuggucgccgagugguuccuggccuacauccucuucacgcgguucuucuacgugcuggggcuggcggccaucaugcagcucuucuucagcuacuucgccgugcacuucaucuccaacagcuggcugauguggcugaucaucaaccugguccagauggcccccaucuccgcgauggugcgcauguacaucuucuucgccagcuucuacuacguguggaagagcuacguccacgugguggacggcugcaacuccagcaccugcaugaugugcuacaagcggaaccgcgccacccgggucgagugcaccacgaucgugaacgggguccgccgguccuucuacguguacgccaacggcggcaagggguucugcaagcuccacaacuggaacugcgugaacugcgacaccuucugcgccggcagcaccuucaucuccgacgaggucgcgcgcgaccugagccugcaguucaagcggccgaucaaccccaccgaccaguccagcuacaucguggacuccgugacggucaagaacgggagcauccaccucuacuucgacaaggccggccagaagaccuacgagcgccacucccugagccacuucgugaaccuggacaaccuccgggccaacaacaccaaggggucccugcccaucaacgugaucgucuucgacggcaagagcaagugcgaggaguccagcgccaaguccgccagcguguacuacucccagcugaugugccagcccauccuccugcuggaccaggcgcucgugagcgacgucggcgacagcgccgagguggccgugaagauguucgacgccuacgucaacaccuucuccagcacguucaacgugccgauggagaagcugaagacccugguggccaccgcggaggccgagcucgccaagaacgucucccuggacaacgugcugagcaccuucaucuccgccgcgcgccagggguucguggacagcgacgucgagacgaaggacgugguggagugccucaagcugucccaccagagcgacaucgaggucaccggcgacuccugcaacaacuacaugcugaccuacaacaagguggagaacaugaccccccgggaccucggggccugcaucgacugcagcgcccgccacaucaacgcccagguggccaagucccacaacaucgcgcugaucuggaacgucaaggacuucaugagccuguccgagcagcuccggaagcagauccgcagcgccgccaagaagaacaaccugcccuucaagcugacgugcgccaccacccgccagguggugaacgucgugaccacgaagaucgcccucaagggcggguga

SEQ ID NO: 18136 - RNA, 5841 nt, Artificial Sequence
  SARS-CoV-2__MT576641.1__non-structural protein 3 (NSP3) CDS gc
auggcccccaccaaggugaccuucggcgacgacacggucaucgaggugcagggguacaagagcgugaacaucaccuucgagcuggacgagcgcaucgacaagguccucaacgagaagugcuccgccuacaccguggagcugggcaccgaggugaacgaguucgcgugcgucguggccgacgccgugaucaagacgcugcagccggucagcgagcuccugaccccccuggggaucgaccucgacgagugguccauggccaccuacuaccuguucgacgagagcggcgaguucaagcuggccucccacauguacugcagcuucuacccccccgacgaggacgaggaggagggggacugcgaggaggaggaguucgagccguccacccaguacgaguacggcacggaggacgacuaccagggcaagccccucgaguucggggcgaccagcgccgcccugcagcccgaggaggagcaggaggaggacuggcuggacgacgacucccagcagaccgugggccagcaggacgggagcgaggacaaccagaccacgaccauccagaccaucguggagguccagccccagcucgagauggagcugaccccgguggugcagacgaucgaggucaacuccuucagcggcuaccugaagcucaccgacaacguguacaucaagaacgccgacaucguggaggaggcgaagaaggucaagcccaccgugguggucaacgccgccaacguguaccugaagcacgggggcggcguggccggggcccugaacaaggcgaccaacaacgccaugcaggucgaguccgacgacuacaucgccacgaacggcccccucaagguggggggcagcugcguccuguccggccacaaccuggccaagcacugccuccacgugguggggcccaacgucaacaagggcgaggacauccagcugcugaagagcgccuacgagaacuucaaccagcacgaggugcuccuggcgccgcugcucuccgccgggaucuucggcgccgaccccauccacagccugcgggugugcgucgacaccgugcgcaccaacguguaccuggccgucuucgacaagaaccucuacgacaagcugguguccagcuuccuggagaugaagagcgagaagcagguggagcagaagaucgccgagauccccaaggaggaggucaagcccuucaucaccgaguccaagccgagcguggagcagcggaagcaggacgacaagaagaucaaggcgugcguggaggaggucacgaccacccucgaggagaccaaguuccugacggagaaccugcuccuguacaucgacaucaacgggaaccugcaccccgacuccgccacccucgugagcgacaucgacaucaccuuccugaagaaggacgcccccuacaucgugggcgacgucgugcaggagggcgugcugaccgccgucgugauccccacgaagaaggccgggggcaccaccgagaugcucgcgaaggcccugcgcaaggugccgaccgacaacuacaucacgaccuaccccgggcagggccugaacggguacaccgucgaggaggccaagaccgugcucaagaagugcaaguccgccuucuacauccugcccagcaucaucuccaacgagaagcaggagauccugggcaccgugagcuggaaccuccgggagaugcuggcgcacgccgaggagacgcgcaagcugaugcccgucugcguggagaccaaggccaucguguccaccauccagcggaaguacaagggcaucaagauccaggagggggucguggacuacggcgcccgcuucuacuucuacaccagcaagacgaccguggccucccugaucaacacccucaacgaccugaacgagacccuggucacgaugccgcucggguacgugacccacggccugaaccuggaggaggcggcccgguacaugcgcagccucaaggugcccgccaccgucuccgugagcucccccgacgccgugaccgccuacaacggguaccugacgagcuccagcaagaccuccgaggagcacuucaucgagaccaucagccuggcgggcagcuacaaggacugguccuacagcggccaguccacccagcucgggaucgaguuccugaagcggggcgacaagagcgucuacuacacguccaaccccaccaccuuccaccuggacggggaggugaucaccuucgacaaccucaagacgcugcugagccuccgcgaggugcggaccaucaaggucuucaccaccguggacaacaucaaccugcacacgcagguggucgacauguccaugaccuacggccagcaguucggcccgaccuaccuggacggggccgacgugaccaagaucaagccccacaacagccacgagggcaagacguucuacgugcuccccaacgacgacacccugcgcgucgaggccuucgaguacuaccacaccaccgacccguccuuccuggggcgguacaugagcgcccucaaccacacgaagaaguggaaguacccccaggugaacggccugaccuccaucaagugggccgacaacaacugcuaccuggcgaccgcccuccugacccugcagcagaucgagcucaaguucaacccccccgcccugcaggacgccuacuaccgcgcgcgggccggggaggccgccaacuucugcgcccugauccucgcguacugcaacaagacggugggcgagcugggcgacguccgcgagaccaugagcuaccuguuccagcacgccaaccucgacuccugcaagcgggugcugaacgucgugugcaagaccugcgggcagcagcagaccacccugaagggcguggaggccgucauguacauggggacgcucagcuacgagcaguucaagaagggcgugcagaucccgugcaccugcgggaagcaggccaccaaguaccuggugcagcaggagucccccuucgucaugaugagcgccccccccgcgcaguacgagcugaagcacggcaccuucacgugcgccuccgaguacaccggcaacuaccagugcgggcacuacaagcacaucaccagcaaggagacccucuacugcaucgacggcgcccugcugacgaagagcuccgaguacaaggggccgaucaccgacguguucuacaaggagaacagcuacaccaccacgaucaagcccgugaccuacaagcucgacggcgucgugugcaccgagaucgaccccaagcuggacaacuacuacaagaaggacaacuccuacuucaccgagcagcccaucgaccuggugccgaaccagcccuaccccaacgccagcuucgacaacuucaaguucgucugcgacaacaucaaguucgccgacgaccucaaccagcugacgggguacaagaagcccgcgucccgcgagcugaaggugaccuucuucccggaccucaacggcgacguggucgccaucgacuacaagcacuacacccccagcuucaagaagggcgccaagcugcugcacaagcccaucguguggcacgugaacaacgccaccaacaaggcgacguacaagcccaacaccuggugcauccggugccucugguccaccaagccggucgagaccagcaacuccuucgacgugcugaagagcgaggacgcccaggggauggacaaccuggccugcgaggaccucaagcccguguccgaggaggucguggagaaccccacgauccagaaggacgugcuggagugcaacgucaagaccaccgagguggugggcgacaucauccugaagcccgccaacaacagccucaagaucaccgaggaggucgggcacacggaccugauggccgcguacguggacaacuccagccugaccaucaagaagccgaacgagcucucccgcgugcugggccugaagacccucgccacccacgggcuggccgccgucaacagcgugcccugggacacgaucgccaacuacgcgaagcccuuccugaacaagguggucuccaccaccaccaacaucgugacgcgcugccucaaccgggugugcaccaacuacaugccguacuucuucacccugcugcuccagcugugcaccuucacccgcagcacgaacucccggaucaaggccagcaugcccaccaccaucgccaagaacaccgucaagagcgugggcaaguucugccuggaggccuccuucaacuaccucaagagccccaacuucuccaagcugaucaacaucaucaucugguuccugcuccugagcgugugccugggcucccucaucuacagcacggccgcgcuggggguccugauguccaaccucggcaugcccagcuacugcaccggguaccgcgagggcuaccugaacuccaccaacgugaccaucgccacguacugcaccggcagcaucccgugcuccgugugccugagcgggcucgacucccuggacaccuaccccagccuggagaccauccagaucacgaucuccagcuucaagugggaccucaccgccuucggccuggucgccgagugguuccuggccuacauccucuucacccgguucuucuacgugcuggggcuggcggccaucaugcagcucuucuucuccuacuucgccgugcacuucaucagcaacuccuggcugauguggcugaucaucaaccugguccagauggcccccaucagcgcgauggugcgcauguacaucuucuucgccagcuucuacuacguguggaaguccuacguccacgugguggacggcugcaacagcuccaccugcaugaugugcuacaagcggaaccgcgccacgcgggucgagugcaccaccaucgugaacgggguccgccggagcuucuacguguacgccaacggcggcaagggguucugcaagcuccacaacuggaacugcgugaacugcgacaccuucugcgccggcuccacguucaucagcgacgaggucgcgcgcgaccugucccugcaguucaagcggcccaucaacccgaccgaccagagcuccuacaucguggacagcgugaccgucaacaacggguccauccaccucuacuucgacaaggccggccagaagaccuacgagcgccacagccugucccacuucgugaaccuggacaaccuccgggccaacaacacgaaggggagccugcccaucaacgugaucgucuucgacggcaaguccaagugcgaggagagcuccgccaagagcgccuccguguacuacagccagcugaugugccagcccauccuccugcuggaccaggcgcucgugagcgacgucggcgacuccgccgagguggccgugaagauguucgacgccuacgucaacaccuucagcuccaccuucaacgugcccauggagaagcugaagacccugguggccacggcggaggccgagcucgccaagaacgucagccuggacaacgugcuguccaccuucaucagcgccgcgcgccagggguucguggacuccgacgucgagaccaaggacgugguggagugccucaagcugagccaccaguccgacaucgaggucaccggcgacagcugcaacaacuacaugcugacguacaacaagguggagaacaugaccccgcgggaccucggggccugcaucgacugcuccgcccgccacaucaacgcccagguggccaagagccacaacaucgcgcugaucuggaacgucaaggacuucaugucccugagcgagcagcuccggaagcagauccgcuccgccgccaagaagaacaaccugcccuucaagcugaccugcgccaccacgcgccagguggugaacgucgugaccaccaagaucgcccucaagggcggguga

SEQ ID NO: 18137 - RNA, 5841 nt, Artificial Sequence
  SARS-CoV-2__MT576689.1__non-structural protein 3 (NSP3) CDS gc
auggcccccaccaaggugaccuucggcgacgacacggucaucgaggugcagggguaccgcagcgugaacaucaccuucgagcuggacgagcggaucgacaagguccucaacgagaagugcuccgccuacaccguggagcugggcaccgaggugaacgaguucgcgugcgucguggccgacgccgugaucaagacgcugcagccggucagcgagcuccugaccccccuggggaucgaccucgacgagugguccauggccaccuacuaccuguucgacgagagcggcgaguucaagcuggccucccacauguacugcagcuucuacccccccgacgaggacgaggaggagggggacugcgaggaggaggaguucgagccguccacccaguacgaguacggcacggaggacgacuaccagggcaagccccucgaguucggggcgaccagcgccgcccugcagcccgaggaggagcaggaggaggacuggcuggacgacgacucccagcagaccgugggccagcaggacgggagcgaggacaaccagaccacgaccauccagaccaucguggagguccagccccagcucgagauggagcugaccccgguggugcagacgaucgaggucaacuccuucagcggcuaccugaagcucaccgacaacguguacaucaagaacgccgacaucguggaggaggcgaagaaggucaagcccaccgugguggucaacgccgccaacguguaccugaagcacgggggcggcguggccggggcccugaacaaggcgaccaacaacgccaugcaggucgaguccgacgacuacaucgccacgaacggcccccucaagguggggggcagcugcguccuguccggccacaaccuggccaagcacugccuccacgugguggggcccaacgucaacaagggcgaggacauccagcugcugaagagcgccuacgagaacuucaaccagcacgaggugcuccuggcgccgcugcucuccgccgggaucuucggcgccgaccccauccacagccugcgcgugugcgucgacaccgugcggaccaacguguaccuggccgucuucgacaagaaccucuacgacaagcugguguccagcuuccuggagaugaagagcgagaagcagguggagcagaagaucgccgagauccccaaggaggaggucaagcccuucaucaccgaguccaagccgagcguggagcagcgcaagcaggacgacaagaagaucaaggcgugcguggaggaggucacgaccacccucgaggagaccaaguuccugacggagaaccugcuccuguacaucgacaucaacgggaaccugcaccccgacuccgccacccucgugagcgacaucgacaucaccuuccugaagaaggacgcccccuacaucgugggcgacgucgugcaggagggcgugcugaccgccgucgugauccccacgaagaaggccgggggcaccaccgagaugcucgcgaaggcccugcggaaggugccgaccgacaacuacaucacgaccuaccccgggcagggccugaacggguacaccgucgaggaggccaagaccgugcucaagaagugcaaguccgccuucuacauccugcccagcaucaucuccaacgagaagcaggagauccugggcaccgugagcuggaaccuccgcgagaugcuggcgcacgccgaggagacgcggaagcugaugcccgucugcguggagaccaaggccaucguguccaccauccagcgcaaguacaagggcaucaagauccaggagggggucguggacuacggcgcccgguucuacuucuacaccagcaagacgaccguggccucccugaucaacacccucaacgaccugaacgagacccuggucacgaugccgcucggguacgugacccacggccugaaccuggaggaggcggcccgcuacaugcggagccucaaggugcccgccaccgucuccgugagcucccccgacgccgugaccgccuacaacggguaccugacgagcuccagcaagacccccgaggagcacuucaucgagaccaucucccuggcgggcagcuacaaggacuggagcuacuccggccagagcacccagcucgggaucgaguuccugaagcgcggcgacaaguccgucuacuacacgagcaacccgaccaccuuccaccuggacggggaggugaucaccuucgacaaccucaagacgcugcugucccuccgggaggugcgcaccaucaaggucuucaccaccguggacaacaucaaccugcacacgcagguggucgacaugagcaugaccuacggccagcaguucggccccaccuaccuggacggggccgacgugaccaagaucaagccccacaacucccacgagggcaagacguucuacgugcucccgaacgacgacacccugcgggucgaggccuucgaguacuaccacaccaccgaccccagcuuccuggggcgcuacauguccgcccucaaccacacgaagaaguggaaguacccccaggugaacggccugaccagcaucaagugggccgacaacaacugcuaccuggcgaccgcccuccugacccugcagcagaucgagcucaaguucaaccccccggcccugcaggacgccuacuaccgggcgcgcgccggggaggccgccaacuucugcgcccugauccucgcguacugcaacaagacggugggcgagcugggcgacguccgggagaccauguccuaccuguuccagcacgccaaccucgacagcugcaagcgcgugcugaacgucgugugcaagaccugcgggcagcagcagaccacccugaagggcguggaggccgucauguacauggggacgcucuccuacgagcaguucaagaagggcgugcagauccccugcaccugcgggaagcaggccaccaaguaccuggugcagcaggagagccccuucgucaugauguccgcccccccggcgcaguacgagcugaagcacggcaccuucacgugcgccagcgaguacaccggcaacuaccagugcgggcacuacaagcacaucaccuccaaggagacccucuacugcaucgacggcgcccugcugacgaagagcagcgaguacaaggggcccaucaccgacguguucuacaaggagaacuccuacaccaccacgaucaagcccgugaccuacaagcucgacggcgucgugugcaccgagaucgaccccaagcuggacaacuacuacaagaaggacaacagcuacuucaccgagcagccgaucgaccuggugcccaaccagcccuaccccaacgccuccuucgacaacuucaaguucgucugcgacaacaucaaguucgccgacgaccucaaccagcugacgggguacaagaagccggcgagccgggagcugaaggugaccuucuuccccgaccucaacggcgacguggucgccaucgacuacaagcacuacacccccuccuucaagaagggcgccaagcugcugcacaagcccaucguguggcacgugaacaacgccaccaacaaggcgacguacaagccgaacaccuggugcauccgcugccucuggagcaccaagcccgucgagaccuccaacagcuucgacgugcugaaguccgaggacgcccaggggauggacaaccuggccugcgaggaccucaagcccgugagcgaggaggucguggagaaccccacgauccagaaggacgugcuggagugcaacgucaagaccaccgagguggugggcgacaucauccugaagccggccaacaacucccucaagaucaccgaggaggucgggcacacggaccugauggccgcguacguggacaacagcucccugaccaucaagaagcccaacgagcucagccgcgugcugggccugaagacccucgccacccacgggcuggccgccgucaacuccgugcccugggacacgaucgccaacuacgcgaagccguuccugaacaagguggucagcaccaccaccaacaucgugacgcggugccucaaccgcgugugcaccaacuacaugcccuacuucuucacccugcugcuccagcugugcaccuucacccgguccacgaacagccgcaucaaggccuccaugcccaccaccaucgccaagaacaccgucaagagcgugggcaaguucugccuggaggccagcuucaacuaccucaagucccccaacuucagcaagcugaucaacaucaucaucugguuccugcuccuguccgugugccugggcagccucaucuacuccacggccgcgcuggggguccugaugagcaaccucggcaugccguccuacugcaccggguaccgggagggcuaccugaacagcaccaacgugaccaucgccacguacugcaccggcuccauccccugcagcgugugccuguccgggcucgacagccuggacaccuaccccucccuggagaccauccagaucacgaucagcuccuucaagugggaccucaccgccuucggccuggucgccgagugguuccuggccuacauccucuucacccgcuucuucuacgugcuggggcuggcggccaucaugcagcucuucuucagcuacuucgccgugcacuucaucuccaacagcuggcugauguggcugaucaucaaccugguccagauggcccccaucuccgcgauggugcggauguacaucuucuucgccagcuucuacuacguguggaagagcuacguccacgugguggacggcugcaacuccagcaccugcaugaugugcuacaagcgcaaccgggccacgcgcgucgagugcaccaccaucgugaacgggguccggcgcuccuucuacguguacgccaacggcggcaagggguucugcaagcuccacaacuggaacugcgugaacugcgacaccuucugcgccggcagcacguucaucuccgacgaggucgcgcgggaccugagccugcaguucaagcgcccgaucaaccccaccgaccaguccagcuacaucguggacuccgugaccgucaagaacgggagcauccaccucuacuucgacaaggccggccagaagaccuacgagcggcacucccugagccacuucgugaaccuggacaaccuccgcgccaacaacacgaaggggucccugcccaucaacgugaucgucuucgacggcaagagcaagugcgaggaguccagcgccaaguccgccagcguguacuacucccagcugaugugccagcccauccuccugcuggaccaggcgcucgugagcgacgucggcgacagcgccgagguggccgugaagauguucgacgccuacgucaacaccuucuccagcaccuucaacgugccgauggagaagcugaagacccugguggccacggcggaggccgagcucgccaagaacgucucccuggacaacgugcugagcaccuucaucuccgccgcgcggcagggguucguggacagcgacgucgagaccaaggacgugguggagugccucaagcugucccaccagagcgacaucgaggucaccggcgacuccugcaacaacuacaugcugacguacaacaagguggagaacaugaccccccgcgaccucggggccugcaucgacugcagcgcccggcacaucaacgcccagguggccaagucccacaacaucgcgcugaucuggaacgucaaggacuucaugagccuguccgagcagcuccgcaagcagauccgcagcgccgccaagaagaacaaccugcccuucaagcugaccugcgccaccacgcggcagguggugaacgucgugaccaccaagaucgcccucaagggcggguga

SEQ ID NO: 18138 - RNA, 5841 nt, Artificial Sequence
  SARS-CoV-2__MT569474.1__non-structural protein 3 (NSP3) CDS gc
auggcccccaccaaggugaccuucggcgacgacacggucaucgaggugcagggguacaagagcgugaacaucaccuucgagcuggacgagcgcaucgacaagguccucaacgagaagugcuccgccuacaccguggagcugggcaccgaggugaacgaguucgcgugcgucguggccgacgccgugaucaagacgcugcagccggucagcgagcuccugaccccccuggggaucgaccucgacgagugguccauggccaccuacuaccuguucgacgagagcggcgaguucaagcuggccucccacauguacugcagcuucuacccccccgacgaggacgaggaggagggggacugcgaggaggaggaguucgagccguccacccaguacgaguacggcacggaggacgacuaccagggcaagccccucgaguucggggcgaccagcgccgcccugcagcccgaggaggagcaggaggaggacuggcuggacgacgacucccagcagaccgugggccagcaggacgggagcgaggacaaccagaccacgaccauccagaccaucguggagguccagccccagcucgagauggagcugaccccgguggugcagacgaucgaggucaacuccuucagcggcuaccugaagcucaccgacaacguguacaucaagaacgccgacaucguggaggaggcgaagaaggucaagcccaccgugguggucaacgccgccaacguguaccugaagcacgggggcggcguggccggggcccugaacaaggcgaccaacaacgccaugcaggucgaguccgacgacuacaucgccacgaacggcccccucaagguggggggcagcugcguccuguccggccacaaccuggccaagcacugccuccacgugguggggcccaacgucaacaagggcgaggacauccagcugcugaagagcgccuacgagaacuucaaccagcacgaggugcuccuggcgccgcugcucuccgccgggaucuucggcgccgaccccauccacagccugcgggugugcgucgacaccgugcgcaccaacguguaccuggccgucuucgacaagaaccucuacgacaagcugguguccagcuuccuggagaugaagagcgagaagcagguggagcagaagaucgccgagauccccaaggaggaggucaagcccuucaucaccgaguccaagccgagcguggagcagcggaagcaggacgacaagaagaucaaggcgugcguggaggaggucacgaccacccucgaggagaccaaguuccugacggagaaccugcuccuguacaucgacaucaacgggaaccugcaccccgacuccgccacccucgugagcgacaucgacaucaccuuccugaagaaggacgcccccuacaucgugggcgacgucgugcaggagggcgugcugaccgccgucgugauccccacgaagaaggccgggggcaccaccgagaugcucgcgaaggcccugcgcaaggugccgaccgacaacuacaucacgaccuaccccgggcagggccugaacggguacaccgucgaggaggccaagaccgugcucaagaagugcaaguccgccuucuacauccugcccagcaucaucuccaacgagaagcaggagauccugggcaccgugagcuggaaccuccgggagaugcuggcgcacgccgaggagacgcgcaagcugaugcccgucugcguggagaccaaggccaucguguccaccauccagcggaaguacaagggcaucaagauccaggagggggucguggacuacggcgcccgcuucuacuucuacaccagcaagacgaccguggccucccugaucaacacccucaacgaccugaacgagacccuggucacgaugccgcucggguacgugacccacggccugaaccuggaggaggcggcccgguacaugcgcagccucaaggugcccgccaccgucuccgugagcucccccgacgccgugaccgccuacaacggguaccugacgagcuccagcaagacccccgaggagcacuucaucgagaccaucucccuggcgggcagcuacaaggacuggagcuacuccggccagagcacccagcucgggaucgaguuccugaagcggggcgacaaguccgucuacuacacgagcaacccgaccaccuuccaccuggacggggaggugaucaccuucgacaaccucaagacgcugcugucccuccgcgaggugcggaccaucaaggucuucaccaccguggacaacaucaaccugcacacgcagguggucgacaugagcaugaccuacggccagcaguucggccccaccuaccuggacggggccgacgugaccaagaucaagccccacaacucccacgagggcaagacguucuacgugcucccgaacgacgacacccugcgcgucgaggccuucgaguacuaccacaccaccgaccccagcuuccuggggcgguacauguccgcccucaaccacacgaagaaguggaaguacccccaggugaacggccugaccagcaucaagugggccgacaacaacugcuaccuggcgaccgcccuccugacccugcagcagaucgagcucaaguucaaccccccggcccugcaggacgccuacuaccgcgcgcgggccggggaggccgccaacuucugcgcccugauccucgcguacugcaacaagacggugggcgagcugggcgacguccgcgagaccauguccuaccuguuccagcacgccaaccucgacagcugcaagcgggugcugaacgucgugugcaagaccugcgggcagcagcagaccacccugaagggcguggaggccgucauguacauggggacgcucuccuacgagcaguucaagaagggcgugcagauccccugcaccugcgggaagcaggccaccaaguaccuggugcagcaggagagccccuucgucaugauguccgcccccccggcgcaguacgagcugaagcacggcaccuucacgugcgccagcgaguacaccggcaacuaccagugcgggcacuacaagcacaucaccuccaaggagacccucuacugcaucgacggcgcccugcugacgaagagcagcgaguacaaggggcccaucaccgacguguucuacaaggagaacuccuacaccaccacgaucaagcccgugaccuacaagcucgacggcgucgugugcaccgagaucgaccccaagcuggacaacuacuacaagaaggacaacagcuacuucaccgagcagccgaucgaccuggugcccaaccagcccuaccccaacgccuccuucgacaacuucaaguucgucugcgacaacaucaaguucgccgacgaccucaaccagcugacgggguacaagaagccggcgagccgcgagcugaaggugaccuucuuccccgaccucaacggcgacguggucgccaucgacuacaagcacuacacccccuccuucaagaagggcgccaagcugcugcacaagcccaucguguggcacgugaacaacgccaccaacaaggcgacguacaagccgaacaccuggugcauccggugccucuggagcaccaagcccgucgagaccuccaacagcuucgacgugcugaaguccgaggacgcccaggggauggacaaccuggccugcgaggaccucaagcccgugagcgaggaggucguggagaaccccacgauccagaaggacgugcuggagugcaacgucaagaccaccgagguggugggcgacaucauccugaagccggccaacaacucccucaagaucaccgaggaggucgggcacacggaccugauggccgcguacguggacaacagcucccugaccaucaagaagcccaacgagcucagccgcgugcugggccugaagacccucgccacccacgggcuggccgccgucaacuccgugcccugggacacgaucgccaacuacgcgaagccguuccugaacaagguggucagcaccaccaccaacaucgugacgcgcugccucaaccgggugugcaccaacuacaugcccuacuucuucacccugcugcuccagcugugcaccuucacccgcuccacgaacagccggaucaaggccuccaugcccaccaccaucgccaagaacaccgucaagagcgugggcaaguucugccuggaggccagcuucaacuaccucaagucccccaacuucagcaagcugaucaacaucaucaucugguuccugcuccuguccgugugccugggcagccucaucuacuccacggccgcgcuggggguccugaugagcaaccucggcaugccguccuacugcaccggguaccgcgagggcuaccugaacagcaccaacgugaccaucgccacguacugcaccggcuccauccccugcagcgugugccuguccgggcucgacagccuggacaccuaccccucccuggagaccauccagaucacgaucagcuccuucaagugggaccucaccgccuucggccuggucgccgagugguuccuggccuacauccucuucacccgguucuucuacgugcuggggcuggcggccaucaugcagcucuucuucagcuacuucgccgugcacuucaucuccaacagcuggcugauguggcugaucaucaaccugguccagauggcccccaucuccgcgauggugcgcauguacaucuucuucgccagcuucuacuacguguggaagagcuacguccacgugguggacggcugcaacuccagcaccugcaugaugugcuacaagcggaaccgcgccacgcgggucgagugcaccaccaucgugaacgggguccgccgguccuucuacguguacgccaacggcggcaagggguucugcaagcuccacaacuggaacugcgugaacugcgacaccuucugcgccggcagcacguucaucuccgacgaggucgcgcgcgaccugagccugcaguucaagcggccgaucaaccccaccgaccaguccagcuacaucguggacuccgugaucgucaagaacgggagcauccaccucuacuucgacaaggccggccagaagaccuacgagcgccacucccugagccacuucgugaaccuggacaaccuccgggccaacaacaccaaggggucccugcccaucaacgugaucgucuucgacggcaagagcaagugcgaggaguccagcgccaaguccgccagcguguacuacucccagcugaugugccagcccauccuccugcuggaccaggcgcucgugagcgacgucggcgacagcgccgagguggccgugaagauguucgacgccuacgucaacacguucuccagcaccuucaacgugccgauggagaagcugaagacccugguggccaccgcggaggccgagcucgccaagaacgucucccuggacaacgugcugagcacguucaucuccgccgcgcgccagggguucguggacagcgacgucgagaccaaggacgugguggagugccucaagcugucccaccagagcgacaucgaggucaccggcgacuccugcaacaacuacaugcugaccuacaacaagguggagaacaugacgccccgggaccucggggccugcaucgacugcagcgcccgccacaucaacgcccagguggccaagucccacaacaucgcgcugaucuggaacgucaaggacuucaugagccuguccgagcagcuccggaagcagauccgcagcgccgccaagaagaacaaccugcccuucaagcugaccugcgccaccacccgccagguggugaacgucgugacgaccaagaucgcccucaagggcggguga

SEQ ID NO: 18139 - RNA, 5841 nt, Artificial Sequence
  SARS-CoV-2__MT520189.1__non-structural protein 3 (NSP3) CDS gc
auggcccccaccaaggugaccuucggcgacgacacggucaucgaggugcagggguacaagagcgugaacaucaccuucgagcuggacgagcgcaucgacaagguccucaacgagaagugcuccgccuacaccguggagcugggcaccgaggugaacgaguucgcgugcgucguggccgacgccgugaucaagacgcugcagccggucagcgagcuccugaccccccuggggaucgaccucgacgagugguccauggccaccuacuaccuguucgacgagagcggcgaguucaagcuggccucccacauguacugcagcuucuacccccccgacgaggacgaggaggagggggacugcgaggaggaggaguucgagccguccacccaguacgaguacggcacggaggacgacuaccagggcaagccccucgaguucggggcgaccagcgccgcccugcagcuggaggaggagcaggaggaggacuggcucgacgacgacucccagcagaccgugggccagcaggacgggagcgaggacaaccagaccacgaccauccagaccaucguggagguccagccccagcuggagauggagcugacccccguggugcagacgaucgaggucaacuccuucagcggcuaccucaagcugaccgacaacguguacaucaagaacgccgacaucguggaggaggcgaagaaggucaagccgaccgugguggucaacgccgccaacguguaccugaagcacgggggcggcguggccggggcccucaacaaggcgaccaacaacgccaugcaggucgaguccgacgacuacaucgccacgaacggcccccugaagguggggggcagcugcguccuguccggccacaaccucgccaagcacugccugcacgugguggggcccaacgucaacaagggcgaggacauccagcugcucaagagcgccuacgagaacuucaaccagcacgaggugcugcuggcgccccuccuguccgccgggaucuucggcgccgacccgauccacagccugcgggugugcgucgacaccgugcgcaccaacguguaccucgccgucuucgacaagaaccuguacgacaagcugguguccagcuuccucgagaugaagagcgagaagcagguggagcagaagaucgccgagauccccaaggaggaggucaagcccuucaucaccgaguccaagcccagcguggagcagcggaagcaggacgacaagaagaucaaggcgugcguggaggaggucacgaccacccuggaggagaccaaguuccugacggagaaccuccugcuguacaucgacaucaacgggaaccuccacccggacuccgccacccuggugagcgacaucgacaucaccuuccugaagaaggacgcccccuacaucgugggcgacgucgugcaggagggcgugcucaccgccgucgugauccccacgaagaaggccgggggcaccaccgagaugcuggcgaaggcccugcgcaaggugcccaccgacaacuacaucacgaccuacccggggcagggccucaacggguacaccgucgaggaggccaagaccgugcugaagaagugcaaguccgccuucuacauccugcccagcaucaucuccaacgagaagcaggagauccucggcaccgugagcuggaaccugcgggagaugcuggcgcacgccgaggagacgcgcaagcugaugcccgucugcguggagaccaaggccaucguguccaccauccagcggaaguacaagggcaucaagauccaggagggggucguggacuacggcgcccgcuucuacuucuacaccagcaagacgaccguggccucccucaucaacacccugaacgaccugaacgagacccucgucacgaugccccugggguacgugacccacggccugaaccucgaggaggcggcccgguacaugcgcagccugaaggugccggccaccgucuccgugagcucccccgacgccgugaccgccuacaacggguaccugacgagcuccagcaagacccccgaggagcacuucaucgagaccaucucccucgcgggcagcuacaaggacuggagcuacuccggccagagcacccagcuggggaucgaguuccugaagcggggcgacaaguccgucuacuacacgagcaaccccaccaccuuccaccucgacggggaggugaucaccuucgacaaccugaagacgcugcucucccugcgcgaggugcggaccaucaaggucuucaccaccguggacaacaucaaccugcacacgcagguggucgacaugagcaugaccuacggccagcaguucggcccgaccuaccucgacggggccgacgugaccaagaucaagccccacaacucccacgagggcaagacguucuacgugcugcccaacgacgacacccugcgcgucgaggccuucgaguacuaccacaccaccgacccgagcuuccucgggcgguacauguccgcccugaaccacacgaagaaguggaaguacccccaggugaacggccugaccagcaucaagugggccgacaacaacugcuaccucgcgaccgcccugcugacccuccagcagaucgagcugaaguucaacccccccgcccugcaggacgccuacuaccgcgcgcgggccggggaggccgccaacuucugcgcccucauccuggcguacugcaacaagacggugggcgagcugggcgacguccgcgagaccauguccuaccucuuccagcacgccaaccuggacagcugcaagcgggugcugaacgucgugugcaagaccugcgggcagcagcagaccacccucaagggcguggaggccgucauguacauggggacgcuguccuacgagcaguucaagaagggcgugcagaucccgugcaccugcgggaagcaggccaccaaguaccuggugcagcaggagagccccuucgucaugauguccgccccccccgcgcaguacgagcucaagcacggcaccuucacgugcgccagcgaguacaccggcaacuaccagugcgggcacuacaagcacaucaucuccaaggagacccuguacugcaucgacggcgcccugcucaccaagagcagcgaguacaaggggccgaucacggacguguucuacaaggagaacuccuacaccaccaccaucaagcccgugacguacaagcuggacggcgucgugugcaccgagaucgaccccaagcuggacaacuacuacaagaaggacaacagcuacuucaccgagcagcccaucgaccucgugccgaaccagcccuaccccaacgccuccuucgacaacuucaaguucgucugcgacaacaucaaguucgccgacgaccugaaccagcugaccggguacaagaagcccgcgagccgcgagcucaaggugacguucuucccggaccugaacggcgacguggucgccaucgacuacaagcacuacacccccuccuucaagaagggcgccaagcugcuccacaagcccaucguguggcacgugaacaacgccaccaacaaggcgaccuacaagcccaacacguggugcauccggugccuguggagcaccaagccggucgagaccuccaacagcuucgacgugcugaaguccgaggacgcccaggggauggacaaccucgccugcgaggaccugaagcccgugagcgaggaggucguggagaaccccaccauccagaaggacgugcuggagugcaacgucaagacgaccgagguggugggcgacaucauccucaagcccgccaacaacucccugaagaucaccgaggaggucgggcacaccgaccugauggccgcguacguggacaacagcucccucacgaucaagaagccgaacgagcugagccgcgugcugggccucaagacccuggccacccacgggcuggccgccgucaacuccgugcccugggacaccaucgccaacuacgcgaagcccuuccucaacaagguggucagcacgaccaccaacaucgugacccgcugccugaaccgggugugcacgaacuacaugccguacuucuucacccugcuccugcagcugugcaccuucacccgcuccaccaacagccggaucaaggccuccaugcccacgaccaucgccaagaacaccgucaagagcgugggcaaguucugccucgaggccagcuucaacuaccugaagucccccaacuucagcaagcugaucaacaucaucaucugguuccuccugcuguccgugugccucggcagccugaucuacuccaccgccgcgcuggggguccucaugagcaaccugggcaugcccuccuacugcacgggguaccgcgagggcuaccugaacagcaccaacgugaccaucgccaccuacugcacgggcuccaucccgugcagcgugugccucuccgggcuggacagccuggacaccuaccccucccucgagaccauccagaucaccaucagcuccuucaagugggaccugacggccuucggccuggucgccgagugguuccucgccuacauccuguucacccgguucuucuacgugcuggggcucgcggccaucaugcagcuguucuucagcuacuucgccgugcacuucaucuccaacagcuggcugauguggcugaucaucaaccucguccagauggcccccaucuccgcgauggugcgcauguacaucuucuucgccagcuucuacuacguguggaagagcuacguccacgugguggacggcugcaacuccagcaccugcaugaugugcuacaagcggaaccgcgccacccgggucgagugcacgaccaucgugaacgggguccgccgguccuucuacguguacgccaacggcggcaagggguucugcaagcugcacaacuggaacugcgugaacugcgacaccuucugcgccggcagcaccuucaucuccgacgaggucgcgcgcgaccugagccuccaguucaagcggcccaucaacccgacggaccaguccagcuacaucguggacuccgugaccgucaagaacgggagcauccaccuguacuucgacaaggccggccagaagaccuacgagcgccacucccugagccacuucgugaaccucgacaaccugcgggccaacaacaccaaggggucccugcccaucaacgugaucgucuucgacggcaagagcaagugcgaggaguccagcgccaaguccgccagcguguacuacucccagcucaugugccagcccauccugcugcucgaccaggcgcuggugagcgacgucggcgacagcgccgagguggccgugaagauguucgacgccuacgucaacacguucuccagcaccuucaacgugcccauggagaagcugaagacccucguggccaccgcggaggccgagcuggccaagaacgucucccuggacaacgugcucagcacguucaucuccgccgcgcgccagggguucguggacagcgacgucgagaccaaggacgugguggagugccugaagcugucccaccagagcgacaucgaggucaccggcgacuccugcaacaacuacaugcucaccuacaacaagguggagaacaugacgccgcgggaccugggggccugcaucgacugcagcgcccgccacaucaacgcccagguggccaagucccacaacaucgcgcugaucuggaacgucaaggacuucaugagccucuccgagcagcugcggaagcagauccgcagcgccgccaagaagaacaaccugcccuucaagcucaccugcgccaccacccgccagguggugaacgucgugacgaccaagaucgcccugaagggcggguga

SEQ ID NO: 18140 - RNA, 5841 nt, Artificial Sequence
  SARS-CoV-2__MT520208.1__non-structural protein 3 (NSP3) CDS gc
auggcccccaccaaggugaccuucggcgacgacacggucaucgaggugcagggguacaagagcgugaacaucaccuucgagcuggacgagcgcaucgacaagguccucaacgagaagugcuccgccuacaccguggagcugggcaccgaggugaacgaguucgcgugcgucguggccgacgccgugaucaagacgcugcagccggucagcgagcuccugaccccccuggggaucgaccucgacgagugguccauggccaccuacuaccuguucgacgagagcggcgaguucaagcuggccucccacauguacugcagcuucuacccccccgacgaggacgaggaggagggggacugcgaggaggaggaguucgagccguccacccaguacgaguacggcacggaggacgacuaccagggcaagccccucgaguucggggcgaccagcgccgcccugcagcccgaggaggagcaggaggaggacuggcuggacgacgacucccagcagaccgugggccagcaggacgggagcgaggacaaccagaccacgaccauccagaccaucguggagguccagccccagcucgagauggagcugaccccgguggugcagacgaucgaggucaacuccuucagcggcuaccugaagcucaccgacaacguguacaucaagaacgccgacaucguggaggaggcgaagaaggucaagcccaccgugguggucaacgccgccaacguguaccugaagcacgggggcggcguggccggggcccugaacaaggcgaccaacaacgccaugcaggucgaguccgacgacuacaucgccacgaacggcccccucaagguggggggcagcugcguccuguccggccacaaccuggccaagcacugccuccacgugguggggcccaacgucaacaagggcgaggacauccagcugcugaagagcgccuacgagaacuucaaccagcacgaggugcuccuggcgccgcugcucuccgccgggaucuucggcgccgaccccauccacagccugcgggugugcgucgacaccgugcgcaccaacguguaccuggccgucuucgacaagaaccucuacgacaagcugguguccagcuuccuggagaugaagagcgagaagcagguggagcagaagaucgccgagauccccaaggacgaggucaagcccuucaucaccgaguccaagccgagcguggagcagcggaagcaggacgacaagaagaucaaggcgugcguggaggaggucacgaccacccucgaggagaccaaguuccugacggagaaccugcuccuguacaucgacaucaacgggaaccugcaccccgacuccgccacccucgugagcgacaucgacaucaccuuccugaagaaggacgcccccuacaucgugggcgacgucgugcaggagggcgugcugaccgccgucgugauccccacgaagaaggccgggggcaccaccgagaugcucgcgaaggcccugcgcaaggugccgaccgacaacuacaucacgaccuaccccgggcagggccugaacggguacaccgucgaggaggccaagaccgugcucaagaagugcaaguccgccuucuacauccugcccagcaucaucuccaacgagaagcaggagauccugggcaccgugagcuggaaccuccgggagaugcuggcgcacgccgaggagacgcgcaagcugaugcccgucugcguggagaccaaggccaucguguccaccauccagcggaaguacaagggcaucaagauccaggagggggucguggacuacggcgcccgcuucuacuucuacaccagcaagacgaccguggccucccugaucaacacccucaacgaccugaacgagacccuggucacgaugccgcucggguacgugacccacggccugaaccuggaggaggcggcccgguacaugcgcagccucaaggugcccgccaccgucuccgugagcucccccgacgccgugaccgccuacaacggguaccugacgagcuccagcaagacccccgaggagcacuucaucgagaccaucucccuggcgggcagcuacaaggacuggagcuacuccggccagagcacccagcucgggaucgaguuccugaagcggggcgacaaguccgucuacuacacgagcaacccgaccaccuuccaccuggacggggaggugaucaccuucgacaaccucaagacgcugcugucccuccgcgaggugcggaccaucaaggucuucaccaccguggacaacaucaaccugcacacgcagguggucgacaugagcaugaccuacggccagcaguucggccccaccuaccuggacggggccgacgugaccaagaucaagccccacaacucccacgagggcaagacguucuacgugcucccgaacgacgacacccugcgcgucgaggccuucgaguacuaccacaccaccgaccccagcuuccuggggcgguacauguccgcccucaaccacacgaagaaguggaaguacccccaggugaacggccugaccagcaucaagugggccgacaacaacugcuaccuggcgaccgcccuccugacccugcagcagaucgagcucaaguucaaccccccggcccugcaggacgccuacuaccgcgcgcgggccggggaggccgccaacuucugcgcccugauccucgcguacugcaacaagacggugggcgagcugggcgacguccgcgagaccauguccuaccuguuccagcacgccaaccucgacagcugcaagcgggugcugaacgucgugugcaagaccugcgggcagcagcagaccacccugaagggcguggaggccgucauguacauggggacgcucuccuacgagcaguucaagaagggcgugcagauccccugcaccugcgggaagcaggccaccaaguaccuggugcagcaggagagccccuucgucaugauguccgcccccccggcgcaguacgagcugaagcacggcaccuucacgugcgccagcgaguacaccggcaacuaccagugcgggcacuacaagcacaucaccuccaaggagacccucuacugcaucgacggcgcccugcugacgaagagcagcgaguacaaggggcccaucaccgacguguucuacaaggagaacuccuacaccaccacgaucaagcccgugaccuacaagcucgacggcgucgugugcaccgagaucgaccccaagcuggacaacuacuacaagaaggacaacagcuacuucaccgagcagccgaucgaccuggugcccaaccagcccuaccccaacgccuccuucgacaacuucaaguucgucugcgacaacaucaaguucgccgacgaccucaaccagcugacgggguacaagaagccggcgagccgcgagcugaaggugaccuucuuccccgaccucaacggcgacguggucgccaucgacuacaagcacuacacccccuccuucaagaagggcgccaagcugcugcacaagcccaucguguggcacgugaacaacgccaccaacaaggcgacguacaagccgaacaccuggugcauccggugccucuggagcaccaagcccgucgagaccuccaacagcuucgacgugcugaaguccgaggacgcccaggggauggacaaccuggccugcgaggaccucaagcccgugagcgaggaggucguggagaaccccacgauccagaaggacgugcuggagugcaacgucaagaccaccgagguggugggcgacaucauccugaaguccgccaacaacagccucaagaucaccgaggaggucgggcacacggaccugauggccgcguacguggacaacuccagccugaccaucaagaagccgaacgagcucucccgcgugcugggccugaagacccucgccacccacgggcuggccgccgucaacagcgugcccugggacacgaucgccaacuacgcgaagcccuuccugaacaagguggucuccaccaccaccaacaucgugacgcgcugccucaaccgggugugcaccaacuacaugccguacuucuucacccugcugcuccagcugugcaccuucacccgcagcacgaacucccggaucaaggccagcaugcccaccaccaucgccaagaacaccgucaagagcgugggcaaguucugccuggaggccuccuucaacuaccucaagagccccaacuucuccaagcugaucaacaucaucaucugguuccugcuccugagcgugugccugggcucccucaucuacagcacggccgcgcuggggguccugauguccaaccucggcaugcccagcuacugcaccggguaccgcgagggcuaccugaacuccaccaacgugaccaucgccacguacugcaccggcagcaucccgugcuccgugugccugagcgggcucgacucccuggacaccuaccccagccuggagaccauccagaucacgaucuccagcuucaagugggaccucaccgccuucggccuggucgccgagugguuccuggccuacauccucuucacccgguucuucuacgugcuggggcuggcggccaucaugcagcucuucuucuccuacuucgccgugcacuucaucagcaacuccuggcugauguggcugaucaucaaccugguccagauggcccccaucagcgcgauggugcgcauguacaucuucuucgccagcuucuacuacguguggaaguccuacguccacgugguggacggcugcaacagcuccaccugcaugaugugcuacaagcggaaccgcgccacgcgggucgagugcaccaccaucgugaacgggguccgccggagcuucuacguguacgccaacggcggcaagggguucugcaagcuccacaacuggaacugcgugaacugcgacaccuucugcgccggcuccacguucaucagcgacgaggucgcgcgcgaccugucccugcaguucaagcggcccaucaacccgaccgaccagagcuccuacaucguggacagcgugaccgucaagaacggguccauccaccucuacuucgacaaggccggccagaagaccuacgagcgccacagccugucccacuucgugaaccuggacaaccuccgggccaacaacacgaaggggagccugcccaucaacgugaucgucuucgacggcaaguccaagugcgaggagagcuccgugaagagcgccuccguguacuacagccagcugaugugccagcccauccuccugcuggaccaggcccucgucagcgacgugggcgacuccgcggagguggccgucaagauguucgacgccuacgugaacaccuucagcuccaccuucaacgugcccauggagaagcugaagacccuggucgccacggccgaggcggagcucgccaagaacgugagccuggacaacgugcuguccaccuucaucagcgccgcccgccagggguucgucgacuccgacguggagaccaaggacguggucgagugccucaagcugagccaccaguccgacaucgaggugaccggcgacagcugcaacaacuacaugcugacguacaacaagguggagaacaugaccccgcgggaccucggggcgugcaucgacugcuccgcccgccacaucaacgcccaggucgccaagagccacaacaucgcccugaucuggaacgugaaggacuucaugucccugagcgagcagcuccggaagcagauccgcuccgcggccaagaagaacaaccugcccuucaagcugaccugcgccaccacgcgccagguggucaacguggugaccaccaagaucgcccucaagggcggguga

SEQ ID NO: 18141 - RNA, 5841 nt, Artificial Sequence
  SARS-CoV-2__MT520254.1__non-structural protein 3 (NSP3) CDS gc
auggcccccaccaaggugaccuucggcgacgacacggucaucgaggugcagggguacaagagcgugaacaucaccuucgagcuggacgagcgcaucgacaagguccucaacgagaagugcuccgccuacaccguggagcugggcaccgaggugaacgaguucgcgugcgucguggccgacgccgugaucaagacgcugcagccggucagcgagcuccugaccccccuggggaucgaccucgacgagugguccauggccaccuacuaccuguucgacgagagcggcgaguucaagcuggccucccacauguacugcagcuucuacccccccgacgaggacgaggaggagggggacugcgaggaggaggaguucgagccguccacccaguacgaguacggcacggaggacgacuaccagggcaagccccucgaguucggggcgaccagcgccgcccugcagcuggaggaggagcaggaggaggacuggcucgacgacgacucccagcagaccgugggccagcaggacgggagcgaggacaaccagaccacgaccauccagaccaucguggagguccagccccagcuggagauggagcugacccccguggugcagacgaucgaggucaacuccuucagcggcuaccucaagcugaccgacaacguguacaucaagaacgccgacaucguggaggaggcgaagaaggucaagccgaccgugguggucaacgccgccaacguguaccugaagcacgggggcggcguggccggggcccucaacaaggcgaccaacaacgccaugcaggucgaguccgacgacuacaucgccacgaacggcccccugaagguggggggcagcugcguccuguccggccacaaccucgccaagcacugccugcacgugguggggcccaacgucaacaagggcgaggacauccagcugcucaagagcgccuacgagaacuucaaccagcacgaggugcugcuggcgccccuccuguccgccgggaucuucggcgccgacccgauccacagccugcgggugugcgucgacaccgugcgcaccaacguguaccucgccgucuucgacaagaaccuguacgacaagcugguguccagcuuccucgagaugaagagcgagaagcagguggagcagaagaucgccgagauccccaaggaggaggucaagcccuucaucaccgaguccaagcccagcguggagcagcggaagcaggacgacaagaagaucaaggcgugcguggaggaggucacgaccacccuggaggagaccaaguuccugacggagaaccuccugcuguacaucgacaucaacgggaaccuccacccggacuccgccacccuggugagcgacaucgacaucaccuuccugaagaaggacgcccccuacaucgugggcgacgucgugcaggagggcgugcucaccgccgucgugauccccacgaagaaggccgggggcaccaccgagaugcuggcgaaggcccugcgcaaggugcccaccgacaacuacaucacgaccuacccggggcagggccucaacggguacaccgucgaggaggccaagaccgugcugaagaagugcaaguccgccuucuacauccugcccagcaucaucuccaacgagaagcaggagauccucggcaccgugagcuggaaccugcgggagaugcuggcgcacgccgaggagacgcgcaagcugaugcccgucugcguggagaccaaggccaucguguccaccauccagcggaaguacaagggcaucaagauccaggagggggucguggacuacggcgcccgcuucuacuucuacaccagcaagacgaccguggccucccucaucaacacccugaacgaccugaacgagacccucgucacgaugccccugggguacgugacccacggccugaaccucgaggaggcggcccgguacaugcgcagccugaaggugccggccaccgucuccgugagcucccccgacgccgugaccgccuacaacggguaccugacgagcuccagcaagacccccgaggagcacuucaucgagaccaucucccucgcgggcagcuacaaggacuggagcuacuccggccagagcacccagcuggggaucgaguuccugaagcggggcgacaaguccgucuacuacacgagcaaccccaccgccuuccaccucgacggggaggugaucaccuucgacaaccugaagacccugcucucccugcgcgaggugcggacgaucaaggucuucaccaccguggacaacaucaaccugcacacccagguggucgacaugagcaugacguacggccagcaguucggcccgaccuaccucgacggggccgacgugaccaagaucaagccccacaacucccacgagggcaagaccuucuacgugcugcccaacgacgacacgcugcgcgucgaggccuucgaguacuaccacaccaccgacccgagcuuccucgggcgguacauguccgcccugaaccacaccaagaaguggaaguacccccaggugaacggccugacgagcaucaagugggcggacaacaacugcuaccucgccaccgcccugcugacccuccagcagaucgagcugaaguucaacccccccgcccugcaggacgcguacuaccgcgcccgggccggggaggccgccaacuucugcgcgcucauccuggccuacugcaacaagaccgugggcgagcugggcgacguccgcgagacgauguccuaccucuuccagcacgccaaccuggacagcugcaagcgggugcugaacgucgugugcaagaccugcgggcagcagcagaccacccucaagggcguggaggccgucauguacauggggacccuguccuacgagcaguucaagaagggcgugcagaucccgugcacgugcgggaagcaggccaccaaguaccuggugcagcaggagagccccuucgucaugauguccgcgccccccgcccaguacgagcucaagcacggcaccuucaccugcgccagcgaguacacgggcaacuaccagugcgggcacuacaagcacaucaccuccaaggagacccuguacugcaucgacggcgcccugcucaccaagagcagcgaguacaaggggccgaucacggacguguucuacaaggagaacuccuacaccaccaccaucaagcccgugacguacaagcuggacggcgucgugugcaccgagaucgaccccaagcuggacaacuacuacaagaaggacaacagcuacuucaccgagcagcccaucgaccucgugccgaaccagcccuaccccaacgccuccuucgacaacuucaaguucgucugcgacaacaucaaguucgcggacgaccugaaccagcugaccggguacaagaagcccgccagccgcgagcucaaggugacguucuucccggaccugaacggcgacguggucgccaucgacuacaagcacuacacccccuccuucaagaagggcgccaagcugcuccacaagcccaucguguggcacgugaacaacgcgaccaacaaggccaccuacaagcccaacacguggugcauccggugccuguggagcaccaagccggucgagaccuccaacagcuucgacgugcugaagcucgaggacgcccaggggauggacaaccuggccugcgaggaccugaagcccguguccgaggaggucguggagaaccccaccauccagaaggacgugcucgagugcaacgucaagacgaccgagguggugggcgacaucauccugaagcccgccaacaacagccugaagaucaccgaggaggucgggcacaccgaccucauggcggccuacguggacaacuccagccugacgaucaagaagccgaacgagcugucccgcgugcucggccugaagacccuggccacccacgggcucgccgccgucaacagcgugcccugggacaccaucgcgaacuacgccaagcccuuccugaacaagguggucuccacgaccaccaacaucgugacccgcugccugaaccgggugugcacgaacuacaugccguacuucuucacccuccugcugcagcucugcaccuucacccgcagcaccaacucccggaucaaggccagcaugcccacgaccaucgccaagaacaccgucaaguccgugggcaaguucugccuggaggccagcuucaacuaccugaagagccccaacuucuccaagcucaucaacaucaucaucugguuccugcugcucagcgugugccugggcucccugaucuacagcaccgcggcccucgggguccugauguccaaccugggcaugcccagcuacugcacgggguaccgcgagggcuaccucaacuccaccaacgugaccaucgccaccuacugcacgggcagcaucccgugcuccgugugccugagcgggcuggacucccucgacaccuaccccagccuggagaccauccagaucaccaucuccagcuucaagugggaccugacggccuucggccucgucgccgagugguuccuggcguacauccuguucacccgguucuucuacgugcucgggcuggccgccaucaugcagcuguucuucuccuacuucgccgugcacuucaucagcaacuccuggcugauguggcucaucaucaaccugguccagauggcgcccaucagcgccauggugcgcauguacaucuucuucgccuccuucuacuacguguggaagagcuacguccacgugguggacggcugcaacagcuccaccugcaugaugugcuacaagcggaaccgcgccacccgggucgagugcacgaccaucgugaacgggguccgccggagcuucuacguguacgccaacggcggcaagggguucugcaagcugcacaacuggaacugcgugaacugcgacaccuucugcgcgggcuccaccuucaucagcgacgaggucgcccgcgaccucucccugcaguucaagcggcccaucaacccgacggaccagagcuccuacaucguggacagcgugaccgucaagaacggguccauccaccuguacuucgacaaggccggccagaagaccuacgagcgccacagccucucccacuucgugaaccuggacaaccugcgggccaacaacaccaaggggagccuccccaucaacgugaucgucuucgacggcaaguccaagugcgaggagagcuccgccaagagcgcguccguguacuacagccagcugaugugccagcccauccugcuccuggaccaggcccugguguccgacgucggcgacagcgccgagguggccgugaagauguucgacgccuacgucaacacguucagcuccaccuucaacgugcccauggagaagcucaagacccugguggcgaccgccgaggccgagcuggccaagaacgucagccucgacaacgugcuguccacguucaucagcgcggcccgccagggguucguggacuccgacgucgagaccaaggacgugguggagugccugaagcucagccaccaguccgacaucgaggucaccggcgacagcugcaacaacuacaugcugaccuacaacaagguggagaacaugacgccgcgggaccugggggccugcaucgacugcuccgcccgccacaucaacgcccagguggcgaagagccacaacaucgcccucaucuggaacgucaaggacuucaugucccugagcgagcagcugcggaagcagauccgcuccgccgccaagaagaacaaccuccccuucaagcugaccugcgccaccacccgccagguggugaacgucgugacgaccaagaucgcgcugaagggcggguga

SEQ ID NO: 18142 - RNA, 5841 nt, Artificial Sequence
  SARS-CoV-2__MT520255.1__non-structural protein 3 (NSP3) CDS gc
auggcccccaccaaggugaccuucggcgacgacacggucaucgaggugcagggguacaagagcgugaacaucaccuucgagcuggacgagcgcaucgacaagguccucaacgagaagugcuccgccuacaccguggagcugggcaccgaggugaacgaguucgcgugcgucguggccgacgccgugaucaagacgcugcagccggucagcgagcuccugaccccccuggggaucgaccucgacgagugguccauggccaccuacuaccuguucgacgagagcggcgaguucaagcuggccucccacauguacugcagcuucuacccccccgacgaggacgaggaggagggggacugcgaggaggaggaguucgagccguccacccaguacgaguacggcacggaggacgacuaccagggcaagccccucgaguucggggcgaccagcgccgcccugcagcccgaggaggagcaggaggaggacuggcuggacgacgacucccagcagaccgugggccagcaggacgggagcgaggacaaccagaccacgaccauccagaccaucguggagguccagccccagcucgagauggagcugaccccgguggugcagacgaucgaggucaacuccuucagcggcuaccugaagcucaccgacaacguguacaucaagaacgccgacaucguggaggaggcgaagaaggucaagcccaccgugguggucaacgccgccaacguguaccugaagcacgggggcggcguggccggggcccugaacaaggcgaccaacaacgccaugcaggucgaguccgacgacuacaucgccacgaacggcccccucaagguggggggcagcugcguccuguccggccacaaccuggccaagcacugccuccacgugguggggcccaacgucaacaagggcgaggacauccagcugcugaagagcgccuacgagaacuucaaccagcacgaggugcuccuggcgccgcugcucuccgccgggaucuucggcgccgaccccauccacagccugcgggugugcgucgacaccgugcgcaccaacguguaccuggccgucuucgacaagaaccucuacgacaagcugguguccagcuuccuggagaugaagagcgagaagcagguggagcagaagaucgccgagauccccaaggaggaggucaagcccuucaucaccgaguccaagccgagcguggagcagcggaagcaggacgacaagaagaucaaggcgugcguggaggaggucacgaccacccucgaggagaccaaguuccugacggagaaccugcuccuguacaucgacaucaacgggaaccugcaccccgacuccgccacccucgugagcgacaucgacaucaccuuccugaagaaggacgcccccuacaucgugggcgacgucgugcaggagggcgugcugaccgccgucgugauccccacgaagaaggccgggggcaccaccgagaugcucgcgaaggcccugcgcaaggugccgaccgacaacuacaucacgaccuaccccgggcagggccugaacggguacaccgucgaggaggccaagaccgugcucaagaagugcaaguccgccuucuacauccugcccagcaucaucuccaacgagaagcaggagauccugggcaccgugagcuggaaccuccgggagaugcuggcgcacgccgaggagacgcgcaagcugaugcccgucugcguggagaccaaggccaucguguccaccauccagcggaaguacaagggcaucaagauccaggagggggucguggacuacggcgcccgcuucuacuucuacaccagcaagacgaccguggccucccugaucaacacccucaacgaccugaacgagacccuggucacgaugccgcucggguacgugacccacggccugaaccuggaggaggcggcccgguacaugcgcagccucaaggugcccgccaccgucuccgugagcucccccgacgccgugaccgccuacaacggguaccugacgagcuccagcaagacccccgaggagcacuucaucgagaccaucucccuggcgggcagcuacaaggacuggagcuacuccggccagagcacccagcucgggaucgaguuccugaagcggggcgacaaguccgucuacuacacgagcaacccgaccaccuuccaccuggacggggaggugaucaccuucgacaaccucaagacgcugcugucccuccgcgaggugcggaccaucaaggucuucaccaccguggacaacaucaaccugcacacgcagguggucgacaugagcaugaccuacggccagcaguucggccccaccuaccuggacggggccgacgugaccaagaucaagccccacaacucccacgagggcaagacguucuacgugcucccgaacgacgacacccugcgcgucgaggccuucgaguacuaccacaccaccgaccccagcuuccuggggcgguacauguccgcccucaaccacacgaagaaguggaaguacccccaggugaacggccugaccagcaucaagugggccgacaacaacugcuaccuggcgaccgcccuccugacccugcagcagaucgagcucaaguucaaccccccggcccugcaggacgccuacuaccgcgcgcgggccggggaggccgccaacuucugcgcccugauccucgcguacugcaacaagacggugggcgagcugggcgacguccgcgagaccauguccuaccuguuccagcacgccaaccucgacagcugcaagcgggugcugaacgucgugugcaagaccugcgggcagcagcagaccacccugaagggcguggaggccgucauguacauggggacgcucuccuacgagcaguucaagaagggcgugcagauccccugcaccugcgggaagcaggccaccaaguaccuggugcagcaggagagccccuucgucaugauguccgcccccccggcgcaguacgagcugaagcacggcaccuucacgugcgccagcgaguacaccggcaacuaccagugcgggcacuacaagcacaucaccuccaaggagacccucuacugcaucgacggcgcccugcugacgaagagcagcgaguacaaggggcccaucaccgacguguucuacaaggagaacuccuacaccaccacgaucaagcccgugaccuacaagcucgacggcgucgugugcaccgagaucgaccccaagcuggacaacuacuacaagaaggacaacagcuacuucaccgagcagccgaucgaccuggugcccaaccagcccuaccccaacgccuccuucgacaacuucaaguucgucugcgacaacacgaaguucgccgacgaccucaaccagcugaccggguacaagaagccggcgagccgcgagcugaaggugaccuucuuccccgaccucaacggcgacguggucgccaucgacuacaagcacuacacccccuccuucaagaagggcgccaagcugcugcacaagcccaucguguggcacgugaacaacgccacgaacaaggcgaccuacaagccgaacaccuggugcauccggugccucuggagcaccaagcccgucgagacguccaacagcuucgacgugcugaaguccgaggacgcccaggggauggacaaccuggccugcgaggaccucaagcccgugagcgaggaggucguggagaaccccaccauccagaaggacgugcuggagugcaacgucaagaccaccgagguggugggcgacaucauccugaagccggccaacaacucccucaagaucacggaggaggucgggcacaccgaccugauggccgcguacguggacaacagcucccugaccaucaagaagcccaacgagcucagccgcgugcugggccugaagacccucgccacgcacgggcuggccgccgucaacuccgugcccugggacaccaucgccaacuacgcgaagccguuccugaacaagguggucagcaccaccacgaacaucgugacccgcugccucaaccgggugugcaccaacuacaugcccuacuucuucacccugcugcuccagcugugcaccuucacgcgcuccaccaacagccggaucaaggccuccaugcccaccaccaucgccaagaacacggucaagagcgugggcaaguucugccuggaggccagcuucaacuaccucaagucccccaacuucagcaagcugaucaacaucaucaucugguuccugcuccuguccgugugccugggcagccucaucuacuccaccgccgcgcuggggguccugaugagcaaccucggcaugccguccuacugcaccggguaccgcgagggcuaccugaacagcaccaacgugacgaucgccaccuacugcaccggcuccauccccugcagcgugugccuguccgggcucgacagccuggacaccuaccccucccuggagacgauccagaucaccaucagcuccuucaagugggaccucaccgccuucggccuggucgccgagugguuccuggccuacauccucuucacccgguucuucuacgugcuggggcuggcggccaucaugcagcucuucuucagcuacuucgccgugcacuucaucuccaacagcuggcugauguggcugaucaucaaccugguccagauggcccccaucuccgcgauggugcgcauguacaucuucuucgccagcuucuacuacguguggaagagcuacguccacgugguggacggcugcaacuccagcacgugcaugaugugcuacaagcggaaccgcgccacccgggucgagugcaccaccaucgugaacgggguccgccgguccuucuacguguacgccaacggcggcaagggguucugcaagcuccacaacuggaacugcgugaacugcgacacguucugcgccggcagcaccuucaucuccgacgaggucgcgcgcgaccugagccugcaguucaagcggccgaucaaccccaccgaccaguccagcuacaucguggacuccgugaccgucaagaacgggagcauccaccucuacuucgacaaggccggccagaagacguacgagcgccacucccugagccacuucgugaaccuggacaaccuccgggccaacaacaccaaggggucccugcccaucaacgugaucgucuucgacggcaagagcaagugcgaggaguccagcgccaaguccgccagcguguacuacucccagcugaugugccagcccauccuccugcuggaccaggcgcucgugagcgacgucggcgacagcgccgagguggccgugaagauguucgacgccuacgucaacaccuucuccagcaccuucaacgugccgauggagaagcugaagacgcugguggccaccgcggaggccgagcucgccaagaacgucucccuggacaacgugcugagcaccuucaucuccgccgcgcgccagggguucguggacagcgacgucgagaccaaggacgugguggagugccucaagcugucccaccagagcgacaucgaggucacgggcgacuccugcaacaacuacaugcugaccuacaacaagguggagaacaugaccccccgggaccucggggccugcaucgacugcagcgcccgccacaucaacgcccagguggccaagucccacaacaucgcgcugaucuggaacgucaaggacuucaugagccuguccgagcagcuccggaagcagauccgcagcgccgccaagaagaacaaccugcccuucaagcugaccugcgccacgacccgccagguggugaacgucgugaccaccaagaucgcccucaagggcggguga

SEQ ID NO: 18143 - RNA, 5841 nt, Artificial Sequence
  SARS-CoV-2__MT520265.1__non-structural protein 3 (NSP3) CDS gc
auggcccccaccaaggugaccuucggcgacgacacggucaucgaggugcagggguacaagagcgugaacaucaccuucgagcuggacgagcgcaucgacaagguccucaacgagaagugcuccgccuacaccguggagcugggcaccgaggugaacgaguucgcgugcgucguggccgacgccgugaucaagacgcugcagccggucagcgagcuccugaccccccuggggaucgaccucgacgagugguccauggccaccuacuaccuguucgacgagagcggcgaguucaagcuggccucccacauguacugcagcuucuacccccccgacgaggacgaggaggagggggacugcgaggaggaggaguucgagccguccacccaguacgaguacggcacggaggacgacuaccagggcaagccccucgaguucggggcgaccagcgccgcccugcagcccgaggaggagcaggaggaggacuggcuggacgacgacucccagcagaccgugggccagcaggacgggagcgaggacaaccagaccacgaccauccagaccaucguggagguccagccccagcucgagauggagcugaccccgguggugcagacgaucgaggucaacuccuucagcggcuaccugaagcucaccgacaacguguacaucaagaacgccgacaucguggaggaggcgaagaaggucaagcccaccgugguggucaacgccgccaacguguaccugaagcacgggggcggcguggccggggcccugaacaaggcgaccaacaacgccaugcaggucgaguccgacgacuacaucgccacgaacggcccccucaagguggggggcagcugcguccuguccggccacaaccuggccaagcacugccuccacgugguggggcccaacgucaacaagggcgaggacauccagcugcugaagagcgccuacgagaacuucaaccagcacgaggugcuccuggcgccgcugcucuccgccgggaucuucggcgccgaccccauccacagccugcgggugugcgucgacaccgugcgcaccaacguguaccuggccgucuucgacaagaaccucuacgacaagcugguguccagcuuccuggagaugaagagcgagaagcagguggagcagaagaucgccgagauccccaaggaggaggucaagcccuucaucaccgaguccaagccgagcguggagcagcggaagcaggacgacaagaagaucaaggcgugcguggaggaggucacgaccacccucgaggagaccaaguuccugacggagaaccugcuccuguacaucgacaucaacgggaaccugcaccccgacuccgccacccucgugagcgacaucgacaucaccuuccugaagaaggacgcccccuacaucgugggcgacgucgugcaggagggcgugcugaccgccgucgugauccccacgaagaaggccgggggcaccaccgagaugcucgcgaaggcccugcgcaaggugccgaccgacaacuacaucacgaccuaccccgggcagggccugaacggguacaccgucgaggaggccaagaccgugcucaagaagugcaaguccgccuucuacauccugcccagcaucaucuccaacgagaagcaggagauccugggcaccgugagcuggaaccuccgggagaugcuggcgcacgccgaggagacgcgcaagcugaugcccgucugcguggagaccaaggccaucguguccaccauccagcggaaguacaagggcaucaagauccaggagggggucguggacuacggcgcccgcuucuacuucuacaccagcaagacgaccguggccucccugaucaacacccucaacgaccugaacgagacccuggucacgaugccgcucggguacgugacccacggccugaaccuggaggaggcggcccgguacaugcgcagccucaaggugcccgccaccgucuccgugagcucccccgacgccgugaccgccuacaacggguaccugacgagcuccagcaagacccccgaggagcacuucaucgagaccaucucccuggcgggcagcuacaaggacuggagcuacuccggccagagcacccagcucgggaucgaguuccugaagcggggcgacaaguccgucuacuacacgagcaacccgaccaccuuccaccuggacggggaggugaucaccuucgacaaccucaagacgcugcugucccuccgcgaggugcggaccaucaaggucuucaccaccguggacaacaucaaccugcacacgcagguggucgacaugagcaugaccuacggccagcaguucggccccaccuaccuggacggggccgacgugaccaagaucaagccccacaacucccacgagggcaagacguucuacgugcucccgaacgacgacacccugcgcgucgaggccuucgaguacuaccacaccaccgaccccagcuuccuggggcgguacauguccgcccucaaccacacgaagaaguggaaguacccccaggugaacggccugaccagcaucaagugggccgacaacaacugcuaccuggcgaccgcccuccugacccugcagcagaucgagcucaaguucaaccccccggcccugcaggacgccuacuaccgcgcgcgggccggggaggccgccaacuucugcgcccugauccucgcguacugcaacaagacggugggcgagcugggcgacguccgcgagaccauguccuaccuguuccagcacgccaaccucgacagcugcaagcgggugcugaacgucgugugcaagaccugcgggcagcagcagaccacccugaagggcguggaggccgucauguacauggggacgcucuccuacgagcaguucaagaagggcgugcagauccccugcaccugcgggaagcaggccaccaaguaccuggugcagcaggagagccccuucgucaugauguccgcccccccggcgcaguacgagcugaagcacggcaccuucacgugcgccagcgaguacaccggcaacuaccagugcgggcacuacaagcacaucaccuccaaggagacccucuacugcaucgacggcgcccugcugacgaagagcagcgaguacaaggggcccaucaccgacguguucuacaaggagaacuccuacaccaccacgaucaagcccgugaccuacaagcucgacggcgucgugugcaccgagaucgaccccaagcuggacaacuacuacaagaaggacaacagcuacuucaccgagcagccgaucgaccuggugcccaaccagcccuaccccaacgccuccuucgacaacuucaaguucgucugcgacaacaucaaguucgccgacgaccucaaccagcugacgggguacaagaagccggcgagccgcgagcugaaggugaccuucuuccccgaccucaacggcgacguggucgccaucgacuacaagcacuacacccccuccuucaagaagggcgccaagcugcugcacaagcccaucguguggcacgugaacaacgccaccaacaaggcgacguacaagccgaacaccuggugcauccggugccucuggagcaccaagcccgucgagaccuccaacagcuucgacgugcugaaguccgaggacgcccaggggauggacaaccuggccugcgaggaccucaagcccgugagcgaggaggucguggagaaccccacgauccagaaggacgugcuggagugcaacgucaagaccaccgagguggugggcgacaucauccugaagccggccaacaacucccucaagaucaccgaggaggucgggcacacggaccugauggccgcguacguggacaacagcucccugaccaucaagaagcccaacgagcucagccgcgugcugggccugaagacccucgccacccacgggcuggccgccgucaacuccgugcccugggacacgaucgccaacuacgcgaagccguuccugaacaagguggucagcaccaccaccaacaucgugacgcgcugccucaaccgggugugcaccaacuacaugcccuacuucuucacccugcugcuccagcugugcaccuucacccgcuccacgaacagccggaucaaggccuccaugcccaccaccaucgccaagaacaccgucaagagcgugggcaaguucugccuggaggccagcuucaacuaccucaagucccccaacuucagcaagcugaucaacaucaucaucugguuccugcuccuguccgugugccugggcagccucaucuacuccacggccgcgcuggggguccugaugagcaaccucggcaugccguccuacugcaccggguaccgcgagggcuaccugaacagcaccaacgugaccaucgccacguacugcaccggcuccauccccugcagcgugugccuguccgggcucgacagccuggacaccuaccccucccuggagaccauccagaucacgaucagcuccuucaagugggaccucaccgccuucggccuggucgccgagugguuccuggccuacauccucuucacccgguucuucuacgugcuggggcuggcggccaucaugcagcucuucuucagcuacuucgccgugcacuucaucuccaacagcuggcugauguggcugaucaucaaccugguccagauggcccccaucuccgcgauggugcgcauguacaucuucuucgccagcuucuacuacguguggaagagcuacguccacgugguggacggcugcaacuccagcaccugcaugaugugcuacaagcggaaccgcgccacgcgggucgagugcaccaccaucgugaacgggguccgccgguccuucuacguguacgccaacggcggcaagggguucugcaagcuccacaacuggaacugcgugaacugcgacaccuucugcgccggcagcacguucaucuccgacgaggucgcgcgcgaccugagccugcaguucaagcggccgaucaaccccaccgaccaguccagcuacaucguggacuccgugaccgucaagaacgggagcauccaccucuacuucgacaaggccggccagaagaccuacgagcgccacucccugagccacuucgugaaccuggacaaccuccgggccaacaacacgaaggggucccugcccaucaacgugaucgucuucgacggcaagagcaagugcgaggaguccagcgccaaguccgccagcguguacuacucccagcugaugugccagcccauccuccugcuggaccaggcgcucgugagcgacgucggcgacagcgccgagguggccgugaagauguucgacgccuacgucaacaccuucuccagcaccuucaacgugccgauggagaaguucaagacccugguggccacggcggaggccgagcuggccaagaacgucucccucgacaacgugcugagcaccuucaucuccgccgcgcgccagggguucguggacagcgacgucgagaccaaggacgugguggagugccugaagcucucccaccagagcgacaucgaggucaccggcgacuccugcaacaacuacaugcugacguacaacaagguggagaacaugaccccccgggaccugggggccugcaucgacugcagcgcccgccacaucaacgcccagguggccaagucccacaacaucgcgcucaucuggaacgucaaggacuucaugagccuguccgagcagcugcggaagcagauccgcagcgccgccaagaagaacaaccuccccuucaagcugaccugcgccaccacgcgccagguggugaacgucgugaccaccaagaucgcccugaagggcggguga

SEQ ID NO: 18144 - RNA, 5841 nt, Artificial Sequence
  SARS-CoV-2__MT520343.1__non-structural protein 3 (NSP3) CDS gc
auggcccccaccaaggugaccuucggcgacgacacggucaucgaggugcagggguacaagagcgugaacaucaccuucgagcuggacgagcgcaucgacaagguccucaacgagaagugcuccgccuacaccguggagcugggcaccgaggugaacgaguucgcgugcgucguggccgacgccgugaucaagacgcugcagccggucagcgagcuccugaccccccuggggaucgaccucgacgagugguccauggccaccuacuaccuguucgacgagagcggcgaguucaagcuggccucccacauguacugcagcuucuacccccccgacgaggacgaggaggagggggacugcgaggaggaggaguucgagccguccacccaguacgaguacggcacggaggacgacuaccagggcaagccccucgaguucggggcgaccagcgccgcccugcagcccgaggaggagcaggaggaggacuggcuggacgacgacucccagcagaccgugggccagcaggacgggagcgaggacaaccagaccacgaccauccagaccaucguggagguccagccccagcucgagauggagcugaccccgguggugcagacgaucgaggucaacuccuucagcggcuaccugaagcucaccgacaacguguacaucaagaacgccgacaucguggaggaggcgaagaaggucaagcccaccgugguggucaacgccgccaacguguaccugaagcacgggggcggcguggccggggcccugaacaaggcgaccaacaacgccaugcaggucgaguccgacgacuacaucgccacgaacggcccccucaagguggggggcagcugcguccuguccggccacaaccuggccaagcacugccuccacgugguggggcccaacgucaacaagggcgaggacauccagcugcugaagagcgccuacgagaacuucaaccagcacgaggugcuccuggcgccgcugcucuccgccgggaucuucggcgccgaccccauccacagccugcgggugugcgucgacaccgugcgcaccaacguguaccuggccgucuucgacaagaaccucuacgacaagcugguguccagcuuccuggagaugaagagcgagaagcagguggagcagaagaucgccgagauccccaaggaggaggucaagcccuucaucaccgaguccaagccgagcguggagcagcggaagcaggacgacaagaagaucaaggcgugcguggaggaggucacgaccacccucgaggagaccaaguuccugacggagaaccugcuccuguacaucgacaucaacgggaaccugcaccccgacuccgccacccucgugagcgacaucgacaucaccuuccugaagaaggacgcccccuacaucgugggcgacgucgugcaggagggcgugcugaccgccgucgugauccccacgaagaaggccgggggcaccaccgagaugcucgcgaaggcccugcgcaaggugccgaccgacaacuacaucacgaccuaccccgggcagggccugaacggguacaccgucgaggaggccaagaccgugcucaagaagugcaaguccgccuucuacauccugcccagcaucaucuccaacgagaagcaggagauccugggcaccgugagcuggaaccuccgggagaugcuggcgcacgccgaggagacgcgcaagcugaugcccgucugcguggagaccaaggccaucguguccaccauccagcggaaguacaagggcaucaagauccaggagggggucguggacuacggcgcccgcuucuacuucuacaccagcaagacgaccguggccucccugaucaacacccucaacgaccugaacgagacccuggucacgaugccgcucggguacgugacccacggccugaaccuggaggaggcggcccgguacaugcgcagccucaaggugcccgccaccgucuccgugagcucccccgacgccgugaccgccuacaacggguaccugacgagcuccagcaagacccccgaggagcacuucaucgagaccaucucccuggcgggcagcuacaaggacuggagcuacuccggccagagcacccagcucgggaucgaguuccugaagcggggcgacaaguccgucuacuacacgagcaacccgaccaccuuccaccuggacggggaggugaucaccuucgacaaccucaagacgcugcugucccuccgcgaggugcggaccaucaaggucuucaccaccguggacaacaucaaccugcacacgcagguggucgacaugagcaugaccuacggccagcaguucggccccaccuaccuggacggggccgacgugaccaagaucaagccccacaacucccacgagggcaagacguucuacgugcucccgaacgacgacacccugcgcgucgaggccuucgaguacuaccacaccaccgaccccagcuuccuggggcgguacauguccgcccucaaccacacgaagaaguggaaguacccccaggugaacggccugaccagcaucaagugggccgacaacaacugcuaccuggcgaccgcccuccugacccugcagcagaucgagcucaaguucaaccccccggcccugcaggacgccuacuaccgcgcgcgggccggggaggccgccaacuucugcgcccugauccucgcguacugcaacaagacggugggcgagcugggcgacguccgcgagaccauguccuaccuguuccagcacgccaaccucgacagcugcaagcgggugcugaacgucgugugcaagaccugcgggcagcagcagaccacccugaagggcguggaggccgucauguacauggggacgcucuccuacgagcaguucaagaagggcgugcagauccccugcaccugcgggaagcaggccaccaaguaccuggugcagcaggagagccccuucgucaugauguccgcccccccggcgcaguacgagcugaagcacggcaccuucacgugcgccagcgaguacaccggcaacuaccagugcgggcacuacaagcacaucaccuccaaggagacccucuacugcaucgacggcgcccugcugacgaagagcagcgaguacaaggggcccaucaccgacguguucuacaaggagaacuccuacaccaccacgaucaagcccgugaccuacaagcucgacggcgucgugugcaccgagaucgaccccaagcuggacaacuacuacaagaaggacaacagcuacuucaccgagcagccgaucgaccuggugcccaaccagcccuaccccaacgccuccuucgacaacuucaaguucgucugcgacaacaucaaguucgccgacgaccucaaccagcugacgggguacaagaagccggcgagccgcgagcugaaggugaccuucuuccccgaccucaacggcgacguggucgccaucgacuacaagcacuacacccccuccuucaagaagggcgccaagcugcugcacaagcccaucguguggcacgugaacaacgccaccaacaaggcgacguacaagccgaacaccuggugcauccggugccucuggagcaccaagcccgucgagaccuccaacagcuucgacgugcugaaguccgaggacgcccaggggauggacaaccuggccugcgaggaccucaagcccgugagcgaggaggucguggagaaccccacgauccagaaggacgugcuggagugcaacgucaagaccaccgagguggugggcgacaucauccugaagccggccaacaacucccucaagaucaccgaggaggucgggcacacggaccugauggccgcguacguggacaacagcucccugaccaucaagaagcccaacgagcucagccgcgugcugggccugaagacccucgccacccacgggcuggccgccgucaacuccgugcccugggacacgaucgccaacuacgcgaagccguuccugaacaagguggucagcaccaccaccaacaucgugacgcgcugccucaaccgggugugcaccaacuacaugcccuacuucuucacccugcugcuccagcugugcaccuucacccgcuccacgaacagccggaucaaggccuccaugcccaccaccaucgccaagaacaccgucaagagcgugggcaaguucugccuggaggccagcuucaacuaccucaagucccccaacuucagcaagcugaucaacaucaucaucugguuccugcuccuguccgugugccugggcagccucaucuacuccacggccgcgcuggggguccugaugagcaaccucggcaugccguccuacugcaccggguaccgcgagggcuaccugaacagcaccaacgugaccaucgccacguacugcaccggcuccauccccugcggggugugccugagcggccucgacucccuggacaccuaccccagccuggagaccauccagaucacgaucuccagcuucaagugggaccucaccgccuucgggcuggucgccgagugguuccuggccuacauccucuucacccgguucuucuacgugcugggccuggcggccaucaugcagcucuucuucuccuacuucgccgugcacuucaucagcaacuccuggcugauguggcugaucaucaaccugguccagauggcccccaucagcgcgauggugcgcauguacaucuucuucgccuccuucuacuacguguggaagagcuacguccacgugguggacgggugcaacagcuccaccugcaugaugugcuacaagcggaaccgcgccacgcgggucgagugcaccaccaucgugaacggcguccgccggagcuucuacguguacgccaacggcgggaagggcuucugcaagcuccacaacuggaacugcgugaacugcgacaccuucugcgccggguccacguucaucagcgacgaggucgcgcgcgaccugucccugcaguucaagcggccgaucaaccccaccgaccagagcuccuacaucguggacagcgugaccgucaagaacggcuccauccaccucuacuucgacaaggccgggcagaagaccuacgagcgccacagccugucccacuucgugaaccuggacaaccuccgggccaacaacacgaagggcagccugcccaucaacgugaucgucuucgacggcaaguccaagugcgaggagagcuccgccaagagcgccuccguguacuacagccagcugaugugccagcccauccuccugcuggaccaggcgcucguguccgacgucggggacagcgccgagguggccgugaagauguucgacgccuacgucaacaccuucagcuccaccuucaacgugccgauggagaagcugaagacccugguggccacggcggaggccgagcucgccaagaacgucagccuggacaacgugcuguccaccuucaucagcgccgcgcgccagggcuucguggacuccgacgucgagaccaaggacgugguggagugccucaagcugagccaccaguccgacaucgaggucaccggggacagcugcaacaacuacaugcugacguacaacaagguggagaacaugaccccccgggaccucggcgccugcaucgacugcuccgcccgccacaucaacgcccagguggccaagagccacaacaucgcgcugaucuggaacgucaaggacuucaugucccugagcgagcagcuccggaagcagauccgcuccgccgccaagaagaacaaccugcccuucaagcugaccugcgccaccacgcgccagguggugaacgucgugaccaccaagaucgcccucaaggggggcuga

SEQ ID NO: 18145 - RNA, 5841 nt, Artificial Sequence
  SARS-CoV-2__MT520344.1__non-structural protein 3 (NSP3) CDS gc
auggcccccaccaaggugaccuucggcgacgacacggucaucgaggugcagggguacaagagcgugaacaucaccuucgagcuggacgagcgcaucgacaagguccucaacgagaagugcuccgccuacaccguggagcugggcaccgaggugaacgaguucgcgugcgucguggccgacgccgugaucaagacgcugcagccggucagcgagcuccugaccccccuggggaucgaccucgacgagugguccauggccaccuacuaccuguucgacgagagcggcgaguucaagcuggccucccacauguacugcagcuucuacccccccgacgaggacgaggaggagggggacugcgaggaggaggaguucgagccguccacccaguacgaguacggcacggaggacgacuaccagggcaagccccucgaguucggggcgaccagcgccgcccugcagcccgaggaggagcaggaggaggacuggcuggacgacgacucccagcagaccgugggccagcaggacgggagcgaggacaaccagaccacgaccauccagaccaucguggagguccagccccagcucgagauggagcugaccccgguggugcagacgaucgaggucaacuccuucagcggcuaccugaagcucaccgacaacguguacaucaagaacgccgacaucguggaggaggcgaagaaggucaagcccaccgugguggucaacgccgccaacguguaccugaagcacgggggcggcguggccggggcccugaacaaggcgaccaacaacgccaugcaggucgaguccgacgacuacaucgccacgaacggcccccucaagguggggggcagcugcguccuguccggccacaaccuggccaagcacugccuccacgugguggggcccaacgucaacaagggcgaggacauccagcugcugaagagcgccuacgagaacuucaaccagcacgaggugcuccuggcgccgcugcucuccgccgggaucuucggcgccgaccccauccacagccugcgggugugcgucgacaccgugcgcaccaacguguaccuggccgucuucgacaagaaccucuacgacaagcugguguccagcuuccuggagaugaagagcgagaagcagguggagcagaagaucgccgagauccccaaggaggaggucaagcccuucaucaccgaguccaagccgagcguggagcagcggaagcaggacgacaagaagaucaaggcgugcguggaggaggucacgaccacccucgaggagaccaaguuccugacggagaaccugcuccuguacaucgacaucaacgggaaccugcaccccgacuccgccacccucgugagcgacaucgacaucaccuuccugaagaaggacgcccccuacaucgugggcgacgucgugcaggagggcgugcugaccgccgucgugauccccacgaagaaggccgggggcaccaccgagaugcucgcgaaggcccugcgcaaggugccgaccgacaacuacaucacgaccuaccccgggcagggccugaacggguacaccgucgaggaggccaagaccgugcucaagaagugcaaguccgccuucuacauccugcccagcaucaucuccaacgagaagcaggagauccugggcaccgugagcuggaaccuccgggagaugcuggcgcacgccgaggagacgcgcaagcugaugcccgucugcguggagaccaaggccaucguguccaccauccagcggaaguacaagggcaucaagauccaggagggggucguggacuacggcgcccgcuucuacuucuacaccagcaagacgaccguggccucccugaucaacacccucaacgaccugaacgagacccuggucacgaugccgcucggguacgugacccacggccugaaccuggaggaggcggcccgguacaugcgcagccucaaggugcccgccaccgucuccgugagcucccccgacgccgugaccgccuacaacggguaccugacgagcuccagcaagacccccgaggagcacuucaucgagaccaucucccuggcgggcagcuacaaggacuggagcuacuccggccagagcacccagcucgggaucgaguuccugaagcggggcgacaaguccgucuacuacacgagcaacccgaccaccuuccaccuggacggggaggugaucaccuucgacaaccucaagacgcugcugucccuccgcgaggugcggaccaucaaggucuucaccaccguggacaacaucaaccugcacacgcagguggucgacaugagcaugaccuacggccagcaguucggccccaccuaccuggacggggccgacgugaccaagaucaagccccacaacucccacgagggcaagacguucuacgugcucccgaacgacgacacccugcgcgucgaggccuucgaguacuaccacaccaccgaccccagcuuccuggggcgguacauguccgcccucaaccacacgaagaaguggaaguacccccaggugaacggccugaccagcaucaagugggccgacaacaacugcuaccuggcgaccgcccuccugacccugcagcagaucgagcucaaguucaaccccccggcccugcaggacgccuacuaccgcgcgcgggccggggaggccgccaacuucugcgcccugauccucgcguacugcaacaagacggugggcgagcugggcgacguccgcgagaccauguccuaccuguuccagcacgccaaccucgacagcugcaagcgggugcugaacgucgugugcaagaccugcgggcagcagcagaccacccugaagggcguggaggccgucauguacauggggacgcucuccuacgagcaguucaagaagggcgugcagauccccugcaccugcgggaagcaggccaccaaguaccuggugcagcaggagagccccuucgucaugauguccgcccccccggcgcaguacgagcugaagcacggcaccuucacgugcgccagcgaguacaccggcaacuaccagugcgggcacuacaagcacaucaccuccaaggagacccucuacugcaucgacggcgcccugcugacgaagagcagcgaguacaaggggcccaucaccgacguguucuacaaggagaacuccuacaccaccacgaucaagcccgugaccuacaagcucgacggcgucgugugcaccgagaucgaccccaagcuggacaacuacuacaagaaggacaacagcuacuucaccgagcagccgaucgaccuggugcccaaccagcccuaccccaacgccuccuucgacaacuucaaguucgucugcgacaacaucaaguucgccgacgaccucaaccagcugacgggguacaagaagccggcgagccgcgagcugaaggugaccuucuuccccgaccucaacggcgacguggucgccaucgacuacaagcacuacacccccuccuucaagaagggcgccaagcugcugcacaagcccaucguguggcacgugaacaacgccaccaacaaggcgacguacaagccgaacaccuggugcauccggugccucuggagcaccaagcccgucgagaccuccaacagcuucgacgugcugaaguccgaggacgcccaggggauggacaaccuggccugcgaggaccucaagcccgugagcgaggaggucguggagaaccccacgauccagaaggacgugcuggagugcaacgucaagaccaccgagguggugggcgacaucauccugaagccggccaacaacucccucaagaucaccgaggaggucgggcacacggaccugauggccgcguacguggacaacagcucccugaccaucaagaagcccaacgagcucagccgcgugcugggccugaagacccucgccacccacgggcuggccgccgucaacuccgugcccugggacacgaucgccaacuacgcgaagccguuccugaacaagguggucagcaccaccaccaacaucgugacgcgcugccucaaccgggugugcaccaacuacaugcccuacuucuucacccugcugcuccagcugugcaccuucacccgcggcacgaacucccggaucaaggccagcaugcccaccaccaucgccaagaacaccgucaaguccgugggcaaguucugccuggaggccagcuucaacuaccucaagagccccaacuucuccaagcugaucaacaucaucaucugguuccugcuccugagcgugugccuggggucccucaucuacagcacggccgcgcugggcguccugauguccaaccucgggaugccgagcuacugcaccggcuaccgcgagggcuaccugaacuccaccaacgugaccaucgccacguacugcaccgggagcauccccugcuccgugugccugagcggccucgacucccuggacaccuaccccagccuggagaccauccagaucacgaucuccagcuucaagugggaccucaccgccuucgggcuggucgccgagugguuccuggccuacauccucuucacccgguucuucuacgugcugggccuggcggccaucaugcagcucuucuucuccuacuucgccgugcacuucaucagcaacuccuggcugauguggcugaucaucaaccugguccagauggcccccaucagcgcgauggugcgcauguacaucuucuucgccuccuucuacuacguguggaagagcuacguccacgugguggacgggugcaacagcuccaccugcaugaugugcuacaagcggaaccgcgccacgcgggucgagugcaccaccaucgugaacggcguccgccggagcuucuacguguacgccaacggcgggaagggcuucugcaagcuccacaacuggaacugcgugaacugcgacaccuucugcgccggguccacguucaucagcgacgaggucgcgcgcgaccugucccugcaguucaagcggccgaucaaccccaccgaccagagcuccuacaucguggacagcgugaccgucaagaacggcuccauccaccucuacuucgacaaggccgggcagaagaccuacgagcgccacagccugucccacuucgugaaccuggacaaccuccgggccaacaacacgaagggcagccugcccaucaacgugaucgucuucgacggcaaguccaagugcgaggagagcuccgccaagagcgccuccguguacuacagccagcugaugugccagcccauccuccugcuggaccaggcgcucguguccgacgucggggacagcgccgagguggccgugaagauguucgacgccuacgucaacaccuucagcuccaccuucaacgugccgauggagaagcugaagacccugguggccacggcggaggccgagcucgccaagaacgucagccuggacaacgugcuguccaccuucaucagcgccgcgcgccagggcuucguggacuccgacgucgagaccaaggacgugguggagugccucaagcugagccaccaguccgacaucgaggucaccggggacagcugcaacaacuacaugcugacguacaacaagguggagaacaugaccccccgggaccucggcgccugcaucgacugcuccgcccgccacaucaacgcccagguggccaagagccacaacaucgcgcugaucuggaacgucaaggacuucaugucccugagcgagcagcuccggaagcagauccgcuccgccgccaagaagaacaaccugcccuucaagcugaccugcgccaccacgcgccagguggugaacgucgugaccaccaagaucgcccucaaggggggcuga

SEQ ID NO: 18146 - RNA, 5841 nt, Artificial Sequence
  SARS-CoV-2__MT520353.1__non-structural protein 3 (NSP3) CDS gc
auggcccccaccaaggugaccuucggcgacgacacggucaucgaggugcagggguacaagagcgugaacaucaccuucgagcuggacgagcgcaucgacaagguccucaacgagaagugcuccgccuacaccguggagcugggcaccgaggugaacgaguucgcgugcgucguggccgacgccgugaucaagacgcugcagccggucagcgagcuccugaccccccuggggaucgaccucgacgagugguccauggccaccuacuaccuguucgacgagagcggcgaguucaagcuggccucccacauguacugcagcuucuacccccccgacgaggacgaggaggagggggacugcgaggaggaggaguucgagccguccacccaguacgaguacggcacggaggacgacuaccagggcaagccccucgaguucggggcgaccagcgccgcccugcagcccgaggaggagcaggaggaggacuggcuggacgacgacucccagcagaccgugggccagcaggacgggagcgaggacaaccagaccacgaccauccagaccaucguggagguccagccccagcucgagauggagcugaccccgguggugcagacgaucgaggucaacuccuucagcggcuaccugaagcucaccgacaacguguacaucaagaacgccgacaucguggaggaggcgaagaaggucaagcccaccgugguggucaacgccgccaacguguaccugaagcacgggggcggcguggccggggcccugaacaaggcgaccaacaacgccaugcaggucgaguccgacgacuacaucgccacgaacggcccccucaagguggggggcagcugcguccuguccggccacaaccuggccaagcacugccuccacgugguggggcccaacgucaacaagggcgaggacauccagcugcugaagagcgccuacgagaacuucaaccagcacgaggugcuccuggcgccgcugcucuccgccgggaucuucggcgccgaccccauccacagccugcgggugugcgucgacaccgugcgcaccaacguguaccuggccgucuucgacaagaaccucuacgacaagcugguguccagcuuccuggagaugaagagcgagaagcagguggagcagaagaucgccgagauccccaaggaggaggucaagcccuucaucaccgaguccaagccgagcguggagcagcggaagcaggacgacaagaagaucaaggcgugcguggaggaggucacgaccacccucgaggagaccaaguuccugacggagaaccugcuccuguacaucgacaucaacgggaaccugcaccccgacuccgccacccucgugagcgacaucgacaucaccuuccugaagaaggacgcccccuacaucgugggcgacgucgugcaggagggcgugcugaccgccgucgugauccccacgaagaaggccgggggcaccaccgagaugcucgcgaaggcccugcgcaaggugccgaccgacaacuacaucacgaccuaccccgggcagggccugaacggguacaccgucgaggaggccaagaccgugcucaagaagugcaaguccgccuucuacauccugcccagcaucaucuccaacgagaagcaggagauccugggcaccgugagcuggaaccuccgggagaugcuggcgcacgccgaggagacgcgcaagcugaugcccgucugcguggagaccaaggccaucguguccaccauccagcggaaguacaagggcaucaagauccaggagggggucguggacuacggcgcccgcuucuacuucuacaccagcaagacgaccguggccucccugaucaacacccucaacgaccugaacgagacccuggucacgaugccgcucggguacgugacccacggccugaaccuggaggaggcggcccgguacaugcgcagccucaaggugcccgccaccgucuccgugagcucccccgacgccgugaccgccuacaacggguaccugacgagcuccagcaagacccccgaggagcacuucaucgagaccaucucccuggcgggcagcuacaaggacuggagcuacuccggccagagcacccagcucgggaucgaguuccugaagcggggcgacaaguccgucuacuacacgagcaacccgaccaccuuccaccuggacggggaggugaucaccuucgacaaccucaagacgcugcugucccuccgcgaggugcggaccaucaaggucuucaccaccguggacaacaucaaccugcacacgcagguggucgacaugagcaugaccuacggccagcaguucggccccaccuaccuggacggggccgacgugaccaagaucaagccccacaacucccacgagggcaagacguucuacgugcucccgaacgacgacacccugcgcgucgaggccuucgaguacuaccacaccaccgaccccagcuuccuggggcgguacauguccgcccucaaccacacgaagaaguggaaguacccccaggugaacggccugaccagcaucaagugggccgacaacaacugcuaccuggcgaccgcccuccugacccugcagcagaucgagcucaaguucaaccccccggcccugcaggacgccuacuaccgcgcgcgggccggggaggccgccaacuucugcgcccugauccucgcguacugcaacaagacggugggcgagcugggcgacguccgcgagaccauguccuaccuguuccagcacgccaaccucgacagcugcaagcgggugcugaacgucgugugcaagaccugcgggcagcagcagaccacccugaagggcguggaggccgucauguacauggggacgcucuccuacgagcaguucaagaagggcgugcagauccccugcaccugcgggaagcaggccaccaaguaccuggugcagcaggagagccccuucgucaugauguccgcccccccggcgcaguacgagcugaagcacggcaccuucacgugcgccagcgaguacaccggcaacuaccagugcgggcacuacaagcacaucaccuccaaggagacccucuacugcaucgacggcgcccugcugacgaagagcagcgaguacaaggggcccaucaccgacguguucuacaaggagaacuccuacaccaccacgaucaagcccgugaccuacaagcucgacggcgucgugugcaccgagaucgaccccaagcuggacaacuacuacaagaaggacaacagcuacuucaccgagcagccgaucgaccuggugcccaaccagcccuaccccaacgccuccuucgacaacuucaaguucgucugcgacaacaucaaguucgccgacgaccucaaccagcugacgggguacaagaagccggcgagccgcgagcugaaggugaccuucuuccccgaccucaacggcgacguggucgccaucgacuacaagcacuacacccccuccuucaagaagggcgccaagcugcugcacaagcccaucguguggcacgugaacaacgccaccaacaaggcgacguacaagccgaacaccuggugcauccggugccucuggagcaccaagcccgucgagaccuccaacagcuucgacgugcugaaguccgaggacgcccaggggauggacaaccuggccugcgaggaccucaagcccgugagcgaggaggucguggagaaccccacgauccagaaggacgugcuggagugcaacgucaagaccaccgagguggugggcgacaucauccugaagccggccaacaacucccucaagaucaccgaggaggucgggcacacggaccugauggccgcguacguggacaacagcucccugaccaucaagaagcccaacgagcucagccgcgugcugggccugaagacccucgccacccacgggcuggccgccgucaacuccgugcccuggggcacgaucgccaacuacgcgaagccguuccugaacaagguggucagcaccaccaccaacaucgugacgcgcugccucaaccgggugugcaccaacuacaugcccuacuucuucacccugcugcuccagcugugcaccuucacccgcuccacgaacagccggaucaaggccuccaugcccaccaccaucgccaagaacaccgucaagagcgugggcaaguucugccuggaggccagcuucaacuaccucaagucccccaacuucagcaagcugaucaacaucaucaucugguuccugcuccuguccgugugccuggggagccucaucuacuccacggccgcgcugggcguccugaugagcaaccucgggaugccguccuacugcaccggcuaccgcgagggcuaccugaacagcaccaacgugaccaucgccacguacugcaccggguccauccccugcagcgugugccuguccggccucgacagccuggacaccuaccccucccuggagaccauccagaucacgaucagcuccuucaagugggaccucaccgccuucgggcuggucgccgagugguuccuggccuacauccucuucacccgguucuucuacgugcugggccuggcggccaucaugcagcucuucuucagcuacuucgccgugcacuucaucuccaacagcuggcugauguggcugaucaucaaccugguccagauggcccccaucuccgcgauggugcgcauguacaucuucuucgccagcuucuacuacguguggaagagcuacguccacgugguggacgggugcaacuccagcaccugcaugaugugcuacaagcggaaccgcgccacgcgggucgagugcaccaccaucgugaacggcguccgccgguccuucuacguguacgccaacggcgggaagggcuucugcaagcuccacaacuggaacugcgugaacugcgacaccuucugcgccgggagcacguucaucuccgacgaggucgcgcgcgaccugagccugcaguucaagcggccgaucaaccccaccgaccaguccagcuacaucguggacuccgugaccgucaagaacggcagcauccaccucuacuucgacaaggccgggcagaagaccuacgagcgccacucccugagccacuucgugaaccuggacaaccuccgggccaacaacacgaagggcucccugcccaucaacgugaucgucuucgacggcaagagcaagugcgaggaguccagcgccaaguccgccagcguguacuacucccagcugaugugccagcccauccuccugcuggaccaggcgcucgugagcgacgucggggacagcgccgagguggccgugaagauguucgacgccuacgucaacaccuucuccagcaccuucaacgugccgauggagaagcugaagacccugguggccacggcggaggccgagcucgccaagaacgucucccuggacaacgugcugagcaccuucaucuccgccgcgcgccagggcuucguggacagcgacgucgagaccaaggacgugguggagugccucaagcugucccaccagagcgacaucgaggucaccggggacuccugcaacaacuacaugcugacguacaacaagguggagaacaugaccccccgggaccucggcgccugcaucgacugcagcgcccgccacaucaacgcccagguggccaagucccacaacaucgcgcugaucuggaacgucaaggacuucaugagccuguccgagcagcuccggaagcagauccgcagcgccgccaagaagaacaaccugcccuucaagcugaccugcgccaccacgcgccagguggugaacgucgugaccaccaagaucgcccucaaggggggcuga

SEQ ID NO: 18147 - RNA, 5841 nt, Artificial Sequence
  SARS-CoV-2__MT520369.1__non-structural protein 3 (NSP3) CDS gc
auggcccccaccaaggugaccuucggcgacgacacggucaucgaggugcagggguacaagagcgugaacaucaccuucgagcuggacgagcgcaucgacaagguccucaacgagaagugcuccgccuacaccguggagcugggcaccgaggugaacgaguucgcgugcgucguggccgacgccgugaucaagacgcugcagccggucagcgagcuccugaccccccuggggaucgaccucgacgagugguccauggccaccuacuaccuguucgacgagagcggcgaguucaagcuggccucccacauguacugcagcuucuacccccccgacgaggacgaggaggagggggacugcgaggaggaggaguucgagccguccacccaguacgaguacggcacggaggacgacuaccagggcaagccccucgaguucggggcgaccagcgccgcccugcagcccgaggaggagcaggaggaggacuggcuggacgacgacucccagcagaccgugggccagcaggacgggagcgaggacaaccagaccacgaccauccagaccaucguggagguccagccccagcucgagauggagcugaccccgguggugcagacgaucgaggucaacuccuucagcggcuaccugaagcucaccgacaacguguacaucaagaacgccgacaucguggaggaggcgaagaaggucaagcccaccgugguggucaacgccgccaacguguaccugaagcacgggggcggcguggccggggcccugaacaaggcgaccaacaacgccaugcaggucgaguccgacgacuacaucgccacgaacggcccccucaagguggggggcagcugcguccuguccggccacaaccuggccaagcacugccuccacgugguggggcccaacgucaacaagggcgaggacauccagcugcugaagagcgccuacgagaacuucaaccagcacgaggugcuccuggcgccgcugcucuccgccgggaucuucggcgccgaccccauccacagccugcgggugugcgucgacaccgugcgcaccaacguguaccuggccgucuucgacaagaaccucuacgacaagcugguguccagcuuccuggagaugaagagcgagaagcagguggagcagaagaucgccgagauccccaaggacgaggucaagcccuucaucaccgaguccaagccgagcguggagcagcggaagcaggacgacaagaagaucaaggcgugcguggaggaggucacgaccacccucgaggagaccaaguuccugacggagaaccugcuccuguacaucgacaucaacgggaaccugcaccccgacuccgccacccucgugagcgacaucgacaucaccuuccugaagaaggacgcccccuacaucgugggcgacgucgugcaggagggcgugcugaccgccgucgugauccccacgaagaaggccgggggcaccaccgagaugcucgcgaaggcccugcgcaaggugccgaccgacaacuacaucacgaccuaccccgggcagggccugaacggguacaccgucgaggaggccaagaccgugcucaagaagugcaaguccgccuucuacauccugcccagcaucaucuccaacgagaagcaggagauccugggcaccgugagcuggaaccuccgggagaugcuggcgcacgccgaggagacgcgcaagcugaugcccgucugcguggagaccaaggccaucguguccaccauccagcggaaguacaagggcaucaagauccaggagggggucguggacuacggcgcccgcuucuacuucuacaccagcaagacgaccguggccucccugaucaacacccucaacgaccugaacgagacccuggucacgaugccgcucggguacgugacccacggccugaaccuggaggaggcggcccgguacaugcgcagccucaaggugcccgccaccgucuccgugagcucccccgacgccgugaccgccuacaacggguaccugacgagcuccagcaagacccccgaggagcacuucaucgagaccaucucccuggcgggcagcuacaaggacuggagcuacuccggccagagcacccagcucgggaucgaguuccugaagcggggcgacaaguccgucuacuacacgagcaacccgaccaccuuccaccuggacggggaggugaucaccuucgacaaccucaagacgcugcugucccuccgcgaggugcggaccaucaaggucuucaccaccguggacaacaucaaccugcacacgcagguggucgacaugagcaugaccuacggccagcaguucggccccaccuaccuggacggggccgacgugaccaagaucaagccccacaacucccacgagggcaagacguucuacgugcucccgaacgacgacacccugcgcgucgaggccuucgaguacuaccacaccaccgaccccagcuuccuggggcgguacauguccgcccucaaccacacgaagaaguggaaguacccccaggugaacggccugaccagcaucaagugggccgacaacaacugcuaccuggcgaccgcccuccugacccugcagcagaucgagcucaaguucaaccccccggcccugcaggacgccuacuaccgcgcgcgggccggggaggccgccaacuucugcgcccugauccucgcguacugcaacaagacggugggcgagcugggcgacguccgcgagaccauguccuaccuguuccagcacgccaaccucgacagcugcaagcgggugcugaacgucgugugcaagaccugcgggcagcagcagaccacccugaagggcguggaggccgucauguacauggggacgcucuccuacgagcaguucaagaagggcgugcagauccccugcaccugcgggaagcaggccaccaaguaccuggugcagcaggagagccccuucgucaugauguccgcccccccggcgcaguacgagcugaagcacggcaccuucacgugcgccagcgaguacaccggcaacuaccagugcgggcacuacaagcacaucaccuccaaggagacccucuacugcaucgacggcgcccugcugacgaagagcagcgaguacaaggggcccaucaccgacguguucuacaaggagaacuccuacaccaccacgaucaagcccgugaccuacaagcucgacggcgucgugugcaccgagaucgaccccaagcuggacaacuacuacaagaaggacaacagcuacuucaccgagcagccgaucgaccuggugcccaaccagcccuaccccaacgccuccuucgacaacuucaaguucgucugcgacaacaucaaguucgccgacgaccucaaccagcugacgggguacaagaagccggcgagccgcgagcugaaggugaccuucuuccccgaccucaacggcgacguggucgccaucgacuacaagcacuacacccccuccuucaagaagggcgccaagcugcugcacaagcccaucguguggcacgugaacaacgccaccaacaaggcgacguacaagccgaacaccuggugcauccggugccucuggagcaccaagcccgucgagaccuccaacagcuucgacgugcugaaguccgaggacgcccaggggauggacaaccuggccugcgaggaccucaagcccgugagcgaggaggucguggagaaccccacgauccagaaggacgugcuggagugcaacgucaagaccaccgagguggugggcgacaucauccugaagccggccaacaacucccucaagaucaccgaggaggucgggcacacggaccugauggccgcguacguggacaacagcucccugaccaucaagaagcccaacgagcucagccgcgugcugggccugaagacccucgccacccacgggcuggccgccgucaacuccgugcccugggacacgaucgccaacuacgcgaagccguuccugaacaagguggucagcaccaccaccaacaucgugacgcgcugccucaaccgggugugcaccaacuacaugcccuacuucuucacccugcugcuccagcugugcaccuucacccgcuccacgaacagccggaucaaggccuccaugcccaccaccaucgccaagaacaccgucaagagcgugggcaaguucugccuggaggccagcuucaacuaccucaagucccccaacuucagcaagcugaucaacaucaucaucugguuccugcuccuguccgugugccugggcagccucaucuacuccacggccgcgcuggggguccugaugagcaaccucggcaugccguccuacugcaccggguaccgcgagggcuaccugaacagcaccaacgugaccaucgccacguacugcaccggcuccauccccugcagcgugugccuguccgggcucgacagccuggacaccuaccccucccuggagaccauccagaucacgaucagcuccuucaagugggaccucaccgccuucggccuggucgccgagugguuccuggccuacauccucuucacccgguucuucuacgugcuggggcuggcggccaucaugcagcucuucuucagcuacuucgccgugcacuucaucuccaacagcuggcugauguggcugaucaucaaccugguccagauggcccccaucuccgcgauggugcgcauguacaucuucuucgccagcuucuacuacguguggaagagcuacguccacgugguggacggcugcaacuccagcaccugcaugaugugcuacaagcggaaccgcgccacgcgggucgagugcaccaccaucgugaacgggguccgccgguccuucuacguguacgccaacggcggcaagggguucugcaagcuccacaacuggaacugcgugaacugcgacaccuucugcgccggcagcacguucaucuccgacgaggucgcgcgcgaccugagccugcaguucaagcggccgaucaaccccaccgaccaguccagcuacaucguggacuccgugaccgucaagaacgggagcauccaccucuacuucgacaaggccggccagaagaccuacgagcgccacucccugagccacuucgugaaccuggacaaccuccgggccaacaacacgaaggggucccugcccaucaacgugaucgucuucgacggcaagagcaagugcgaggaguccagcgugaaguccgccagcguguacuacucccagcugaugugccagcccauccuccugcuggaccaggcccucgucagcgacgugggcgacagcgcggagguggccgucaagauguucgacgccuacgugaacaccuucuccagcaccuucaacgugccgauggagaagcugaagacccuggucgccacggccgaggcggagcucgccaagaacgugucccuggacaacgugcugagcaccuucaucuccgccgcccgccagggguucgucgacagcgacguggagaccaaggacguggucgagugccucaagcugucccaccagagcgacaucgaggugaccggcgacuccugcaacaacuacaugcugacguacaacaagguggagaacaugaccccccgggaccucggggcgugcaucgacugcagcgcccgccacaucaacgcccaggucgccaagucccacaacaucgcccugaucuggaacgugaaggacuucaugagccuguccgagcagcuccggaagcagauccgcagcgcggccaagaagaacaaccugcccuucaagcugaccugcgccaccacgcgccagguggucaacguggugaccaccaagaucgcccucaagggcggguga

SEQ ID NO: 18148 - RNA, 5841 nt, Artificial Sequence
  SARS-CoV-2__MT520390.1__non-structural protein 3 (NSP3) CDS gc
auggcccccaccaaggugaccuucggcgacgacacggucaucgaggugcagggguacaagagcgugaacaucaccuucgagcuggacgagcgcaucgacaagguccucaacgagaagugcuccgccuacaccguggagcugggcaccgaggugaacgaguucgcgugcgucguggccgacgccgugaucaagacgcugcagccggucagcgagcuccugaccccccuggggaucgaccucgacgagugguccauggccaccuacuaccuguucgacgagagcggcgaguucaagcuggccucccacauguacugcagcuucuacccccccgacgaggacgaggaggagggggacugcgaggaggaggaguucgagccguccacccaguacgaguacggcacggaggacgacuaccagggcaagccccucgaguucggggcgaccagcgccgcccugcagcccgaggaggagcaggaggaggacuggcuggacgacgacucccagcagaccgugggccagcaggacgggagcgaggacaaccagaccacgaccauccagaccaucguggagguccagccccagcucgagauggagcugaccccgguggugcagacgaucgaggucaacuccuucagcggcuaccugaagcucaccgacaacguguacaucaagaacgccgacaucguggaggaggcgaagaaggucaagcccaccgugguggucaacgccgccaacguguaccugaagcacgggggcggcguggccggggcccugaacaaggcgaccaacaacgccaugcaggucgaguccgacgacuacaucgccacgaacggcccccucaagguggggggcagcugcguccuguccggccacaaccuggccaagcacugccuccacgugguggggcccaacgucaacaagggcgaggacauccagcugcugaagagcgccuacgagaacuucaaccagcacgaggugcuccuggcgccgcugcucuccgccgggaucuucggcgccgaccccauccacagccugcgggugugcgucgacaccgugcgcaccaacguguaccuggccgucuucgacaagaaccucuacgacaagcugguguccagcuuccuggagaugaagagcgagaagcagguggagcagaagaucgccgagauccccaaggaggaggucaagcccuucaucaccgaguccaagccgagcguggagcagcggaagcaggacgacaagaagaucaaggcgugcguggaggaggucacgaccacccucgaggagaccaaguuccugacggagaaccugcuccuguacaucgacaucaacgggaaccugcaccccgacuccgccacccucgugagcgacaucgacaucaccuuccugaagaaggacgcccccuacaucgugggcgacgucgugcaggagggcgugcugaccgccgucgugauccccacgaagaaggccgggggcaccaccgagaugcucgcgaaggcccugcgcaaggugccgaccgacaacuacaucacgaccuaccccgggcagggccugaacggguacaccgucgaggaggccaagaccgugcucaagaagugcaaguccgccuucuacauccugcccagcaucaucuccaacgagaagcaggagauccugggcaccgugagcuggaaccuccgggagaugcuggcgcacgccgaggagacgcgcaagcugaugcccgucugcguggagaccaaggccaucguguccaccauccagcggaaguacaagggcaucaagauccaggagggggucguggacuacggcgcccgcuucuacuucuacaccagcaagacgaccguggccucccugaucaacacccucaacgaccugaacgagacccuggucacgaugccgcucggguacgugacccacggccugaaccuggaggaggcggcccgguacaugcgcagccucaaggugcccgccaccgucuccgugagcucccccgacgccgugaccgccuacaacggguaccugacgagcuccagcaagacccccgaggagcacuucaucgagaccaucucccuggcgggcagcuacaaggacuggagcuacuccggccagagcacccagcucgggaucgaguuccugaagcggggcgacaaguccgucuacuacacgagcaacccgaccaccuuccaccuggacggggaggugaucaccuucgacaaccucaagacgcugcugucccuccgcgaggugcggaccaucaaggucuucaccaccguggacaacaucaaccugcacacgcagguggucgacaugagcaugaccuacggccagcaguucggccccaccuaccuggacggggccgacgugaccaagaucaagccccacaacucccacgagggcaagacguucuacgugcucccgaacgacgacacccugcgcgucgaggccuucgaguacuaccacaccaccgaccccagcuuccuggggcgguacauguccgcccucaaccacacgaagaaguggaaguacccccaggugaacggccugaccagcaucaagugggccgacaacaacugcuaccuggcgaucgcccuccugacccugcagcagaucgagcucaaguucaaccccccggcccugcaggacgccuacuaccgcgcgcgggccggggaggccgccaacuucugcgcccugauccucgcguacugcaacaagaccgugggcgagcugggcgacguccgcgagacgauguccuaccuguuccagcacgccaaccucgacagcugcaagcgggugcugaacgucgugugcaagaccugcgggcagcagcagaccacccugaagggcguggaggccgucauguacauggggacccucuccuacgagcaguucaagaagggcgugcagauccccugcacgugcgggaagcaggccaccaaguaccuggugcagcaggagagccccuucgucaugauguccgcccccccggcgcaguacgagcugaagcacggcaccuucaccugcgccagcgaguacacgggcaacuaccagugcgggcacuacaagcacaucaccuccaaggagacccucuacugcaucgacggcgcccugcugaccaagagcagcgaguacaaggggcccaucacggacguguucuacaaggagaacuccuacaccaccaccaucaagcccgugacguacaagcucgacggcgucgugugcaccgagaucgaccccaagcuggacaacuacuacaagaaggacaacagcuacuucaccgagcagccgaucgaccuggugcccaaccagcccuaccccaacgccuccuucgacaacuucaaguucgucugcgacaacaucaaguucgccgacgaccucaaccagcugaccggguacaagaagccggcgagccgcgagcugaaggugacguucuuccccgaccucaacggcgacguggucgccaucgacuacaagcacuacacccccuccuucaagaagggcgccaagcugcugcacaagcccaucguguggcacgugaacaacgccaccaacaaggcgaccuacaagccgaacacguggugcauccggugccucuggagcaccaagcccgucgagaccuccaacagcuucgacgugcugaaguccgaggacgcccaggggauggacaaccuggugugcgaggaccucaagcccgucagcgaggaggugguggagaaccccaccauccagaaggacguccuggagugcaacgugaagacgaccgagguggucggcgacaucauccugaagccggccaacaacucccucaagaucaccgaggagguggggcacaccgaccugauggccgccuacguggacaacagcucccugacgaucaagaagcccaacgagcucagccgcguccugggccugaagacccucgcgacccacgggcuggccgccgugaacuccgugcccugggacaccaucgccaacuacgccaagccguuccugaacaaggucgugagcacgaccaccaacaucgugacccgcugccucaaccgggucugcacgaacuacaugcccuacuucuucacccugcugcuccagcugugcaccuucacccgcuccaccaacagccggaucaaggcguccaugcccacgaccaucgccaagaacaccgugaagagcgugggcaaguucugccuggaggccagcuucaacuaccucaagucccccaacuucagcaagcugaucaacaucaucaucugguuccugcuccuguccgucugccugggcagccucaucuacuccaccgccgcccugggggugcugaugagcaaccucggcaugccguccuacugcacgggguaccgcgagggcuaccugaacagcaccaacgugaccaucgcgaccuacugcacgggcuccauccccugcagcgucugccuguccgggcucgacagccuggacaccuaccccucccuggagaccauccagaucaccaucagcuccuucaagugggaccucacggccuucggccugguggccgagugguuccuggccuacauccucuucacccgguucuucuacgugcuggggcuggccgcgaucaugcagcucuucuucagcuacuucgccguccacuucaucuccaacagcuggcugauguggcugaucaucaaccuggugcagauggcccccaucuccgccauggugcgcauguacaucuucuucgcgagcuucuacuacgucuggaagagcuacgugcacguggucgacggcugcaacuccagcaccugcaugaugugcuacaagcggaaccgcgccacccggguggagugcacgaccaucgucaacggggugcgccgguccuucuacguguacgccaacggcggcaagggguucugcaagcuccacaacuggaacugcgucaacugcgacaccuucugcgccggcagcaccuucaucuccgacgagguggcccgcgaccugagccugcaguucaagcggccgaucaaccccacggaccaguccagcuacaucguggacuccgucaccgugaagaacgggagcauccaccucuacuucgacaaggcgggccagaagaccuacgagcgccacucccugagccacuucgugaaccuggacaaccuccgggccaacaacaccaaggggucccugcccaucaacgucaucguguucgacggcaagagcaagugcgaggaguccagcgccaaguccgccagcguguacuacucccagcugaugugccagcccauccuccugcuggaccaggcccucgucagcgacgugggcgacagcgcggagguggccgucaagauguucgacgccuacgugaacacguucuccagcaccuucaacgugccgauggagaagcugaagacccuggucgccaccgccgaggcggagcucgccaagaacgugucccuggacaacgugcugagcacguucaucuccgccgcccgccagggguucgucgacagcgacguggagaccaaggacguggucgagugccucaagcugucccaccagagcgacaucgaggugaccggcgacuccugcaacaacuacaugcugaccuacaacaagguggagaacaugacgccccgggaccucggggcgugcaucgacugcagcgcccgccacaucaacgcccaggucgccaagucccacaacaucgcccugaucuggaacgugaaggacuucaugagccuguccgagcagcuccggaagcagauccgcagcgcggccaagaagaacaaccugcccuucaagcugaccugcgccaccacccgccagguggucaacguggugacgaccaagaucgcccucaagggcggguga

SEQ ID NO: 18149 - RNA, 5841 nt, Artificial Sequence
  SARS-CoV-2__MT520466.1__non-structural protein 3 (NSP3) CDS gc
auggcccccaccaaggugaccuucggcgacgacacggucaucgaggugcagggguacaagagcgugaacaucaccuucgagcuggacgagcgcaucgacaagguccucaacgagaagugcuccgccuacaccguggagcugggcaccgaggugaacgaguucgcgugcgucguggccgacgccgugaucaagacgcugcagccggucagcgagcuccugaccccccuggggaucgaccucgacgagugguccauggccaccuacuaccuguucgacgagagcggcgaguucaagcuggccucccacauguacugcagcuucuacccccccgacgaggacgaggaggagggggacugcgaggaggaggaguucgagccguccacccaguacgaguacggcacggaggacgacuaccagggcaagccccucgaguucggggcgaccagcgccgcccugcagcccgaggaggagcaggaggaggacuggcuggacgacgacucccagcagaccgugggccagcaggacgggagcgaggacaaccagaccacgaccauccagaccaucguggagguccagccccagcucgagauggagcugaccccgguggugcagacgaucgaggucaacuccuucagcggcuaccugaagcucaccgacaacguguacaucaagaacgccgacaucguggaggaggcgaagaaggucaagcccaccgugguggucaacgccgccaacguguaccugaagcacgggggcggcguggccggggcccugaacaaggcgaccaacaacgccaugcaggucgaguccgacgacuacaucgccacgaacggcccccucaagguggggggcagcugcguccuguccggccacaaccuggccaagcacugccuccacgugguggggcccaacgucaacaagggcgaggacauccagcugcugaagagcgccuacgagaacuucaaccagcacgaggugcuccuggcgccgcugcucuccgccgggaucuucggcgccgaccccauccacagccugcgggugugcgucgacaccgugcgcaccaacguguaccuggccgucuucgacaagaaccucuacgacaagcugguguccagcuuccuggagaugaagagcgagaagcagguggagcagaagaucgccgagauccccaaggaggaggucaagcccuucaucaccgaguccaagccgagcguggagcagcggaagcaggacgacaagaagaucaaggcgugcguggaggaggucacgaccacccucgaggagaccaaguuccugacggagaaccugcuccuguacaucgacaucaacgggaaccugcaccccgacuccgccacccucgugagcgacaucgacaucaccuuccugaagaaggacgcccccuacaucgugggcgacgucgugcaggagggcgugcugaccgccgucgugauccccacgaagaaggccgggggcaccaccgagaugcucgcgaaggcccugcgcaaggugccgaccgacaacuacaucacgaccuaccccgggcagggccugaacggguacaccgucgaggaggccaagaccgugcucaagaagugcaaguccgccuucuacauccugcccagcaucaucuccaacgagaagcaggagauccugggcaccgugagcuggaaccuccgggagaugcuggcgcacgccgaggagacgcgcaagcugaugcccgucugcguggagaccaaggccaucguguccaccauccagcggaaguacaagggcaucaagauccaggagggggucguggacuacggcgcccgcuucuacuucuacaccagcaagacgaccguggccucccugaucaacacccucaacgaccugaacgagacccuggucacgaugccgcucggguacgugacccacggccugaaccuggaggaggcggcccgguacaugcgcagccucaaggugcccgccaccgucuccgugagcucccccgacgccgugaccgccuacaacggguaccugacgagcuccagcaagacccccgaggagcacuucaucgagaccaucucccuggcgggcagcuacaaggacuggagcuacuccggccagagcacccagcucgggaucgaguuccugaagcggggcgacaaguccgucuacuacacgagcaacccgaccaccuuccaccuggacggggaggugaucaccuucgacaaccucaagacgcugcugucccuccgcgaggugcggaccaucaaggucuucaccaccguggacaacaucaaccugcacacgcagguggucgacaugagcaugaccuacggccagcaguucggccccaccuaccuggacggggccgacgugaccaagaucaagccccacaacucccacgagggcaagacguucuacgugcucccgaacgacgacacccugcgcgucgaggccuucgaguacuaccacaccaccgaccccagcuuccuggggcgguacauguccgcccucaaccacacgaagaaguggaaguacccccaggugaacggccugaccagcaucaagugggccgacaacaacugcuaccuggcgaccgcccuccugacccugcagcagaucgagcucaaguucaaccccccggcccugcaggacgccuacuaccgcgcgcgggccggggaggccgccaacuucugcgcccugauccucgcguacugcaacaagacggugggcgagcugggcgacguccgcgagaccauguccuaccuguuccagcacgccaaccucgacagcugcaagcgggugcugaacgucgugugcaagaccugcgggcagcagcagaccacccugaagggcguggaggccgucauguacauggggacgcucuccuacgagcaguucaagaagggcgugcagauccccugcaccugcgggaagcaggccaccaaguaccuggugcagcaggagagccccuucgucaugauguccgcccccccggcgcaguacgagcugaagcacggcaccuucacgugcgccagcgaguacaccggcaacuaccagugcgggcacuacaagcacaucaccuccaaggagacccucuacugcaucgacggcgcccugcugacgaagagcagcgaguacaaggggcccaucaccgacguguucuacaaggagaacuccuacaccaccacgaucaagcccgugaccuacaagcucgacggcgucgugugcaccgagaucgaccccaagcuggacaacuacuacaagaaggacaacagcuacuucaccgagcagccgaucgaccuggugcccaaccagcccuaccccaacgccuccuucgacaacuucaaguucgucugcgacaacaucaaguucgccgacgaccucaaccagcugacgggguacaagaagccggcgagccgcgagcugaaggugaccuucuuccccgaccucaacggcgacguggucgccaucgacuacaagcacuacacccccuccuucaagaagggcgccaagcugcugcacaagcccaucguguggcacgugaacaacgccaccaacaaggcgacguacaagccgaacaccuggugcauccggugccucuggagcaccaagcccgucgagaccuccaacagcuucgacgugcugaaguccgaggacgcccaggggauggacaaccuggccugcgaggaccucaagcccgugagcgaggaggucguggagaaccccacgauccagaaggacgugcuggagugcaacgucaagaccaccgagguggugggcgacaucauccugaagccggccaacaacucccucaagaucaccgaggaggucgggcacacggaccugauggccgcguacguggacaacagcucccugaccaucaagaagcccaacgagcucagccgcgugcugggccugaagacccucgccacccacgggcuggccgccgucaacuccgugcccugggacacgaucgccaacuacgcgaagccguuccugaacaagguggucagcaccaccaccaacaucgugacgcgcugccucaaccgggugugcaucaacuacaugcccuacuucuucacccugcugcuccagcugugcaccuucacccgcuccaccaacagccggaucaaggccuccaugcccacgaccaucgccaagaacaccgucaagagcgugggcaaguucugccuggaggccagcuucaacuaccucaagucccccaacuucagcaagcugaucaacaucaucaucugguuccugcuccuguccgugugccugggcagccucaucuacuccaccgccgcgcuggggguccugaugagcaaccucggcaugccguccuacugcacgggguaccgcgagggcuaccugaacagcaccaacgugaccaucgccaccuacugcacgggcuccauccccugcagcgugugccuguccgggcucgacagccuggacaccuaccccucccuggagaccauccagaucaccaucagcuccuucaagugggaccucacggccuucggccuggucgccgagugguuccuggccuacauccucuucacccgguucuucuacgugcuggggcuggcggccaucaugcagcucuucuucagcuacuucgccgugcacuucaucuccaacagcuggcugauguggcugaucaucaaccugguccagauggcccccaucuccgcgauggugcgcauguacaucuucuucgccagcuucuacuacguguggaagagcuacguccacgugguggacggcugcaacuccagcaccugcaugaugugcuacaagcggaaccgcgccacccgggucgagugcacgaccaucgugaacgggguccgccgguccuucuacguguacgccaacggcggcaagggguucugcaagcuccacaacuggaacugcgugaacugcgacaccuucugcgccggcagcaccuucaucuccgacgaggucgcgcgcgaccugagccugcaguucaagcggccgaucaaccccacggaccaguccagcuacaucguggacuccgugaccgucaagaacgggagcauccaccucuacuucgacaaggccggccagaagaccuacgagcgccacucccugagccacuucgugaaccuggacaaccuccgggccaacaacaccaaggggucccugcccaucaacgugaucgucuucgacggcaagagcaagugcgaggaguccagcgccaaguccgccagcguguacuacucccagcugaugugccagcccauccuccugcuggaccaggcgcucgugagcgacgucggcgacagcgccgagguggccgugaagauguucgacgccuacgucaacacguucuccagcaccuucaacgugccgauggagaagcugaagacccugguggccaccgcggaggccgagcucgccaagaacgucucccuggacaacgugcugagcacguucaucuccgccgcgcgccagggguucguggacagcgacgucgagaccaaggacgugguggagugccucaagcugucccaccagagcgacaucgaggucaccggcgacuccugcaacaacuacaugcugaccuacaacaagguggagaacaugacgccccgggaccucggggccugcaucgacugcagcgcccgccacaucaacgcccagguggccaagucccacaacaucgcgcugaucuggaacgucaaggacuucaugagccuguccgagcagcuccggaagcagauccgcagcgccgccaagaagaacaaccugcccuucaagcugaccugcgccaccacccgccagguggugaacgucgugacgaccaagaucgcccucaagggcggguga

SEQ ID NO: 18150 - RNA, 5841 nt, Artificial Sequence
  SARS-CoV-2__MT520472.1__non-structural protein 3 (NSP3) CDS gc
auggcccccaccaaggugaccuucggcgacgacacggucaucgaggugcagggguacaagagcgugaacaucaccuucgagcuggacgagcgcaucgacaagguccucaacgagaagugcuccgccuacaccguggagcugggcaccgaggugaacgaguucgcgugcgucguggccgacgccgugaucaagacgcugcagccggucagcgagcuccugaccccccuggggaucgaccucgacgagugguccauggccaccuacuaccuguucgacgagagcggcgaguucaagcuggccucccacauguacugcagcuucuacccccccgacgaggacgaggaggagggggacugcgaggaggaggaguucgagccguccacccaguacgaguacggcacggaggacgacuaccagggcaagccccucgaguucggggcgaccagcgccgcccugcagcccgaggaggagcaggaggaggacuggcuggacgacgacucccagcagaccgugggccagcaggacgggagcgaggacaaccagaccacgaccauccagaccaucguggagguccagccccagcucgagauggagcugaccccgguggugcagacgaucgaggucaacuccuucagcggcuaccugaagcucaccgacaacguguacaucaagaacgccgacaucguggaggaggcgaagaaggucaagcccaccgugguggucaacgccgccaacguguaccugaagcacgggggcggcguggccggggcccugaacaaggcgaccaacaacgccaugcaggucgaguccgacgacuacaucgccacgaacggcccccucaagguggggggcagcugcguccuguccggccacaaccuggccaagcacugccuccacgugguggggcccaacgucaacaagggcgaggacauccagcugcugaagagcgccuacgagaacuucaaccagcacgaggugcuccuggcgccgcugcucuccgccgggaucuucggcgccgaccccauccacagccugcgggugugcgucgacaccgugcgcaccaacguguaccuggccgucuucgacaagaaccucuacgacaagcugguguccagcuuccuggagaugaagagcgagaagcagguggagcagaagaucgccgagauccccaaggaggaggucaagcccuucaucaccgaguccaagccgagcguggagcagcggaagcaggacgacaagaagaucaaggcgugcguggaggaggucacgaccacccucgaggagaccaaguuccugacggagaaccugcuccuguacaucgacaucaacgggaaccugcaccccgacuccgccacccucgugagcgacaucgacaucaccuuccugaagaaggacgcccccuacaucgugggcgacgucgugcaggagggcgugcugaccgccgucgugauccccacgaagaaggccgggggcaccaccgagaugcucgcgaaggcccugcgcaaggugccgaccgacaacuacaucacgaccuaccccgggcagggccugaacggguacaccgucgaggaggccaagaccgugcucaagaagugcaaguccgccuucuacauccugcccagcaucaucuccaacgagaagcaggagauccugggcaccgugagcuggaaccuccgggagaugcuggcgcacgccgaggagacgcgcaagcugaugcccgucugcguggagaccaaggccaucguguccaccauccagcggaaguacaagggcaucaagauccaggagggggucguggacuacggcgcccgcuucuacuucuacaccagcaagacgaccguggccucccugaucaacacccucaacgaccugaacgagacccuggucacgaugccgcucggguacgugacccacggccugaaccuggaggaggcggcccgguacaugcgcagccucaaggugcccgccaccgucuccgugagcucccccgacgccgugaccgccuacaacggguaccugacgagcuccagcaagacccccgaggagcacuucaucgagaccaucucccuggcgggcagcuacaaggacuggagcuacuccggccagagcacccagcucgggaucgaguuccugaagcggggcgacaaguccgucuacuacacgagcaacccgaccaccuuccaccuggacggggaggugaucaccuucgacaaccucaagacgcugcugucccuccgcgaggugcggaccaucaaggucuucaccaccguggacaacaucaaccugcacacgcagguggucgacaugagcaugaccuacggccagcaguucggccccaccuaccuggacggggccgacgugaccaagaucaagccccacaacucccacgagggcaagacguucuacgugcucccgaacgacgacacccugcgcgucgaggccuucgaguacuaccacaccaccgaccccagcuuccuggggcgguacauguccgcccucaaccacacgaagaaguggaaguacccccaggugaacggccugaccagcaucaagugggccgacaacaacugcuaccuggcgaccgcccuccugacccugcagcagaucgagcucaaguucaaccccccggcccugcaggacgccuacuaccgcgcgcgggccggggaggccgccaacuucugcgcccugauccucgcguacugcaacaagacggugggcgagcugggcgacguccgcgagaccaucuccuaccuguuccagcacgccaaccucgacagcugcaagcgggugcugaacgucgugugcaagaccugcgggcagcagcagaccacccugaagggcguggaggccgucauguacauggggacgcucuccuacgagcaguucaagaagggcgugcagauccccugcaccugcgggaagcaggccaccaaguaccuggugcagcaggagagccccuucgucaugauguccgcccccccggcgcaguacgagcugaagcacggcaccuucacgugcgccagcgaguacaccggcaacuaccagugcgggcacuacaagcacaucaccuccaaggagacccucuacugcaucgacggcgcccugcugacgaagagcagcgaguacaaggggcccaucaccgacguguucuacaaggagaacuccuacaccaccacgaucaagcccgugaccuacaagcucgacggcgucgugugcaccgagaucgaccccaagcuggacaacuacuacaagaaggacaacagcuacuucaccgagcagccgaucgaccuggugcccaaccagcccuaccccaacgccuccuucgacaacuucaaguucgucugcgacaacaucaaguucgccgacgaccucaaccagcugacgggguacaagaagccggcgagccgcgagcugaaggugaccuucuuccccgaccucaacggcgacguggucgccaucgacuacaagcacuacacccccuccuucaagaagggcgccaagcugcugcacaagcccaucguguggcacgugaacaacgccaccaacaaggcgacguacaagccgaacaccuggugcauccggugccucuggagcaccaagcccgucgagaccuccaacagcuucgacgugcugaaguccgaggacgcccaggggauggacaaccuggccugcgaggaccucaagcccgugagcgaggaggucguggagaaccccacgauccagaaggacgugcuggagugcaacgucaagaccaccgagguggugggcgacaucauccugaagccggccaacaacucccucaagaucaccgaggaggucgggcacacggaccugauggccgcguacguggacaacagcucccugaccaucaagaagcccaacgagcucagccgcgugcugggccugaagacccucgccacccacgggcuggccgccgucaacuccgugcccugggacacgaucgccaacuacgcgaagccguuccugaacaagguggucagcaccaccaccaacaucgugacgcgcugccucaaccgggugugcaccaacuacaugcccuacuucuucacccugcugcuccagcugugcaccuucacccgcuccacgaacagccggaucaaggccuccaugcccaccaccaucgccaagaacaccgucaagagcgugggcaaguucugccuggaggccagcuucaacuaccucaagucccccaacuucagcaagcugaucaacaucaucaucugguuccugcuccuguccgugugccugggcagccucaucuacuccacggccgcgcuggggguccugaugagcaaccucggcaugccguccuacugcaccggguaccgcgagggcuaccugaacagcaccaacgugaccaucgccacguacugcaccggcuccauccccugcagcgugugccuguccgggcucgacagccuggacaccuaccccucccuggagaccauccagaucacgaucagcuccuucaagugggaccucaccgccuucggccuggucgccgagugguuccuggccuacauccucuucacccgguucuucuacgugcuggggcuggcggccaucaugcagcucuucuucagcuacuucgccgugcacuucaucuccaacagcuggcugauguggcugaucaucaaccugguccagauggcccccaucuccgcgauggugcgcauguacaucuucuucgccagcuucuacuacguguggaagagcuacguccacgugguggacggcugcaacuccagcaccugcaugaugugcuacaagcggaaccgcgccacgcgggucgagugcaccaccaucgugaacgggguccgccgguccuucuacguguacgccaacggcggcaagggguucugcaagcuccacaacuggaacugcgugaacugcgacaccuucugcgccggcagcacguucaucuccgacgaggucgcgcgcgaccugagccugcaguucaagcggccgaucaaccccaccgaccaguccagcuacaucguggacuccgugaccgucaagaacgggagcauccaccucuacuucgacaaggccggccagaagaccuacgagcgccacucccugagccacuucgugaaccuggacaaccuccgggccaacaacacgaaggggucccugcccaucaacgugaucgucuucgacggcaagagcaagugcgaggaguccagcgccaaguccgccagcguguacuacucccagcugaugugccagcccauccuccugcuggaccaggcgcucgugagcgacgucggcgacagcgccgagguggccgugaagauguucgacgccuacgucaacaccuucuccagcaccuucaacgugccgauggagaagcugaagacccugguggccacggcggaggccgagcucgccaagaacgucucccuggacaacgugcugagcaccuucaucuccgccgcgcgccagggguucguggacagcgacgucgagaccaaggacgugguggagugccucaagcugucccaccagagcgacaucgaggucaccggcgacuccugcaacaacuacaugcugacguacaacaagguggagaacaugaccccccgggaccucggggccugcaucgacugcagcgcccgccacaucaacgcccagguggccaagucccacaacaucgcgcugaucuggaacgucaaggacuucaugagccuguccgagcagcuccggaagcagauccgcagcgccgccaagaagaacaaccugcccuucaagcugaccugcgccaccacgcgccagguggugaacgucgugaccaccaagaucgcccucaagggcggguga

SEQ ID NO: 18151 - RNA, 5841 nt, Artificial Sequence
  SARS-CoV-2__MT520486.1__non-structural protein 3 (NSP3) CDS gc
auggcccccaccaaggugaccuucggcgacgacacggucaucgaggugcagggguacaagagcgugaacaucaccuucgagcuggacgagcgcaucgacaagguccucaacgagaagugcuccgccuacaccguggagcugggcaccgaggugaacgaguucgcgugcgucguggccgacgccgugaucaagacgcugcagccggucagcgagcuccugaccccccuggggaucgaccucgacgagugguccauggccaccuacuaccuguucgacgagagcggcgaguucaagcuggccucccacauguacugcagcuucuacccccccgacgaggacgaggaggagggggacugcgaggaggaggaguucgagccguccacccaguacgaguacggcacggaggacgacuaccagggcaagccccucgaguucggggcgaccagcgccgcccugcagcccgaggaggagcaggaggaggacuggcuggacgacgacucccagcagaccgugggccagcaggacgggagcgaggacaaccagaccacgaccauccagaccaucguggagguccagccccagcucgagauggagcugaccccgguggugcagacgaucgaggucaacuccuucagcggcuaccugaagcucaccgacaacguguacaucaagaacgccgacaucguggaggaggcgaagaaggucaagcccaccgugguggucaacgccgccaacguguaccugaagcacgggggcggcguggccggggcccugaacaaggcgaccaacaacgccaugcaggucgaguccgacgacuacaucgccacgaacggcccccucaagguggggggcagcugcguccuguccggccacaaccuggccaagcacugccuccacgugguggggcccaacgucaacaagggcgaggacauccagcugcugaagagcgccuacgagaacuucaaccagcacgaggugcuccuggcgccgcugcucuccgccgggaucuucggcgccgaccccauccacagccugcgggugugcgucgacaccgugcgcaccaacguguaccuggccgucuucgacaagaaccucuacgacaagcugguguccagcuuccuggagaugaagagcgagaagcagguggagcagaagaucgccaagcccuucaucaccgaguccaagcccagcgucgagcagcggaagcaggacgacaagaagaucaaggcgugcguggaggaggugacgaccacccucgaggagaccaaguuccugacggagaaccugcuccuguacaucgacaucaacgggaaccugcacccggacuccgccacccucgucagcgacaucgacaucaccuuccugaagaaggacgcccccuacaucgugggcgacgugguccaggagggcgugcugaccgccguggucauccccacgaagaaggccgggggcaccaccgagaugcucgcgaaggcccugcgcaaggugcccaccgacaacuacaucacgaccuacccggggcagggccugaacggguacaccguggaggaggccaagaccguccucaagaagugcaaguccgccuucuacauccugcccagcaucaucuccaacgagaagcaggagauccugggcaccgugagcuggaaccuccgggagaugcuggcgcacgccgaggagacgcgcaagcugaugcccgugugcgucgagaccaaggccaucguguccaccauccagcggaaguacaagggcaucaagauccaggaggggguggucgacuacggcgcccgcuucuacuucuacaccagcaagacgaccguggccucccugaucaacacccucaacgaccugaacgagacccuggugacgaugccccucggguacgucacccacggccugaaccuggaggaggcggcccgguacaugcgcagccucaaggugccggccaccguguccgucagcucccccgacgccgugaccgccuacaacggguaccugacgagcuccagcaagacccccgaggagcacuucaucgagaccaucucccuggcgggcagcuacaaggacuggagcuacuccggccagagcacccagcucgggaucgaguuccugaagcggggcgacaaguccguguacuacacgagcaaccccaccaccuuccaccuggacggggaggucaucaccuucgacaaccucaagacgcugcugucccuccgcgaggugcggaccaucaagguguucaccaccgucgacaacaucaaccugcacacgcaggugguggacaugagcaugaccuacggccagcaguucggcccgaccuaccuggacggggccgacgucaccaagaucaagccccacaacucccacgagggcaagacguucuacgugcuccccaacgacgacacccugcgcguggaggccuucgaguacuaccacaccaccgacccgagcuuccuggggcgguacauguccgcccucaaccacacgaagaaguggaaguacccccaggucaacggccugaccagcaucaagugggccgacaacaacugcuaccuggcgaccgcccuccugacccugcagcagaucgagcucaaguucaacccccccgcccugcaggacgccuacuaccgcgcgcgggccggggaggccgccaacuucugcgcccugauccucgcguacugcaacaagacggugggcgagcugggcgacgugcgcgagaccauguccuaccuguuccagcacgccaaccucgacagcugcaagcggguccugaacguggucugcaagaccugcgggcagcagcagaccacccugaagggcguggaggccgugauguacauggggacgcucuccuacgagcaguucaagaagggcguccagaucccgugcaccugcgggaagcaggccaccaaguaccuggugcagcaggagagccccuucgugaugauguccgccccccccgcgcaguacgagcugaagcacggcaccuucacgugcgccagcgaguacaccggcaacuaccagugcgggcacuacaagcacaucaccuccaaggagacccucuacugcaucgacggcgcccugcugacgaagagcagcgaguacaaggggccgaucaccgacgucuucuacaaggagaacuccuacaccaccacgaucaagcccgugaccuacaagcucgacggcguggucugcaccgagaucgaccccaagcuggacaacuacuacaagaaggacaacagcuacuucaccgagcagcccaucgaccuggugccgaaccagcccuaccccaacgccuccuucgacaacuucaaguucgugugcgacaacaucaaguucgccgacgaccucaaccagcugacgggguacaagaagcccgcgagccgcgagcugaaggucaccuucuucccggaccucaacggcgacgugguggccaucgacuacaagcacuacacccccuccuucaagaagggcgccaagcugcugcacaagcccaucgucuggcacgugaacaacgccaccaacaaggcgacguacaagcccaacaccuggugcauccggugccucuggagcaccaagccgguggagaccuccaacagcuucgacguccugaaguccgaggacgcccaggggauggacaaccuggccugcgaggaccucaagcccgugagcgaggagguggucgagaaccccacgauccagaaggacgugcuggagugcaacgugaagaccaccgaggucgugggcgacaucauccugaagcccgccaacaacucccucaagaucaccgaggagguggggcacacggaccugauggccgcguacgucgacaacagcucccugaccaucaagaagccgaacgagcucagccgcgugcugggccugaagacccucgccacccacgggcuggccgccgugaacuccguccccugggacacgaucgccaacuacgcgaagcccuuccugaacaagguggugagcaccaccaccaacaucgucacgcgcugccucaaccgggugugcaccaacuacaugccguacuucuucacccugcugcuccagcugugcaccuucacccgcuccacgaacagccggaucaaggccuccaugcccaccaccaucgccaagaacaccgugaagagcgucggcaaguucugccuggaggccagcuucaacuaccucaagucccccaacuucagcaagcugaucaacaucaucaucugguuccugcuccuguccgugugccugggcagccucaucuacuccacggccgcgcugggggugcugaugagcaaccucggcaugcccuccuacugcaccggguaccgcgagggcuaccugaacagcaccaacgucaccaucgccacguacugcaccggcuccaucccgugcagcgugugccuguccgggcucgacagccuggacaccuaccccucccuggagaccauccagaucacgaucagcuccuucaagugggaccucaccgccuucggccugguggccgagugguuccuggccuacauccucuucacccgguucuucuacguccuggggcuggcggccaucaugcagcucuucuucagcuacuucgccgugcacuucaucuccaacagcuggcugauguggcugaucaucaaccuggugcagauggcccccaucuccgcgaugguccgcauguacaucuucuucgccagcuucuacuacguguggaagagcuacgugcacgucguggacggcugcaacuccagcaccugcaugaugugcuacaagcggaaccgcgccacgcggguggagugcaccaccaucgucaacggggugcgccgguccuucuacgucuacgccaacggcggcaagggguucugcaagcuccacaacuggaacugcgugaacugcgacaccuucugcgccggcagcacguucaucuccgacgagguggcgcgcgaccugagccugcaguucaagcggcccaucaacccgaccgaccaguccagcuacaucgucgacuccgugaccgugaagaacgggagcauccaccucuacuucgacaaggccggccagaagaccuacgagcgccacucccugagccacuucgucaaccuggacaaccuccgggccaacaacacgaaggggucccugcccaucaacgugaucguguucgacggcaagagcaagugcgaggaguccagcgccaaguccgccagcgucuacuacucccagcugaugugccagcccauccuccugcuggaccaggcgcucgugagcgacgugggcgacagcgccgaggucgccgugaagauguucgacgccuacgugaacaccuucuccagcaccuucaacguccccauggagaagcugaagacccugguggccacggcggaggccgagcucgccaagaacgugucccuggacaacguccugagcaccuucaucuccgccgcgcgccagggguucguggacagcgacguggagaccaaggacgucguggagugccucaagcugucccaccagagcgacaucgaggugaccggcgacuccugcaacaacuacaugcugacguacaacaaggucgagaacaugaccccgcgggaccucggggccugcaucgacugcagcgcccgccacaucaacgcccagguggccaagucccacaacaucgcgcugaucuggaacgugaaggacuucaugagccuguccgagcagcuccggaagcagauccgcagcgccgccaagaagaacaaccugcccuucaagcugaccugcgccaccacgcgccaggucgugaacguggucaccaccaagaucgcccucaagggcgggaagaucgugaacaacuggcuguga

SEQ ID NO: 18152 - RNA, 5841 nt, Artificial Sequence
  SARS-CoV-2__MT520534.1__non-structural protein 3 (NSP3) CDS gc
auggcccccaccaaggugaccuucggcgacgacacggucaucgaggugcagggguacaagagcgugaacaucaccuucgagcuggacgagcgcaucgacaagguccucaacgagaagugcuccgccuacaccguggagcugggcaccgaggugaacgaguucgcgugcgucguggccgacgccgugaucaagacgcugcagccggucagcgagcuccugaccccccuggggaucgaccucgacgagugguccauggccaccuacuaccuguucgacgagagcggcgaguucaagcuggccucccacauguacugcagcuucuacccccccgacgaggacgaggaggagggggacugcgaggaggaggaguucgagccguccacccaguacgaguacggcacggaggacgacuaccagggcaagccccucgaguucggggcgaccagcgccgcccugcagcccgaggaggagcaggaggaggacuggcuggacgacgacucccagcagaccgugggccagcaggacgggagcgaggacaaccagaccacgaccauccagaccaucguggagguccagccccagcucgagauggagcugaccccgguggugcagacgaucgaggucaacuccuucagcggcuaccugaagcucaccgacaacguguacaucaagaacgccgacaucguggaggaggcgaagaaggucaagcccaccgugguggucaacgccgccaacguguaccugaagcacgggggcggcguggccggggcccugaacaaggcgaccaacaacgccaugcaggucgaguccgacgacuacaucgccacgaacggcccccucaagguggggggcagcugcguccuguccggccacaaccuggccaagcacugccuccacgugguggggcccaacgucaacaagggcgaggacauccagcugcugaagagcgccuacgagaacuucaaccagcacgaggugcuccuggcgccgcugcucuccgccgggaucuucggcgccgaccccauccacagccugcgggugugcgucgacaccgugcgcaccaacguguaccuggccgucuucgacaagaaccucuacgacaagcugguguccagcuuccuggagaugaagagcgagaagcagguggagcagaagaucgccgagauccccaaggaggaggucaagcccuucaucaccgaguccaagccgagcguggagcagcggaagcaggacgacaagaagaucaaggcgugcguggaggaggucacgaccacccucgaggagaccaaguuccugacggagaaccugcuccuguacaucgacaucaacgggaaccugcaccccgacuccgccacccucgugagcgacaucgacaucaccuuccugaagaaggacgcccccuacaucgugggcgacgucgugcaggagggcgugcugaccgccgucgugauccccacgaagaaggccgggggcaccaccgagaugcucgcgaaggcccugcgcaaggugccgaccgacaacuacaucacgaccuaccccgggcagggccugaacggguacaccgucgaggaggccaagaccgugcucaagaagugcaaguccgccuucuacauccugcccagcaucaucuccaacgagaagcaggagauccugggcaccgugagcuggaaccuccgggagaugcuggcgcacgccgaggagacgcgcaagcugaugcccgucugcguggagaccaaggccaucguguccaccauccagcggaaguacaagggcaucaagauccaggagggggucguggacuacggcgcccgcuucuacuucuacaccagcaagacgaccguggccucccugaucaacacccucaacgaccugaacgagacccuggucacgaugccgcucggguacgugacccacggccugaaccuggaggaggcggcccgguacaugcgcagccucaaggugcccgccaccgucuccgugagcucccccgacgccgugaccgccuacaacggguaccugacgagcuccagcaagacccccgaggagcacuucaucgagaccaucucccuggcgggcagcuacaaggacuggagcuacuccggccagagcacccagcucgggaucgaguuccugaagcggggcgacaaguccgucuacuacacgagcaacccgaccaccuuccaccuggacggggaggugaucaccuucgacaaccucaagacgcugcugucccuccgcgaggugcggaccaucaaggucuucaccaccguggacaacaucaaccugcacacgcagguggucgacaugagcaugaccuacggccagcaguucggccccaccuaccuggacggggccgacgugaccaagaucaagccccacaacucccacgagggcaagacguucuacgugcucccgaacgacgacacccugcgcgucgaggccuucgaguacuaccacaccaccgaccccagcuuccuggggcgguacauguccgcccucaaccacacgaagaaguggaaguacccccaggugaacggccugaccagcaucaagugggccgacaacaacugcuaccuggcgaccgcccuccugacccugcagcagaucgagcucaaguucaaccccccggcccugcaggacgccuacuaccgcgcgcgggccggggaggccgccaacuucugcgcccugauccucgcguacugcaacaagacggugggcgagcugggcgacguccgcgagaccauguccuaccuguuccagcacgccaaccucgacagcugcaagcgggugcugaacgucgugugcaagaccugcgggcagcagcagaccacccugaagggcguggaggccgucauguacauggggacgcucuccuacgagcaguucaagaagggcgugcagauccccugcaccugcgggaagcaggccaccaaguaccuggugcagcaggagagccccuucgucaugauguccgcccccccggcgcaguacgagcugaagcacggcaccuucacgugcgccagcgaguacaccggcaacuaccagugcgggcacuacaagcacaucaccuccaaggagacccucuacugcaucgacggcgcccugcugacgaagagcagcgaguacaaggggcccaucaccgacguguucuacaaggagaacuccuacaccaccacgaucaagcccgugaccuacaagcucgacggcgucgugugcaccgagaucgaccccaagcuggacaacuacuacaagaaggacaacagcuacuucaccgagcagccgaucgaccuggugcccaaccagcccuaccccaacgccuccuucgacaacuucaaguucgucugcgacaacaucaaguucgccgacgaccucaaccagcugacgggguacaagaagccggcgagccgcgagcugaaggugaccuucuuccccgaccucaacggcgacguggucgccaucgacuacaagcacuacacccccuccuucaagaagggcgccaagcugcugcacaagcccaucguguggcacgugaacaacgccaccaacaaggcgacguacaagccgaacaccuggugcauccggugccucuggagcaccaagcccgucgagaccuccaacagcuucgacgugcugaaguccgaggacgcccaggggauggacaaccuggccugcgaggaccucaagcccgugagcgaggaggucguggagaaccccacgauccagaaggacgugcuggagugcaacgucaagaccaccgagguggugggcgacaucauccugaagccggccaacaacucccucaagaucaccgaggaggucgggcacacggaccugauggccgcguacguggacaacagcucccugaccaucaagaagcccaacgagcucagccgcgugcugggccugaagacccucgccacccacgggcuggccgccgucaacuccgugcccugggacacgaucgccaacuacgcgaagccguuccugaacaagguggucagcaccaccaccaacaucgugacgcgcugccucaaccgggugugcaccaacuacaugcccuacuucuucacccugcugcuccagcugugcaccuucacccgcuccacgaacagccggaucaaggccuccaugcccaccaccaucgccaagaacaccgucaagagcgugggcaaguucugccuggaggccagcuucaacuaccucaagucccccaacuucagcaagcugaucaacaucaucaucugguuccugcuccuguccgugugccugggcagccucaucuacuccacggccgcgcuggggguccugaugagcaaccucggcaugccguccuacugcaccggguaccgcgagggcuaccugaacagcaccaacgugaccaucgccacguacugcaccggcuccauccccugcagcgugugccuguccgggcucgacagccuggacaccuaccccucccuggagaccauccagaucacgaucagcuccuucaagugggaccucaccgccuucggccuggucgccgagugguuccuggccuacauccucuucacccgguucuucuacgugcuggggcuggcggccaucaugcagcucuucuucagcuacuucgccgugcacuucaucuccaacagcuggcugauguggcugaucaucaaccugguccagauggcccccaucuccgcgauggugcgcauguacaucuucuucgccagcuucuacuacguguggaagagcuacguccacgugguggacggcugcaacuccagcaccugcaugaugugcuacaagcggaaccgcgccacgcgggucgagugcaccaccaucgugaacgggguccgccgguccuucuacguguacgccaacggcggcaagggguucugcaagcuccacaacuggaacugcgugaacugcgacaccuucugcgccggcagcacguucaucuccgacgaggucgcgcgcgaccugagccugcaguucaagcggccgaucaaccccaccgaccaguccagcuacaucguggacuccgugaccgucaagaacgggagcauccaccucuacuucgacaaggccggccagaagaccuacgagcgccacucccugagccacuucgugaaccuggacaaccuccgggccaacaacacgaaggggucccugcccaucaacgugaucgucuucgacggcaagagcaagugcgaggaguccagcgccaaguccgccagcguguacuacucccagcugaugugccagcccauccuccugcuggaccaggcgcucgugagcgacgucggcgacagcgccgagguggccgugaagauguucgacgccuacgucaacaccuucuccagcaccuucaacgugccgauggagaagcugaagacccugguggccacggcggaggccgagcucgccaagaacgucucccuggacaacgugcugagcaccuucaucuccgccgcgcgccagggguucguggacagcgacgucgagaccaaggacgugguggagugcuucaagcucucccaccagagcgacaucgaggucaccggcgacuccugcaacaacuacaugcugacguacaacaagguggagaacaugaccccccgggaccugggggccugcaucgacugcagcgcccgccacaucaacgcccagguggccaagucccacaacaucgcgcucaucuggaacgucaaggacuucaugagccuguccgagcagcugcggaagcagauccgcagcgccgccaagaagaacaaccuccccuucaagcugaccugcgccaccacgcgccagguggugaacgucgugaccaccaagaucgcccugaagggcggguga

SEQ ID NO: 18153 - RNA, 5841 nt, Artificial Sequence
  SARS-CoV-2__MT520543.1__non-structural protein 3 (NSP3) CDS gc
auggcccccaccaaggugaccuucggcgacgacacggucaucgaggugcagggguacaagagcgugaacaucaccuucgagcuggacgagcgcaucgacaagguccucaacgagaagugcuccgccuacaccguggagcugggcaccgaggugaacgaguucgcgugcgucguggccgacgccgugaucaagacgcugcagccggucagcgagcuccugaccccccuggggaucgaccucgacgagugguccauggccaccuacuaccuguucgacgagagcggcgaguucaagcuggccucccacauguacugcagcuucuacccccccgacgaggacgaggaggagggggacugcgaggaggaggaguucgagccguccacccaguacgaguacggcacggaggacgacuaccagggcaagccccucgaguucggggcgaccagcgccgcccugcagcccgaggaggagcaggaggaggacuggcuggacgacgacucccagcagaccgugggccagcaggacgggagcgaggacaaccagaccacgaccauccagaccaucguggagguccagccccagcucgagauggagcugaccccgguggugcagacgaucgaggucaacuccuucagcggcuaccugaagcucaccgacaacguguacaucaagaacgccgacaucguggaggaggcgaagaaggucaagcccaccgugguggucaacgccgccaacguguaccugaagcacgggggcggcguggccggggcccugaacaaggcgaccaacaacgccaugcaggucgaguccgacgacuacaucgccacgaacggcccccucaagguggggggcagcugcguccuguccggccacaaccuggccaagcacugccuccacgugguggggcccaacgucaacaagggcgaggacauccagcugcugaagagcgccuacgagaacuucaaccagcacgaggugcuccuggcgccgcugcucuccgccgggaucuucggcgccgaccccauccacagccugcgggugugcgucgacaccgugcgcaccaacguguaccuggccgucuucgacaagaaccucuacgacaagcugguguccagcuuccuggagaugaagagcgagaagcagguggagcagaagaucgccgagauccccaaggaggaggucaagcccuucaucaccgaguccaagccgagcguggagcagcggaagcaggacgacaagaagaucaaggcgugcguggaggaggucacgaccacccucgaggagaccaaguuccugacggagaaccugcuccuguacaucgacaucaacgggaaccugcaccccgacuccgccacccucgugagcgacaucgacaucaccuuccugaagaaggacgcccccuacaucgugggcgacgucgugcaggagggcgugcugaacgccgucgugauccccaccaagaaggccgggggcacgaccgagaugcucgcgaaggcccugcgcaaggugccgaccgacaacuacaucaccacguaccccgggcagggccugaacggguacaccgucgaggaggccaagaccgugcucaagaagugcaaguccgccuucuacauccugcccagcaucaucuccaacgagaagcaggagauccugggcaccgugagcuggaaccuccgggagaugcuggcgcacgccgaggagacccgcaagcugaugcccgucugcguggagacgaaggccaucguguccaccauccagcggaaguacaagggcaucaagauccaggagggggucguggacuacggcgcccgcuucuacuucuacaccagcaagaccacgguggccucccugaucaacacccucaacgaccugaacgagacccuggucaccaugccgcucggguacgugacgcacggccugaaccuggaggaggcggcccgguacaugcgcagccucaaggugcccgccaccgucuccgugagcucccccgacgccgugaccgccuacaacggguaccugaccagcuccagcaagacgcccgaggagcacuucaucgagaccaucucccuggcgggcagcuacaaggacuggagcuacuccggccagagcacccagcucgggaucgaguuccugaagcggggcgacaaguccgucuacuacaccagcaacccgacgaccuuccaccuggacggggaggugaucaccuucgacaaccucaagacccugcugucccuccgcgaggugcggacgaucaaggucuucaccaccguggacaacaucaaccugcacacccagguggucgacaugagcaugacguacggccagcaguucggccccaccuaccuggacggggccgacgugaccaagaucaagccccacaacucccacgagggcaagaccuucuacgugcucccgaacgacgacacgcugcgcgucgaggccuucgaguacuaccacaccaccgaccccagcuuccuggggcgguacauguccgcccucaaccacaccaagaaguggaaguacccccaggugaacggccugacgagcaucaagugggccgacaacaacugcuaccuggcgaccgcccuccugacccugcagcagaucgagcucaaguucaaccccccggcccugcaggacgccuacuaccgcgcgcgggccggggaggccgccaacuucugcgcccugauccucgcguacugcaacaagaccgugggcgagcugggcgacguccgcgagacgauguccuaccuguuccagcacgccaaccucgacagcugcaagcgggugcugaacgucgugugcaagaccugcgggcagcagcagaccacccugaagggcguggaggccgucauguacauggggacccucuccuacgagcaguucaagaagggcgugcagauccccugcacgugcgggaagcaggccaccaaguaccuggugcagcaggagagccccuucgucaugauguccgcccccccggcgcaguacgagcugaagcacggcaccuucaccugcgccagcgaguacacgggcaacuaccagugcgggcacuacaagcacaucaccuccaaggagacccucuacugcaucgacggcgcccugcugaccaagagcagcgaguacaaggggcccaucacggacguguucuacaaggagaacuccuacaccaccaccaucaagcccgugacguacaagcucgacggcgucgugugcaccgagaucgaccccaagcuggacaacuacuacaagaaggacaacagcuacuucaccgagcagccgaucgaccuggugcccaaccagcccuaccccaacgccuccuucgacaacuucaaguucgucugcgacaacaucaaguucgccgacgaccucaaccagcugaccggguacaagaagccggcgagccgcgagcugaaggugacguucuuccccgaccucaacggcgacguggucgccaucgacuacaagcacuacacccccuccuucaagaagggcgccaagcugcugcacaagcccaucguguggcacgugaacaacgccaccaacaaggcgaccuacaagccgaacacguggugcauccggugccucuggagcaccaagcccgucgagaccuccaacagcuucgacgugcugaaguccgaggacgcccaggggauggacaaccuggccugcgaggaccucaagcccgugagcgaggaggucguggagaaccccaccauccagaaggacgugcuggagugcaacgucaagacgaccgagguggugggcgacaucauccugaagccggccaacaacucccucaagaucaccgaggaggucgggcacaccgaccugauggccgcguacguggacaacagcucccugacgaucaagaagcccaacgagcucagccgcgugcugggccugaagacccucgccacccacgggcuggccgccgucaacuccgugcccugggacaccaucgccaacuacgcgaagccguuccugaacaagguggucagcacgaccaccaacaucgugacccgcugccucaaccgggugugcacgaacuacaugcccuacuucuucacccugcugcuccagcugugcaccuucacccgcuccaccaacagccggaucaaggccuccaugcccacgaccaucgccaagaacaccgucaagagcgugggcaaguucugccuggaggccagcuucaacuaccucaagucccccaacuucagcaagcugaucaacaucaucaucugguuccugcuccuguccgugugccugggcagccucaucuacuccaccgccgcgcuggggguccugaugagcaaccucggcaugccguccuacugcacgggguaccgcgagggcuaccugaacagcaccaacgugaccaucgccaccuacugcacgggcuccauccccugcagcgugugccuguccgggcucgacagccuggacaccuaccccucccuggagaccauccagaucaccaucagcuccuucaagugggaccucacggccuucggccuggucgccgagugguuccuggccuacauccucuucacccgguucuucuacgugcuggggcuggcggccaucaugcagcucuucuucagcuacuucgccgugcacuucaucuccaacagcuggcugauguggcugaucaucaaccugguccagauggcccccaucuccgcgauggugcgcauguacaucuucuucgccagcuucuacuacguguggaagagcuacguccacgugguggacggcugcaacuccagcaccugcaugaugugcuacaagcggaaccgcgccacccgggucgagugcacgaccaucgugaacgggguccgccgguccuucuacguguacgccaacggcggcaagggguucugcaagcuccacaacuggaacugcgugaacugcgacaccuucugcgccggcagcaccuucaucuccgacgaggucgcgcgcgaccugagccugcaguucaagcggccgaucaaccccacggaccaguccagcuacaucguggacuccgugaccgucaagaacgggagcauccaccucuacuucgacaaggccggccagaagaccuacgagcgccacucccugagccacuucgugaaccuggacaaccuccgggccaacaacaccaaggggucccugcccaucaacgugaucgucuucgacggcaagagcaagugcgaggaguccagcgccaaguccgccagcguguacuacucccagcugaugugccagcccauccuccugcuggaccaggcgcucgugagcgacgucggcgacagcgccgagguggccgugaagauguucgacgccuacgucaacacguucuccagcaccuucaacgugccgauggagaagcugaagacccugguggccaccgcggaggccgagcucgccaagaacgucucccuggacaacgugcugagcacguucaucuccgccgcgcgccagggguucguggacagcgacgucgagaccaaggacgugguggagugccucaagcugucccaccagagcgacaucgaggucaccggcgacuccugcaacaacuacaugcugaccuacaacaagguggagaacaugacgccccgggaccucggggccugcaucgacugcagcgcccgccacaucaacgcccagguggccaagucccacaacaucgcgcugaucuggaacgucaaggacuucaugagccuguccgagcagcuccggaagcagauccgcagcgccgccaagaagaacaaccugcccuucaagcugaccugcgccaccacccgccagguggugaacgucgugacgaccaagaucgcccucaagggcggguga

SEQ ID NO: 18154 - RNA, 5841 nt, Artificial Sequence
  SARS-CoV-2__MT560667.1__non-structural protein 3 (NSP3) CDS gc
auggcccccaccaaggugaccuucggcgacgacacggucaucgaggugcagggguacaagagcgugaacaucaccuucgagcuggacgagcgcaucgacaagguccucaacgagaagugcuccgccuacaccguggagcugggcaccgaggugaacgaguucgcgugcgucguggccgacgccgugaucaagacgcugcagccggucagcgagcuccugaccccccuggggaucgaccucgacgagugguccauggccaccuacuaccuguucgacgagagcggcgaguucaagcuggccucccacauguacugcagcuucuacccccccgacgaggacgaggaggagggggacugcgaggaggaggaguucgagccguccacccaguacgaguacggcacggaggacgacuaccagggcaagccccucgaguucggggcgaccagcgccgcccugcagcccgaggaggagcaggaggaggacuggcuggacgacgacucccagcagaccgugggccagcaggacgggagcgaggacaaccagaccacgaccauccagaccaucguggagguccagccccagcucgagauggagcugaccccgguggugcagacgaucgaggucaacuccuucagcggcuaccugaagcucaccgacaacguguacaucaagaacgccgacaucguggaggaggcgaagaaggucaagcugaccgugguggucaacgccgccaacguguaccugaagcacgggggcggcguggccggggcccucaacaaggcgaccaacaacgccaugcaggucgaguccgacgacuacaucgccacgaacggcccccugaagguggggggcagcugcguccuguccggccacaaccucgccaagcacugccugcacgugguggggcccaacgucaacaagggcgaggacauccagcugcucaagagcgccuacgagaacuucaaccagcacgaggugcugcuggcgccccuccuguccgccgggaucuucggcgccgacccgauccacagccugcgggugugcgucgacaccgugcgcaccaacguguaccucgccgucuucgacaagaaccuguacgacaagcugguguccagcuuccucgagaugaagagcgagaagcagguggagcagaagaucgccgagauccccaaggaggaggucaagcccuucaucaccgaguccaagcccagcguggagcagcggaagcaggacgacaagaagaucaaggcgugcguggaggaggucacgaccacccuggaggagaccaaguuccugacggagaaccuccugcuguacaucgacaucaacgggaaccuccacccggacuccgccacccuggugagcgacaucgacaucaccuuccugaagaaggacgcccccuacaucgugggcgacgucgugcaggagggcgugcucaccgccgucgugauccccacgaagaaggccgggggcaccaccgagaugcuggcgaaggcccugcgcaaggugcccaccgacaacuacaucacgaccuacccggggcagggccucaacggguacaccgucgaggaggccaagaccgugcugaagaagugcaaguccgccuucuacauccugcccagcaucaucuccaacgagaagcaggagauccucggcaccgugagcuggaaccugcgggagaugcuggcgcacgccgaggagacgcgcaagcugaugcccgucugcguggagaccaaggccaucguguccaccauccagcggaaguacaagggcaucaagauccaggagggggucguggacuacggcgcccgcuucuacuucuacaccagcaagacgaccguggccucccucaucaacacccugaacgaccugaacgagacccucgucacgaugccccugggguacgugacccacggccugaaccucgaggaggcggcccgguacaugcgcagccugaaggugccggccaccgucuccgugagcucccccgacgccgugaccgccuacaacggguaccugacgagcuccagcaagacccccgaggagcacuucaucgagaccaucucccucgcgggcagcuacaaggacuggagcuacuccggccagagcacccagcuggggaucgaguuccugaagcggggcgacaaguccgucuacuacacgagcaaccccaccaccuuccaccucgacggggaggugaucaccuucgacaaccugaagacgcugcucucccugcgcgaggugcggaccaucaaggucuucaccaccguggacaacaucaaccugcacacgcagguggucgacaugagcaugaccuacggccagcaguucggcccgaccuaccucgacggggccgacgugaccaagaucaagccccacaacucccacgagggcaagacguucuacgugcugcccaacgacgacacccugcgcgucgaggccuucgaguacuaccacaccaccgacccgagcuuccucgggcgguacauguccgcccugaaccacacgaagaaguggaaguacccccaggugaacggccugaccagcaucaagugggccgacaacaacugcuaccucgcgaccgcccugcugacccuccagcagaucgagcugaaguucaacccccccgcccugcaggacgccuacuaccgcgcgcgggccggggaggccgccaacuucugcgcccucauccuggcguacugcaacaagacggugggcgagcugggcgacguccgcgagaccauguccuaccucuuccagcacgccaaccuggacagcugcaagcgggugcugaacgucgugugcaagaccugcgggcagcagcagaccacccucaagggcguggaggccgucauguacauggggacgcuguccuacgagcaguucaagaagggcgugcagaucccgugcaccugcgggaagcaggccaccaaguaccuggugcagcaggagagccccuucgucaugauguccgccccccccgcgcaguacgagcucaagcacggcaccuucacgugcgccagcgaguacaccggcaacuaccagugcgggcacuacaagcacaucaccuccaaggagacccuguacugcaucgacggcgcccugcucacgaagagcagcgaguacaaggggccgaucaccgacguguucuacaaggagaacuccuacaccaccacgaucaagcccgugaccuacaagcuggacggcgucgugugcaccgagaucgaccccaagcuggacaacuacuacaagaaggacaacagcuacuucaccgagcagcccaucgaccucgugccgaaccagcccuaccccaacgccuccuucgacaacuucaaguucgucugcgacaacaucaaguucgccgacgaccugaaccagcugacgggguacaagaagcccgcgagccgcgagcucaaggugaccuucuucccggaccugaacggcgacguggucgccaucgacuacaagcacuacacccccuccuucaagaagggcgccaagcugcuccacaagcccaucguguggcacgugaacaacgccaccaacaaggcgacguacaagcccaacaccuggugcauccggugccuguggagcaccaagccggucgagaccuccaacagcuucgacgugcugaaguccgaggacgcccaggggauggacaaccucgccugcgaggaccugaagcccgugagcgaggaggucguggagaaccccacgauccagaaggacgugcuggagugcaacgucaagaccaccgagguggugggcgacaucauccucaagcccgccaacaacucccugaagaucaccgaggaggucgggcacacggaccugauggccgcguacguggacaacagcucccucaccaucaagaagccgaacgagcugagccgcgugcugggccucaagacccuggccacccacgggcuggccgccgucaacuccgugcccugggacacgaucgccaacuacgcgaagcccuuccucaacaagguggucagcaccaccaccaacaucgugacgcgcugccugaaccgggugugcaccaacuacaugccguacuucuucacccugcuccugcagcugugcaccuucacccgcuccacgaacagccggaucaaggccuccaugcccaccaccaucgccaagaacaccgucaagagcgugggcaaguucugccucgaggccagcuucaacuaccugaagucccccaacuucagcaagcugaucaacaucaucaucugguuccuccugcuguccgugugccucggcagccugaucuacuccacggccgcgcuggggguccucaugagcaaccugggcaugcccuccuacugcaccggguaccgcgagggcuaccugaacagcaccaacgugaccaucgccacguacugcaccggcuccaucccgugcagcgugugccucuccgggcuggacagccuggacaccuaccccucccucgagaccauccagaucacgaucagcuccuucaagugggaccugaccgccuucggccuggucgccgagugguuccucgccuacauccuguucacccgguucuucuacgugcuggggcucgcggccaucaugcagcuguucuucagcuacuucgccgugcacuucaucuccaacagcuggcugauguggcugaucaucaaccucguccagauggcccccaucuccgcgauggugcgcauguacaucuucuucgccagcuucuacuacguguggaagagcuacguccacgugguggacggcugcaacuccagcaccugcaugaugugcuacaagcggaaccgcgccacgcgggucgagugcaccaccaucgugaacgggguccgccgguccuucuacguguacgccaacggcggcaagggguucugcaagcugcacaacuggaacugcgugaacugcgacaccuucugcgccggcagcacguucaucuccgacgaggucgcgcgcgaccugagccuccaguucaagcggcccaucaacccgaccgaccaguccagcuacaucguggacuccgugaccgucaagaacgggagcauccaccuguacuucgacaaggccggccagaagaccuacgagcgccacucccugagccacuucgugaaccucgacaaccugcgggccaacaacacgaaggggucccugcccaucaacgugaucgucuucgacggcaagagcaagugcgaggaguccagcgccaaguccgccagcguguacuacucccagcucaugugccagcccauccugcugcucgaccaggcgcuggugagcgacgucggcgacagcgccgagguggccgugaagauguucgacgccuacgucaacaccuucuccagcaccuucaacgugcccauggagaagcugaagacccucguggccacggcggaggccgagcuggccaagaacgucucccuggacaacgugcucagcaccuucaucuccgccgcgcgccagggguucguggacagcgacgucgagaccaaggacgugguggagugccugaagcugucccaccagagcgacaucgaggucaccggcgacuccugcaacaacuacaugcucacguacaacaagguggagaacaugaccccgcgggaccugggggccugcaucgacugcagcgcccgccacaucaacgcccagguggccaagucccacaacaucgcgcugaucuggaacgucaaggacuucaugagccucuccgagcagcugcggaagcagauccgcagcgccgccaagaagaacaaccugcccuucaagcucaccugcgccaccacgcgccagguggugaacgucgugaccaccaagaucgcccugaagggcggguga

SEQ ID NO: 18155 - RNA, 5841 nt, Artificial Sequence
  SARS-CoV-2__MT560679.1__non-structural protein 3 (NSP3) CDS gc
auggcccccaccaaggugaccuucggcgacgacacggucaucgaggugcagggguacaagagcgugaacaucaccuucgagcuggacgagcgcaucgacaagguccucaacgagaagugcuccgccuacaccguggagcugggcaccgaggugaacgaguucgcgugcgucguggccgacgccgugaucaagacgcugcagccggucagcgagcuccugaccccccuggggaucgaccucgacgagugguccauggccaccuacuaccuguucgacgagagcggcgaguucaagcuggccucccacauguacugcagcuucuacccccccgacgaggacgaggaggagggggacugcgaggaggaggaguucgagccguccacccaguacgaguacggcacggaggacgacuaccagggcaagccccucgaguucggggcgaccagcgccgcccugcagcccgaggaggagcaggaggaggacuggcuggacgacgacucccagcagaccgugggccagcaggacgggagcgaggacaaccagaccacgaccauccagaccaucguggagguccagccccagcucgagauggagcugaccccgguggugcagacgaucgaggucaacuccuucagcggcuaccugaagcucaccgacaacguguacaucaagaacgccgacaucguggaggaggcgaagaaggucaagcccaccgugguggucaacgccgccaacguguaccugaagcacgggggcggcguggccggggcccugaacaaggcgaccaacaacgccaugcaggucgaguccgacgacuacaucgccacgaacggcccccucaagguggggggcagcugcguccuguccggccacaaccuggccaagcacugccuccacgugguggggcccaacgucaacaagggcgaggacauccagcugcugaagagcgccuacgagaacuucaaccagcacgaggugcuccuggcgccgcugcucuccgccgggaucuucggcgccgaccccauccacagccugcgggugugcgucgacaccgugcgcaccaacguguaccuggccgucuucgacaagaaccucuacgacaagcugguguccagcuuccuggagaugaagagcgagaagcagguggagcagaagaucgccgagauccccaaggaggaggucaagcccuucaucaccgaguccaagccgagcguggagcagcggaagcaggacgacaagaagaucaaggcgugcguggaggaggucacgaccacccucgaggagaccaaguuccugacggagaaccugcuccuguacaucgacaucaacgggaaccugcaccccgacuccgccacccucgugagcgacaucgacaucaccuuccugaagaaggacgcccccuacaucgugggcgacgucgugcaggagggcgugcugaccgucguggugauccccacgaagaaggccgggggcaccaccgagaugcucgccaaggcgcugcgcaaggucccgaccgacaacuacaucacgaccuaccccgggcagggccugaacggguacaccguggaggaggccaagaccgugcucaagaagugcaaguccgccuucuacauccugcccagcaucaucuccaacgagaagcaggagauccugggcaccgucagcuggaaccuccgggagaugcuggcccacgcggaggagacgcgcaagcugaugcccgugugcguggagaccaaggccaucgucuccaccauccagcggaaguacaagggcaucaagauccaggagggggugguggacuacggcgcccgcuucuacuucuacaccagcaagacgaccgucgccucccugaucaacacccucaacgaccugaacgagacccuggugacgaugccgcucggguacgugacccacggccugaaccuggaggaggccgcgcgguacaugcgcagccucaagguccccgccaccguguccgugagcucccccgacgccgucaccgccuacaacggguaccugacgagcuccagcaagacccccgaggagcacuucaucgagaccaucucccuggccggcagcuacaaggacuggagcuacuccggccagagcacccagcucgggaucgaguuccugaagcggggcgacaaguccguguacuacacgagcaacccgaccaccuuccaccuggacggggaggugaucaccuucgacaaccucaagacgcugcugucccuccgcgagguccggaccaucaagguguucaccaccguggacaacaucaaccugcacacgcaggucguggacaugagcaugaccuacggccagcaguucggccccaccuaccuggacggggcggacgugaccaagaucaagccccacaacucccacgagggcaagacguucuacguccucccgaacgacgacacccugcgcguggaggccuucgaguacuaccacaccaccgaccccagcuuccuggggcgguacauguccgcccucaaccacacgaagaaguggaaguacccccaggugaacggccugaccagcaucaagugggccgacaacaacugcuaccuggccaccgcgcuccugacccugcagcagaucgagcucaaguucaaccccccggcccugcaggacgccuacuaccgcgcccgggcgggggaggccgccaacuucugcgcccugauccucgccuacugcaacaagacggucggcgagcugggcgacgugcgcgagaccauguccuaccuguuccagcacgcgaaccucgacagcugcaagcggguccugaacguggugugcaagaccugcgggcagcagcagaccacccugaagggcgucgaggccgugauguacauggggacgcucuccuacgagcaguucaagaagggcgugcagauccccugcaccugcgggaagcaggccaccaaguaccugguccagcaggagagccccuucgugaugauguccgcccccccggcccaguacgagcugaagcacggcaccuucacgugcgcgagcgaguacaccggcaacuaccagugcgggcacuacaagcacaucaccuccaaggagacccucuacugcaucgacggcgcccugcugaucaagagcagcgaguacaaggggcccaucacggacguguucuacaaggagaacuccuacaccaccaccaucaagcccgucacguacaagcucgacggcguggugugcaccgagaucgaccccaagcuggacaacuacuacaagaaggacaacagcuacuucaccgagcagccgaucgaccugguccccaaccagcccuaccccaacgccuccuucgacaacuucaaguucgugugcgacaacaucaaguucgccgacgaccucaaccagcugaccggguacaagaagccggccagccgcgagcugaaggugacguucuuccccgaccucaacggcgacgucguggcgaucgacuacaagcacuacacccccuccuucaagaagggcgccaagcugcugcacaagcccaucguguggcacgucaacaacgccaccaacaaggccaccuacaagccgaacacguggugcauccggugccucuggagcaccaagcccguggagaccuccaacagcuucgacgugcugaaguccgaggacgcgcaggggauggacaaccuggccugcgaggaccucaagcccgucagcgaggaggugguggagaaccccaccauccagaaggacguccuggagugcaacgugaagacgaccgagguggucggcgacaucauccugaagccggccaacaacucccucaagaucaccgaggagguggggcacaccgaccugauggccgccuacguggacaacagcucccugacgaucaagaagcccaacgagcucagccgcguccugggccugaagacccucgcgacccacgggcuggccgccgugaacuccgugcccugggacaccaucgccaacuacgccaagccguuccugaacaaggucgugagcacgaccaccaacaucgugacccgcugccucaaccgggucugcacgaacuacaugcccuacuucuucacccugcugcuccagcugugcaccuucacccgcuccaccaacagccggaucaaggcguccaugcccacgaccaucgccaagaacaccgugaagagcgugggcaaguucugccuggaggccagcuucaacuaccucaagucccccaacuucagcaagcugaucaacaucaucaucugguuccugcuccuguccgucugccugggcagccucaucuacuccaccgccgcccugggggugcugaugagcaaccucggcaugccguccuacugcacgggguaccgcgagggcuaccugaacagcaccaacgugaccaucgcgaccuacugcacgggcuccauccccugcagcgucugccuguccgggcucgacagccuggacaccuaccccucccuggagaccauccagaucaccaucagcuccuucaagugggaccucacggccuucggccugguggccgagugguuccuggccuacauccucuucacccgguucuucuacgugcuggggcuggccgcgaucaugcagcucuucuucagcuacuucgccguccacuucaucuccaacagcuggcugauguggcugaucaucaaccuggugcagauggcccccaucuccgccauggugcgcauguacaucuucuucgcgagcuucuacuacgucuggaagagcuacgugcacguggucgacggcugcaacuccagcaccugcaugaugugcuacaagcggaaccgcgccacccggguggagugcacgaccaucgucaacggggugcgccgguccuucuacguguacgccaacggcggcaagggguucugcaagcuccacaacuggaacugcgucaacugcgacaccuucugcgccggcagcaccuucaucuccgacgagguggcccgcgaccugagccugcaguucaagcggccgaucaaccccacggaccaguccagcuacaucguggacuccgucaccgugaagaacgggagcauccaccucuacuucgacaaggcgggccagaagaccuacgagcgccacucccugagccacuucgugaaccuggacaaccuccgggccaacaacaccaaggggucccugcccaucaacgucaucguguucgacggcaagagcaagugcgaggaguccagcgccaaguccgccagcguguacuacucccagcugaugugccagcccauccuccugcuggaccaggcccucgucagcgacgugggcgacagcgcggagguggccgucaagauguucgacgccuacgugaacacguucuccagcaccuucaacgugccgauggagaagcugaagacccuggucgccaccgccgaggcggagcucgccaagaacgugucccuggacaacgugcugagcacguucaucuccgccgcccgccagggguucgucgacagcgacguggagaccaaggacguggucgagugccucaagcugucccaccagagcgacaucgaggugaccggcgacuccugcaacaacuacaugcugaccuacaacaagguggagaacaugacgccccgggaccucggggcgugcaucgacugcagcgcccgccacaucaacgcccaggucgccaagucccacaacaucgcccugaucuggaacgugaaggacuucaugagccuguccgagcagcuccggaagcagauccgcagcgcggccaagaagaacaaccugcccuucaagcugaccugcgccaccacccgccagguggucaacguggugacgaccaagaucgcccucaagggcggguga

SEQ ID NO: 18156 - RNA, 5841 nt, Artificial Sequence
  SARS-CoV-2__MT558672.1__non-structural protein 3 (NSP3) CDS gc
auggcccccaccaaggugaccuucggcgacgacacggucaucgaggugcagggguacaagagcgugaacaucaccuucgagcuggacgagcgcaucgacaagguccucaacgagaagugcuccgccuacaccguggagcugggcaccgaggugaacgaguucgcgugcgucguggccgacgccgugaucaagacgcugcagccggucagcgagcuccugaccccccuggggaucgaccucgacgagugguccauggccaccuacuaccuguucgacgagagcggcgaguucaagcuggccucccacauguacugcagcuucuacccccccgacgaggacgaggaggagggggacugcgaggaggaggaguucgagccguccacccaguacgaguacggcacggaggacgacuaccagggcaagccccucgaguucggggcgaccagcgccgcccugcagcccgaggaggagcaggaggaggacuggcuggacgacgacucccagcagaccgugggccagcaggacgggagcgaggacaaccagaccacgaccauccagaccaucguggagguccagccccagcucgagauggagcugaccccgguggugcagacgaucgaggucaacuccuucagcggcuaccugaagcucaccgacaacguguacaucaagaacgccgacaucguggaggaggcgaagaaggucaagcccaccgugguggucaacgccgccaacguguaccugaagcacgggggcggcguggccggggcccugaacaaggcgaccaacaacgccaugcaggucgaguccgacgacuacaucgccacgaacggcccccucaagguggggggcagcugcguccuguccggccacaaccuggccaagcacugccuccacgugguggggcccaacgucaacaagggcgaggacauccagcugcugaagagcgccuacgagaacuucaaccagcacgaggugcuccuggcgccgcugcucuccgccgggaucuucggcgccgaccccauccacagccugcgggugugcgucgacaccgugcgcaccaacguguaccuggccgucuucgacaagaaccucuacgacaagcugguguccagcuuccuggagaugaagagcgagaagcagguggagcagaagaucgccgagauccccaaggaggaggucaagcccuucaucaccgaguccaagccgagcguggagcagcggaagcaggacgacaagaagaucaaggcgugcguggaggaggucacgaccacccucgaggagaccaaguuccugacggagaaccugcuccuguacaucgacaucaacgggaaccugcaccccgacuccgccacccucgugagcgacaucgacaucaccuuccugaagaaggacgcccccuacaucgugggcgacgucgugcaggagggcgugcugaccgccgucgugauccccacgaagaaggccgggggcaccaccgagaugcucgcgaaggcccugcgcaaggugccgaccgacaacuacaucacgaccuaccccgggcagggccugaacggguacaccgucgaggaggccaagaccgugcucaagaagugcaaguccgccuucuacauccugcccagcaucaucuccaacgagaagcaggagauccugggcaccgugagcuggaaccuccgggagaugcuggcgcacgccgaggagacgcgcaagcugaugcccgucugcguggagaccaaggccaucguguccaccauccagcggaaguacaagggcaucaagauccaggagggggucguggacuacggcgcccgcuucuacuucuacaccagcaagacgaccguggccucccugaucaacacccucaacgaccugaacgagacccuggucacgaugccgcucggguacgugacccacggccugaaccuggaggaggcggcccgguacaugcgcagccucaaggugcccgccaccgucuccgugagcucccccgacgccgugaccgccuacaacggguaccugacgagcuccagcaagacccccgaggagcacuucaucgagaccaucucccuggcgggcagcuacaaggacuggagcuacuccggccagagcacccagcucgggaucgaguuccugaagcggggcgacaaguccgucuacuacacgagcaacccgaccaccuuccaccuggacggggaggugaucaccuucgacaaccucaagacgcugcugucccuccgcgaggugcggaccaucaaggucuucaccaccguggacaacaucaaccugcacacgcagguggucgacaugagcaugaccuacggccagcaguucggccccaccuaccuggacggggccgacgugaccaagaucaagccccacaacucccacgagggcaagacguucuacgugcucccgaacgacgacacccugcgcgucgaggccuucgaguacuaccacaccaccgaccccagcuuccuggggcgguacauguccgcccucaaccacacgaagaaguggaaguacccccaggugaacggccugaccagcaucaagugggccgacaacaacugcuaccuggcgaccgcccuccugacccugcagcagaucgagcucaaguucaaccccccggcccugcaggacgccuacuaccgcgcgcgggccggggaggccgccaacuucugcgcccugauccucgcguacugcaacaagacggugggcgagcugggcgacguccgcgagaccauguccuaccuguuccagcacgccaaccucgacagcugcaagcgggugcugaacgucgugugcaagaccugcgggcagcagcagaccacccugaagggcguggaggccgucauguacauggggacgcucuccuacgagcaguucaagaagggcgugcagauccccugcaccugcgggaagcaggccaccaaguaccuggugcagcaggagagccccuucgucaugauguccgcccccccggcgcaguacgagcugaagcacggcaccuucacgugcgccagcgaguacaccggcaacuaccagugcgggcacuacaagcacaucaccuccaaggagacccucuacugcaucgacggcgcccugcugacgaagagcagcgaguacaaggggcccaucaccgacguguucuacaaggagaacuccuacaccaccacgaucaagcccgugaccuacaagcucgacggcgucgugugcaccgagaucgaccccaagcuggacaacuacuacaagaaggacaacagcuacuucaccgagcagccgaucgaccuggugcccaaccagcccuaccccaacgccuccuucgacaacuucaaguucgucugcgacaacaucaaguucgccgacgaccucaaccagcugacgggguacaagaagccggcgagccgcgagcugaaggugaccuucuuccccgaccucaacggcgacguggucgccaucgacuacaagcacuacacccccuccuucaagaagggcgccaagcugcugcacaagcccaucguguggcacgugaacaacgccaccaacaaggcgacguacaagccgaacaccuggugcauccggugccucuggagcaccaagcccgucgagaccuccaacagcuucgacgugcugaaguccgaggacgcccaggggauggacaaccuggccugcgaggaccucaagcccgugagcgaggaggucguggagaaccccacgauccagaaggacgugcuggagugcaacgucaagaccaccgagguggugggcgacaucauccugaagccggccaacaacucccucaagaucaccgaggaggucgggcacacggaccugauggccgcguacguggacaacagcucccugaccaucaagaagcccaacgagcucagccgcgugcugggccugaagacccucgccacccacgggcuggccgccgucaacuccgugcccugggacacgaucgccaacuacgcgaagccguuccugaacaagguggucagcaccaccaccaacaucgugacgcgcugccucaaccgggugugcaccaacuacaugcccuacuucuucacccugcugcuccagcugugcaccuucacccgcuccacgaacagccggaucaaggccuccaugcccaccaccaucgccaagaacaccgucaagagcgugggcaaguucugccuggaggccagcuucaacuaccucaagucccccaacuucagcaagcugaucaacaucaucaucugguuccugcuccuguccgugugccugggcagccucaucuacuccacggccgcgcuggggguccugaugagcaaccucggcaugccguccuacugcaccggguaccgcgagggcuaccugaacagcaccaacgugaccaucgccacguacugcaccggcuccauccccugcagcgugugccuguccgggcucgacagccuggacaccuaccccucccuggagaccauccagaucacgaucagcuccuucaagugggaccucaccgccuucggccuggucgccgagugguuccuggccuacauccucuucacccgguucuucuacgugcuggggcuggcggccaucaugcagcucuucuucagcuacuucgccgugcacuucaucuccaacagcuggcugauguggcugaucaucaaccugguccagauggcccccaucuccgcgauggugcgcauguacaucuucuucgccagcuucuacuacguguggaagagcuacguccacgugguggacggcugcaacuccagcaccugcaugaugugcuacaagcggaaccgcgccacgcgggucgagugcaccaccaucgugaacgggguccgccgguccuucuacguguacgccaacggcggcaagggguucugcaagcuccacaacuggaacugcgugaacugcgacaccuucugcgccggcagcacguucaucuccgacgaggucgcgcgcgaccugagccugcaguucaagcggccgaucaaccccaccgaccaguccagcuacaucguggacuccgugaccgucaagaacgggagcauccaccucuacuucgacaaggccggccagaagaccuacgagcgccacucccugagccacuucgugaaccuggacaaccuccgggccaacaacacgaaggggucccugcccaucaacgugaucgucuucgacggcaagagcaagugcgaggaguccagcgccaaguccgccagcguguacuacucccagcugaugugccagcccauccuccugcuggaccaggcgcucgugagcgacgucggcgacagcgccgagguggccgugaagauguucgacgccuacgucaacaccuucuccagcaccuucaacgugccgauggagaagcugaagacccugguggccacggcggaggccgagcucgccaagaacgucucccuggacaacgugcugagcaccuucaucuccgccgcgcgccagggguucguggacagcgacgucgagaccaaggacgugguggagugccucaagcuguccuaccagagcgacaucgaggucaccggcgacuccugcaacaacuacaugcugacguacaacaagguggagaacaugaccccccgggaccucggggccugcaucgacugcagcgcccgccacaucaacgcccagguggccaagucccacaacaucgcgcugaucuggaacgucaaggacuucaugagccuguccgagcagcuccggaagcagauccgcagcgccgccaagaagaacaaccugcccuucaagcugaccugcgccaccacgcgccagguggugaacgucgugaccaccaagaucgcccucaagggcggguga

SEQ ID NO: 18157 - RNA, 5841 nt, Artificial Sequence
  SARS-CoV-2__MT558681.1__non-structural protein 3 (NSP3) CDS gc
auggcccccaccaaggugaccuucggcgacgacacggucaucgaggugcagggguacaagagcgugaacaucaccuucgagcuggacgagcgcaucgacaagguccucaacgagaagugcuccgccuacaccguggagcugggcaccgaggugaacgaguucgcgugcgucguggccgacgccgugaucaagacgcugcagccggucagcgagcuccugaccccccuggggaucgaccucgacgagugguccauggccaccuacuaccuguucgacgagagcggcgaguucaagcuggccucccacauguacugcagcuucuacccccccgacgaggacgaggaggagggggacugcgaggaggaggaguucgagccguccacccaguacgaguacggcacggaggacgacuaccagggcaagccccucgaguucggggcgaccagcgccgcccugcagcccgaggaggagcaggaggaggacuggcuggacgacgacucccagcagaccgugggccagcaggacgggagcgaggacaaccagaccacgaccauccagaccaucguggagguccagccccagcucgagauggagcugaccccgguggugcagacgaucgaggucaacuccuucagcggcuaccugaagcucaccgacaacguguacaucaagaacgccgacaucguggaggaggcgaagaaggucaagcccaccgugguggucaacgccgccaacguguaccugaagcacgggggcggcguggccggggcccugaacaaggcgaccaacaacgccaugcaggucgaguccgacgacuacaucgccacgaacggcccccucaagguggggggcagcugcguccuguccggccacaaccuggccaagcacugccuccacgugguggggcccaacgucaacaagggcgaggacauccagcugcugaagagcgccuacgagaacuucaaccagcacgaggugcuccuggcgccgcugcucuccgccgggaucuucggcgccgaccccauccacagccugcgggugugcgucgacaccgugcgcaccaacguguaccuggccgucuucgacaagaaccucuacgacaagcugguguccagcuuccuggagaugaagagcgagaagcagguggagcagaagaucgccgagauccccaaggaggaggucaagcccuucaucaccgaguccaagccgagcguggagcagcggaagcaggacgacaagaagaucaaggcgugcguggaggaggucacgaccacccucgaggagaccaaguuccugacggagaaccugcuccuguacaucgacaucaacgggaaccugcaccccgacuccgccacccucgugagcgacaucgacaucaccuuccugaagaaggacgcccccuacaucgugggcgacgucgugcaggagggcgugcugaccgccgucgugauccccacgaagaaggccgggggcaccaccgagaugcucgcgaaggcccugcgcaaggugccgaccgacaacuacaucacgaccuaccccgggcagggccugaacggguacaccgucgaggaggccaagaccgugcucaagaagugcaaguccgccuucuacauccugcccagcaucaucuccaacgagaagcaggagauccugggcaccgugagcuggaaccuccgggagaugcuggcgcacgccgaggagacgcgcaagcugaugcccgucugcguggagaccaaggccaucguguccaccauccagcggaaguacaagggcaucaagauccaggagggggucguggacuacggcgcccgcuucuacuucuacaccagcaagacgaccguggccucccugaucaacacccucaacgaccugaacgagacccuggucacgaugccgcucggguacgugacccacggccugaaccuggaggaggcggcccgguacaugcgcagccucaaggugcccgccaccgucuccgugagcucccccgacgccgugaccgccuacaacggguaccugacgagcuccagcaagacccccgaggagcacuucaucgagaccaucucccuggcgggcagcuacaaggacuggagcuacuccggccagagcacccagcucgggaucgaguuccugaagcggggcgacaaguccgucuacuacacgagcaacccgaccaccuuccaccuggacggggaggugaucaccuucgacaaccucaagacgcugcugucccuccgcgaggugcggaccaucaaggucuucaccaccguggacaacaucaaccugcacacgcagguggucgacaugagcaugaccuacggccagcaguucggccccaccuaccuggacggggccgacgugaccaagaucaagccccacaacucccacgagggcaagacguucuacgugcucccgaacgacgacacccugcgcgucgaggccuucgaguacuaccacaccaccgaccccagcuuccuggggcgguacauguccgcccucaaccacacgaagaaguggaaguacccccaggugaacggccugaccagcaucaagugggccgacaacaacugcuaccuggcgaccgcccuccugacccugcagcagaucgagcucaaguucaaccccccggcccugcaggacgccuacuaccgcgcgcgggccggggaggccgccaacuucugcgcccugauccucgcguacugcaacaagacggugggcgagcugggcgacguccgcgagaccauguccuaccuguuccagcacgccaaccucgacagcugcaagcgggugcugaacgucgugugcaagaccugcgggcagcagcagaccacccugaagggcguggaggccgucauguacauggggacgcucuccuacgagcaguucaagaagggcgugcagauccccugcaccugcgggaagcaggccaccaaguaccuggugcagcaggagagccccuucgucaugauguccgcccccccggcgcaguacgagcugaagcacggcaccuucacgugcgccagcgaguacaccggcaacuaccagugcgggcacuacaagcacaucaccuccaaggagacccucuacugcaucgacggcgcccugcugacgaagagcagcgaguacaaggggcccaucaccgacguguucuacaaggagaacuccuacaccaccacgaucaagcccgugaccuacaagcucgacggcgucgugugcaccgagaucgaccccaagcuggacaacuacuacaagaaggacaacagcuacuucaccgagcagccgaucgaccuggugcccaaccagcccuaccccaacgccuccuucgacaacuucaaguucgucugcgacaacaucaaguucgccgacgaccucaaccagcugacgggguacaagaagccggcgagccgcgagcugaaggugaccuucuuccccgaccucaacggcgacguggucgccaucgacuacaagcacuacacccccuccuucaagaagggcgccaagcugcugcacaagcccaucguguggcacgugaacaacgccaccaacaaggcgacguacaagccgaacaccuggugcauccggugccucuggagcaccaagcccgucgagaccuccaacagcuucgacgugcugaaguccgaggacgcccaggggauggacaaccuggccugcgaggaccucaagcccgugagcgaggaggucguggagaaccccacgauccagaaggacgugcuggagugcaacgucaagaccaccgagguggugggcgacaucauccugaagccggccaacaacucccucaagaucaccgaggaggucgggcacacggaccugauggccgcguacguggacaacagcucccugaccaucaagaagcccaacgagcucagccgcgugcugggccugaagacccucgccaccuacgggcuggccgccgucaacuccgugcccugggacacgaucgccaacuacgcgaagccguuccugaacaagguggucagcaccaccaccaacaucgugacgcgcugccucaaccgggugugcaccaacuacaugcccuacuucuucacccugcugcuccagcugugcaccuucacccgcuccacgaacagccggaucaaggccuccaugcccaccaccaucgccaagaacaccgucaagagcgugggcaaguucugccuggaggccagcuucaacuaccucaagucccccaacuucagcaagcugaucaacaucaucaucugguuccugcuccuguccgugugccugggcagccucaucuacuccacggccgcgcuggggguccugaugagcaaccucggcaugccguccuacugcaccggguaccgcgagggcuaccugaacagcaccaacgugaccaucgccacguacugcaccggcuccauccccugcagcgugugccuguccgggcucgacagccuggacaccuaccccucccuggagaccauccagaucacgaucagcuccuucaagugggaccucaccgccuucggccuggucgccgagugguuccuggccuacauccucuucacccgguucuucuacgugcuggggcuggcggccaucaugcagcucuucuucagcuacuucgccgugcacuucaucuccaacagcuggcugauguggcugaucaucaaccugguccagauggcccccaucuccgcgauggugcgcauguacaucuucuucgccagcuucuacuacguguggaagagcuacguccacgugguggacggcugcaacuccagcaccugcaugaugugcuacaagcggaaccgcgccacgcgggucgagugcaccaccaucgugaacgggguccgccgguccuucuacguguacgccaacggcggcaagggguucugcaagcuccacaacuggaacugcgugaacugcgacaccuucugcgccggcagcacguucaucuccgacgaggucgcgcgcgaccugagccugcaguucaagcggccgaucaaccccaccgaccaguccagcuacaucguggacuccgugaccgucaagaacgggagcauccaccucuacuucgacaaggccggccagaagaccuacgagcgccacucccugagccacuucgugaaccuggacaaccuccgggccaacaacacgaaggggucccugcccaucaacgugaucgucuucgacggcaagagcaagugcgaggaguccagcgccaaguccgccagcguguacuacucccagcugaugugccagcccauccuccugcuggaccaggcgcucgugagcgacgucggcgacagcgccgagguggccgugaagauguucgacgccuacgucaacaccuucuccagcaccuucaacgugccgauggagaagcugaagacccugguggccacggcggaggccgagcucgccaagaacgucucccuggacaacgugcugagcaccuucaucuccgccgcgcgccagggguucguggacagcgacgucgagaccaaggacgugguggagugccucaagcugucccaccagagcgacaucgaggucaccggcgacuccugcaacaacuacaugcugacguacaacaagguggagaacaugaccccccgggaccucggggccugcaucgacugcagcgcccgccacaucaacgcccagguggccaagucccacaacaucgcgcugaucuggaacgucaaggacuucaugagccuguccgagcagcuccggaagcagauccgcagcgccgccaagaagaacaaccugcccuucaagcugaccugcgccaccacgcgccagguggugaacgucgugaccaccaagaucgcccucaagggcggguga

SEQ ID NO: 18158 - RNA, 5841 nt, Artificial Sequence
  SARS-CoV-2__MT539166.1__non-structural protein 3 (NSP3) CDS gc
auggcccccaccaaggugaccuucggcgacgacacggucaucgaggugcagggguacaagagcgugaacaucaccuucgagcuggacgagcgcaucgacaagguccucaacgagaagugcuccgccuacaccguggagcugggcaccgaggugaacgaguucgcgugcgucguggccgacgccgugaucaagacgcugcagccggucagcgagcuccugaccccccuggggaucgaccucgacgagugguccauggccaccuacuaccuguucgacgagagcggcgaguucaagcuggccucccacauguacugcagcuucuacccccccgacgaggacgaggaggagggggacugcgaggaggaggaguucgagccguccacccaguacgaguacggcacggaggacgacuaccagggcaagccccucgaguucggggcgaccagcgccgcccugcagcccgaggaggagcaggaggaggacuggcuggacgacgacucccagcagaccgugggccagcaggacgggagcgaggacaaccagaccacgaccauccagaccaucguggagguccagccccagcucgagauggagcugaccccgguggugcagacgaucgaggucaacuccuucagcggcuaccugaagcucaccgggaacguguacaucaagaacgccgacaucguggaggaggcgaagaaggucaagcccaccgugguggucaacgccgccaacguguaccugaagcacggcggcgggguggccggcgcccugaacaaggcgaccaacaacgccaugcaggucgaguccgacgacuacaucgccacgaacgggccccucaaggugggcggcagcugcguccuguccgggcacaaccuggccaagcacugccuccacguggugggccccaacgucaacaagggggaggacauccagcugcugaagagcgccuacgagaacuucaaccagcacgaggugcuccuggcgccgcugcucuccgccggcaucuucggggccgaccccauccacagccugcgggugugcgucgacaccgugcgcaccaacguguaccuggccgucuucgacaagaaccucuacgacaagcugguguccagcuuccuggagaugaagagcgagaagcagguggagcagaagaucgccgagauccccaaggaggaggucaagcccuucaucaccgaguccaagccgagcguggagcagcggaagcaggacgacaagaagaucaaggcgugcguggaggaggucacgaccacccucgaggagaccaaguuccugacggagaaccugcuccuguacaucgacaucaacggcaaccugcaccccgacuccgccacccucgugagcgacaucgacaucaccuuccugaagaaggacgcccccuacaucgugggcgacgucgugcaggagggggugcugaccgccgucgugauccccacgaagaaggccggcgggaccaccgagaugcucgcgaaggcccugcgcaaggugccgaccgacaacuacaucacgaccuaccccggccaggggcugaacggcuacaccgucgaggaggccaagaccgugcucaagaagugcaaguccgccuucuacauccugcccagcaucaucuccaacgagaagcaggagauccugggcaccgugagcuggaaccuccgggagaugcuggcgcacgccgaggagacgcgcaagcugaugcccgucugcguggagaccaaggccaucguguccaccauccagcggaaguacaaggggaucaagauccaggagggcgucguggacuacggggcccgcuucuacuucuacaccagcaagacgaccguggccucccugaucaacacccucaacgaccugaacgagacccuggucacgaugccgcucggcuacgugacccacgggcugaaccuggaggaggcggcccgguacaugcgcagccucaaggugcccgccaccgucuccgugagcucccccgacgccgugaccgccuacaacggcuaccugacgagcuccagcaagacccccgaggagcacuucaucgagaccaucucccuggcgggcagcuacaaggacuggagcuacuccgggcagagcacccagcucggcaucgaguuccugaagcggggggacaaguccgucuacuacacgagcaacccgaccaccuuccaccuggacggcgaggugaucaccuucgacaaccucaagacgcugcugucccuccgcgaggugcggaccaucaaggucuucaccaccguggacaacaucaaccugcacacgcagguggucgacaugagcaugaccuacggccagcaguucgggcccaccuaccuggacggcgccgacgugaccaagaucaagccccacaacucccacgaggggaagacguucuacgugcucccgaacgacgacacccugcgcgucgaggccuucgaguacuaccacaccaccgaccccagcuuccugggccgguacauguccgcccucaaccacacgaagaaguggaaguacccccaggugaacgggcugaccagcaucaagugggccgacaacaacugcuaccuggcgaccgcccuccugacccugcagcagaucgagcucaaguucaaccccccggcccugcaggacgccuacuaccgcgcgcgggccggcgaggccgccaacuucugcgcccugauccucgcguacugcaacaagacggugggcgagcugggggacguccgcgagaccauguccuaccuguuccagcacgccaaccucgacagcugcaagcgggugcugaacgucgugugcaagaccugcggccagcagcagaccacccugaaggggguggaggccgucauguacaugggcacgcucuccuacgagcaguucaagaagggggugcagauccccugcaccugcggcaagcaggccaccaaguaccuggugcagcaggagagccccuucgucaugauguccgcccccccggcgcaguacgagcugaagcacggcaccuucacgugcgccagcgaguacaccgggaacuaccagugcggccacuacaagcacaucaccuccaaggagacccucuacugcaucgacggggcccugcugacgaagagcagcgaguacaagggccccaucaccgacguguucuacaaggagaacuccuacaccaccacgaucaagcccgugaccuacaagcucgacggggucgugugcaccgagaucgaccccaagcuggacaacuacuacaagaaggacaacagcuacuucaccgagcagccgaucgaccuggugcccaaccagcccuaccccaacgccuccuucgacaacuucaaguucgucugcgacaacaucaaguucgccgacgaccucaaccagcugacgggcuacaagaagccggcgagccgcgagcugaaggugaccuucuuccccgaccucaacggcgacguggucgccaucgacuacaagcacuacacccccuccuucaagaagggggccaagcugcugcacaagcccaucguguggcacgugaacaacgccaccaacaaggcgacguacaagccgaacaccuggugcauccggugccucuggagcaccaagcccgucgagaccuccaacagcuucgacgugcugaaguccgaggacgcccagggcauggacaaccuggccugcgaggaccucaagcccgugagcgaggaggucguggagaaccccacgauccagaaggacgugcuggagugcaacgucaagaccaccgagguggugggggacaucauccugaagccggccaacaacucccucaagaucaccgaggaggucggccacacggaccugauggccgcguacguggacaacagcucccugaccaucaagaagcccaacgagcucagccgcgugcuggggcugaagacccucgccacccacggccuggccgccgucaacuccgugcccugggacacgaucgccaacuacgcgaagccguuccugaacaagguggucagcaccaccaccaacaucgugacgcgcugccucaaccgggugugcaccaacuacaugcccuacuucuucacccugcugcuccagcugugcaccuucacccgcuccacgaacagccggaucaaggccuccaugcccaccaccaucgccaagaacaccgucaagagcgugggcaaguucugccuggaggccagcuucaacuaccucaagucccccaacuucagcaagcugaucaacaucaucaucugguuccugcuccuguccgugugccuggggagccucaucuacuccacggccgcgcugggcguccugaugagcaaccucgggaugccguccuacugcaccggcuaccgcgagggcuaccugaacagcaccaacgugaccaucgccacguacugcaccggguccauccccugcagcgugugccuguccggccucgacagccuggacaccuaccccucccuggagaccauccagaucacgaucagcuccuucaagugggaccucaccgccuucgggcuggucgccgagugguuccuggccuacauccucuucacccgguucuucuacgugcugggccuggcggccaucaugcagcucuucuucagcuacuucgccgugcacuucaucuccaacagcuggcugauguggcugaucaucaaccugguccagauggcccccaucuccgcgauggugcgcauguacaucuucuucgccagcuucuacuacguguggaagagcuacguccacgugguggacgggugcaacuccagcaccugcaugaugugcuacaagcggaaccgcgccacgcgggucgagugcaccaccaucgugaacggcguccgccgguccuucuacguguacgccaacggcgggaagggcuucugcaagcuccacaacuggaacugcgugaacugcgacaccuucugcgccgggagcacguucaucuccgacgaggucgcgcgcgaccugagccugcaguucaagcggccgaucaaccccaccgaccaguccagcuacaucguggacuccgugaccgucaagaacggcagcauccaccucuacuucgacaaggccgggcagaagaccuacgagcgccacucccugagccacuucgugaaccuggacaaccuccgggccaacaacacgaagggcucccugcccaucaacgugaucgucuucgacggcaagagcaagugcgaggaguccagcgccaaguccgccagcguguacuacucccagcugaugugccagcccauccuccugcuggaccaggcgcucgugagcgacgucggggacagcgccgagguggccgugaagauguucgacgccuacgucaacaccuucuccagcaccuucaacgugccgauggagaagcugaagacccugguggccacggcggaggccgagcucgccaagaacgucucccuggacaacgugcugagcaccuucaucuccgccgcgcgccagggcuucguggacagcgacgucgagaccaaggacgugguggagugccucaagcugucccaccagagcgacaucgaggucaccggggacuccugcaacaacuacaugcugacguacaacaagguggagaacaugaccccccgggaccucggcgccugcaucgacugcagcgcccgccacaucaacgcccagguggccaagucccacaacaucgcgcugaucuggaacgucaaggacuucaugagccuguccgagcagcuccggaagcagauccgcagcgccgccaagaagaacaaccugcccuucaagcugaccugcgccaccacgcgccagguggugaacgucgugaccaccaagaucgcccucaaggggggcuga

SEQ ID NO: 18159 - RNA, 5841 nt, Artificial Sequence
  SARS-CoV-2__MT407653.1__non-structural protein 3 (NSP3) CDS gc
auggcccccaccaaggugaccuucggcgacgacacggucaucgaggugcagggguacaagagcgugaacaucaccuucgagcuggacgagcgcaucgacaagguccucaacgagaagugcuccgccuacaccguggagcugggcaccgaggugaacgaguucgcgugcgucguggccgacgccgugaucaagacgcugcagccggucagcgagcuccugaccccccuggggaucgaccucgacgagugguccauggccaccuacuaccuguucgacgagagcggcgaguucaagcuggccucccacauguacugcagcuucuacccccccgacgaggacgaggaggagggggacugcgaggaggaggaguucgagccguccacccaguacgaguacggcacggaggacgacuaccagggcaagccccucgaguucggggcgaccagcgccgcccugcagcccgaggaggagcaggaggaggacuggcuggacgacgacucccagcagaccgugggccagcaggacgggagcgaggacaaccagaccacgaccauccagaccaucguggagguccagccccagcucgagauggagcugaccccgguggugcagacgaucgaggucaacuccuucagcggcuaccugaagcucaccgacaacgugcacaucaagaacgccgacaucguggaggaggcgaagaaggucaagcccaccgugguggucaacgccgccaacguguaccugaagcacgggggcggcguggccggggcccugaacaaggcgaccaacaacgccaugcaggucgaguccgacgacuacaucgccacgaacggcccccucaagguggggggcagcugcguccuguccggccacaaccuggccaagcacugccuccacgugguggggcccaacgucaacaagggcgaggacauccagcugcugaagagcgccuacgagaacuucaaccagcacgaggugcuccuggcgccgcugcucuccgccgggaucuucggcgccgaccccauccacagccugcgggugugcgucgacaccgugcgcaccaacguguaccuggccgucuucgacaagaaccucuacgacaagcugguguccagcuuccuggagaugaagagcgagaagcagguggagcagaagaucgccgagauccccaaggaggaggucaagcccuucaucaccgaguccaagccgagcguggagcagcggaagcaggacgacaagaagaucaaggcgugcguggaggaggucacgaccacccucgaggagaccaaguuccugacggagaaccugcuccuguacaucgacaucaacgggaaccugcaccccgacuccgccacccucgugagcgacaucgacaucaccuuccugaagaaggacgcccccuacaucgugggcgacgucgugcaggagggcgugcugaccgccgucgugauccccacgaagaaggccgggggcaccaccgagaugcucgcgaaggcccugcgcaaggugccgaccgacaacuacaucacgaccuaccccgggcagggccugaacggguacaccgucgaggaggccaagaccgugcucaagaagugcaaguccgccuucuacauccugcccagcaucaucuccaacgagaagcaggagauccugggcaccgugagcuggaaccuccgggagaugcuggcgcacgccgaggagacgcgcaagcugaugcccgucugcguggagaccaaggccaucguguccaccauccagcggaaguacaagggcaucaagauccaggagggggucguggacuacggcgcccgcuucuacuucuacaccagcaagacgaccguggccucccugaucaacacccucaacgaccugaacgagacccuggucacgaugccgcucggguacgugacccacggccugaaccuggaggaggcggcccgguacaugcgcagccucaaggugcccgccaccgucuccgugagcucccccgacgccgugaccgccuacaacggguaccugacgagcuccagcaagacccccgaggagcacuucaucgagaccaucucccuggcgggcagcuacaaggacuggagcuacuccggccagagcacccagcucgggaucgaguuccugaagcggggcgacaaguccgucuacuacacgagcaacccgaccaccuuccaccuggacggggaggugaucaccuucgacaaccucaagacgcugcugucccuccgcgaggugcggaccaucaaggucuucaccaccguggacaacaucaaccugcacacgcagguggucgacaugagcaugaccuacggccagcaguucggccccaccuaccuggacggggccgacgugaccaagaucaagccccacaacucccacgagggcaagacguucuacgugcucccgaacgacgacacccugcgcgucgaggccuucgaguacuaccacaccaccgaccccagcuuccuggggcgguacauguccgcccucaaccacacgaagaaguggaaguacccccaggugaacggccugaccagcaucaagugggccgacaacaacugcuaccuggcgaccgcccuccugacccugcagcagaucgagcucaaguucaaccccccggcccugcaggacgccuacuaccgcgcgcgggccggggaggccgccaacuucugcgcccugauccucgcguacugcaacaagacggugggcgagcugggcgacguccgcgagaccauguccuaccuguuccagcacgccaaccucgacagcugcaagcgggugcugaacgucgugugcaagaccugcgggcagcagcagaccacccugaagggcguggaggccgucauguacauggggacgcucuccuacgagcaguucaagaagggcgugcagauccccugcaccugcgggaagcaggccaccaaguaccuggugcagcaggagagccccuucgucaugauguccgcccccccggcgcaguacgagcugaagcacggcaccuucacgugcgccagcgaguacaccggcaacuaccagugcgggcacuacaagcacaucaccuccaaggagacccucuacugcaucgacggcgcccugcugacgaagagcagcgaguacaaggggcccaucaccgacguguucuacaaggagaacuccuacaccaccacgaucaagcccgugaccuacaagcucgacggcgucgugugcaccgagaucgaccccaagcuggacaacuacuacaagaaggacaacagcuacuucaccgagcagccgaucgaccuggugcccaaccagcccuaccccaacgccuccuucgacaacuucaaguucgucugcgacaacaucaaguucgccgacgaccucaaccagcugacgggguacaagaagccggcgagccgcgagcugaaggugaccuucuuccccgaccucaacggcgacguggucgccaucgacuacaagcacuacacccccuccuucaagaagggcgccaagcugcugcacaagcccaucguguggcacgugaacaacgccaccaacaaggcgacguacaagccgaacaccuggugcauccggugccucuggagcaccaagcccgucgagaccuccaacagcuucgacgugcugaaguccgaggacgcccaggggauggacaaccuggccugcgaggaccucaagcccgugagcgaggaggucguggagaaccccacgauccagaaggacgugcuggagugcaacgucaagaccaccgagguggugggcgacaucauccugaagccggccaacaacucccucaagaucaccgaggaggucgggcacacggaccugauggccgcguacguggacaacagcucccugaccaucaagaagcccaacgagcucagccgcgugcugggccugaagacccucgccacccacgggcuggccgccgucaacuccgugcccugggacacgaucgccaacuacgcgaagccguuccugaacaagguggucagcaccaccaccaacaucgugacgcgcugccucaaccgggugugcaccaacuacaugcccuacuucuucacccugcugcuccagcugugcaccuucacccgcuccacgaacagccggaucaaggccuccaugcccaccaccaucgccaagaacaccgucaagagcgugggcaaguucugccuggaggccagcuucaacuaccucaagucccccaacuucagcaagcugaucaacaucaucaucugguuccugcuccuguccgugugccugggcagccucaucuacuccacggccgcgcuggggguccugaugagcaaccucggcaugccguccuacugcaccggguaccgcgagggcuaccugaacagcaccaacgugaccaucgccacguacugcaccggcuccauccccugcagcgugugccuguccgggcucgacagccuggacaccuaccccucccuggagaccauccagaucacgaucagcuccuucaagugggaccucaccgccuucggccuggucgccgagugguuccuggccuacauccucuucacccgguucuucuacgugcuggggcuggcggccaucaugcagcucuucuucagcuacuucgccgugcacuucaucuccaacagcuggcugauguggcugaucaucaaccugguccagauggcccccaucuccgcgauggugcgcauguacaucuucuucgccagcuucuacuacguguggaagagcuacguccacgugguggacggcugcaacuccagcaccugcaugaugugcuacaagcggaaccgcgccacgcgggucgagugcaccaccaucgugaacgggguccgccgguccuucuacguguacgccaacggcggcaagggguucugcaagcuccacaacuggaacugcgugaacugcgacaccuucugcgccggcagcacguucaucuccgacgaggucgcgcgcgaccugagccugcaguucaagcggccgaucaaccccaccgaccaguccagcuacaucguggacuccgugaccgucaagaacgggagcauccaccucuacuucgacaaggccggccagaagaccuacgagcgccacucccugagccacuucgugaaccuggacaaccuccgggccaacaacacgaaggggucccugcccaucaacgugaucgucuucgacggcaagagcaagugcgaggaguccagcgccaaguccgccagcguguacuacucccagcugaugugccagcccauccuccugcuggaccaggcgcucgugagcgacgucggcgacagcgccgagguggccgugaagauguucgacgccuacgucaacaccuucuccagcaccuucaacgugccgauggagaagcugaagacccugguggccacggcggaggccgagcucgccaagaacgucucccuggacaacgugcugagcaccuucaucuccgccgcgcgccagggguucguggacagcgacgucgagaccaaggacgugguggagugccucaagcugucccaccagagcgacaucgaggucaccggcgacuccugcaacaacuacaugcugacguacaacaagguggagaacaugaccccccgggaccucggggccugcaucgacugcagcgcccgccacaucaacgcccagguggccaagucccacaacaucgcgcugaucuggaacgucaaggacuucaugagccuguccgagcagcuccggaagcagauccgcagcgccgccaagaagaacaaccugcccuucaagcugaccugcgccaccacgcgccagguggugaacgucgugaccaccaagaucgcccucaagggcggguga

SEQ ID NO: 18160 - RNA, 5841 nt, Artificial Sequence
  SARS-CoV-2__MT534313.1__non-structural protein 3 (NSP3) CDS gc
auggcccccaccaaggugaccuucggcgacgacacggucaucgaggugcagggguacaagagcgugaacaucaccuucgagcuggacgagcgcaucgacaagguccucaacgagaagugcuccgccuacaccguggagcugggcaccgaggugaacgaguucgcgugcgucguggccgacgccgugaucaagacgcugcagccggucagcgagcuccugaccccccuggggaucgaccucgacgagugguccauggccaccuacuaccuguucgacgagagcggcgaguucaagcuggccucccacauguacugcagcuucuacccccccgacgaggacgaggaggagggggacugcgaggaggaggaguucgagccguccacccaguacgaguacggcacggaggacgacuaccagggccggccccucgaguucggggcgaccagcgccgcccugcagcccgaggaggagcaggaggaggacuggcuggacgacgacucccagcagaccgugggccagcaggacgggagcgaggacaaccagaccacgaccauccagaccaucguggagguccagccccagcucgagauggagcugaccccgguggugcagacgaucgaggucaacuccuucagcggcuaccugaagcucaccgacaacguguacaucaagaacgccgacaucguggaggaggcgaagaaggucaagcccaccgugguggucaacgccgccaacguguaccugaagcacgggggcggcguggccggggcccugaacaaggcgaccaacaacgccaugcaggucgaguccgacgacuacaucgccacgaacggcccccucaagguggggggcagcugcguccuguccggccacaaccuggccaagcacugccuccacgugguggggcccaacgucaacaagggcgaggacauccagcugcugaagagcgccuacgagaacuucaaccagcacgaggugcuccuggcgccgcugcucuccgccgggaucuucggcgccgaccccauccacagccugcgcgugugcgucgacaccgugcggaccaacguguaccuggccgucuucgacaagaaccucuacgacaagcugguguccagcuuccuggagaugaagagcgagaagcagguggagcagaagaucgccgagauccccaaggaggaggucaagcccuucaucaccgaguccaagccgagcguggagcagcgcaagcaggacgacaagaagaucaaggcgugcguggaggaggucacgaccacccucgaggagaccaaguuccugacggagaaccugcuccuguacaucgacaucaacgggaaccugcaccccgacuccgccacccucgugagcgacaucgacaucaccuuccugaagaaggacgcccccuacaucgugggcgacgucgugcaggagggcgugcugaccgccgucgugauccccacgaagaaggccgggggcaccaccgagaugcucgcgaaggcccugcggaaggugccgaccgacaacuacaucacgaccuaccccgggcagggccugaacggguacaccgucgaggaggccaagaccgugcucaagaagugcaaguccgccuucuacauccugcccagcaucaucuccaacgagaagcaggagauccugggcaccgugagcuggaaccuccgcgagaugcuggcgcacgccgaggagacgcggaagcugaugcccgucugcguggagaccaaggccaucguguccaccauccagcgcaaguacaagggcaucaagauccaggagggggucguggacuacggcgcccgguucuacuucuacaccagcaagacgaccguggccucccugaucaacacccucaacgaccugaacgagacccuggucacgaugccgcucggguacgugacccacggccugaaccuggaggaggcggcccgcuacaugcggagccucaaggugcccgccaccgucuccgugagcucccccgacgccgugaccgccuacaacggguaccugacgagcuccagcaagacccccgaggagcacuucaucgagaccaucucccuggcgggcagcuacaaggacuggagcuacuccggccagagcacccagcucgggaucgaguuccugaagcgcggcgacaaguccgucuacuacacgagcaacccgaccaccuuccaccuggacggggaggugaucaccuucgacaaccucaagacgcugcugucccuccgggaggugcgcaccaucaaggucuucaccaccguggacaacaucaaccugcacacgcagguggucgacaugagcaugaccuacggccagcaguucggccccaccuaccuggacggggccgacgugaccaagaucaagccccacaacucccacgagggcaagacguucuacgugcucccgaacgacgacacccugcgggucgaggccuucgaguacuaccacaccaccgaccccagcuuccuggggcgcuacauguccgcccucaaccacacgaagaaguggaaguacccccaggugaacggccugaccagcaucaagugggccgacaacaacugcuaccuggcgaccgcccuccugacccugcagcagaucgagcucaaguucaaccccccggcccugcaggacgccuacuaccgggcgcgcgccggggaggccgccaacuucugcgcccugauccucgcguacugcaacaagacggugggcgagcugggcgacguccgggagaccauguccuaccuguuccagcacgccaaccucgacagcugcaagcgcgugcugaacgucgugugcaagaccugcgggcagcagcagaccacccugaagggcguggaggccgucauguacauggggacgcucuccuacgagcaguucaagaagggcgugcagauccccugcaccugcgggaagcaggccaccaaguaccuggugcagcaggagagccccuucgucaugauguccgcccccccggcgcaguacgagcugaagcacggcaccuucacgugcgccagcgaguacaccggcaacuaccagugcgggcacuacaagcacaucaccuccaaggagacccucuacugcaucgacggcgcccugcugacgaagagcagcgaguacaaggggcccaucaccgacguguucuacaaggagaacuccuacaccaccacgaucaagcccgugaccuacaagcucgacggcgucgugugcaccgagaucgaccccaagcuggacaacuacuacaagaaggacaacagcuacuucaccgagcagccgaucgaccuggugcccaaccagcccuaccccaacgccuccuucgacaacuucaaguucgucugcgacaacaucaaguucgccgacgaccucaaccagcugacgggguacaagaagccggcgagccgggagcugaaggugaccuucuuccccgaccucaacggcgacguggucgccaucgacuacaagcacuacacccccuccuucaagaagggcgccaagcugcugcacaagcccaucguguggcacgugaacaacgccaccaacaaggcgacguacaagccgaacaccuggugcauccgcugccucuggagcaccaagcccgucgagaccuccaacagcuucgacgugcugaaguccgaggacgcccaggggauggacaaccuggccugcgaggaccucaagcccgugagcgaggaggucguggagaaccccacgauccagaaggacgugcuggagugcaacgucaagaccaccgagguggugggcgacaucauccugaagccggccaacaacucccucaagaucaccgaggaggucgggcacacggaccugauggccgcguacguggacaacagcucccugaccaucaagaagcccaacgagcucagccgcgugcugggccugaagacccucgccacccacgggcuggccgccgucaacuccgugcccugggacacgaucgccaacuacgcgaagccguuccugaacaagguggucagcaccaccaccaacaucgugacgcggugccucaaccgcgugugcaccaacuacaugcccuacuucuucacccugcugcuccagcugugcaccuucacccgguccacgaacagccgcaucaaggccuccaugcccaccaccaucgccaagaacaccgucaagagcgugggcaaguucugccuggaggccagcuucaacuaccucaagucccccaacuucagcaagcugaucaacaucaucaucugguuccugcuccuguccgugugccugggcagccucaucuacuccacggccgcgcuggggguccugaugagcaaccucggcaugccguccuacugcaccggguaccgggagggcuaccugaacagcaccaacgugaccaucgccacguacugcaccggcuccauccccugcagcgugugccuguccgggcucgacagccuggacaccuaccccucccuggagaccauccagaucacgaucagcuccuucaagugggaccucaccgccuucggccuggucgccgagugguuccuggccuacauccucuucacccgcuucuucuacgugcuggggcuggcggccaucaugcagcucuucuucagcuacuucgccgugcacuucaucuccaacagcuggcugauguggcugaucaucaaccugguccagauggcccccaucuccgcgauggugcggauguacaucuucuucgccagcuucuacuacguguggaagagcuacguccacgugguggacggcugcaacuccagcaccugcaugaugugcuacaagcgcaaccgggccacgcgcgucgagugcaccaccaucgugaacgggguccggcgcuccuucuacguguacgccaacggcggcaagggguucugcaagcuccacaacuggaacugcgugaacugcgacaccuucugcgccggcagcacguucaucuccgacgaggucgcgcgggaccugagccugcaguucaagcgcccgaucaaccccaccgaccaguccagcuacaucguggacuccgugaccgucaagaacgggagcauccaccucuacuucgacaaggccggccagaagaccuacgagcggcacucccugagccacuucgugaaccuggacaaccuccgcgccaacaacacgaaggggucccugcccaucaacgugaucgucuucgacggcaagagcaagugcgaggaguccagcgccaaguccgccagcguguacuacucccagcugaugugccagcccauccuccugcuggaccaggcgcucgugagcgacgucggcgacagcgccgagguggccgugaagauguucgacgccuacgucaacaccuucuccagcaccuucaacgugccgauggagaagcugaagacccugguggccacggcggaggccgagcucgccaagaacgucucccuggacaacgugcugagcaccuucaucuccgccgcgcggcagggguucguggacagcgacgucgagaccaaggacgugguggagugccucaagcugucccaccagagcgacaucgaggucaccggcgacuccugcaacaacuacaugcugacguacaacaagguggagaacaugaccccccgcgaccucggggccugcaucgacugcagcgcccggcacaucaacgcccagguggccaagucccacaacaucgcgcugaucuggaacgucaaggacuucaugagccuguccgagcagcuccgcaagcagauccgcagcgccgccaagaagaacaaccugcccuucaagcugaccugcgccaccacgcggcagguggugaacgucgugaccaccaagaucgcccucaagggcggguga

SEQ ID NO: 18161 - RNA, 5841 nt, Artificial Sequence
  SARS-CoV-2__MT536961.1__non-structural protein 3 (NSP3) CDS gc
auggcccccaccaaggugaccuucggcgacgacacggucaucgaggugcagggguacaagagcgugaacaucaccuucgagcuggacgagcgcaucgacaagguccucaacgagaagugcuccgccuacaccguggagcugggcaccgaggugaacgaguucgcgugcgucguggccgacgccgugaucaagacgcugcagccggucagcgagcuccugaccccccuggggaucgaccucgacgagugguccauggccaccuacuaccuguucgacgagagcggcgaguucaagcuggccucccacauguacugcagcuucuacccccccgacgaggacgaggaggagggggacugcgaggaggaggaguucgagccguccacccaguacgaguacggcacggaggacgacuaccagggcaagccccucgaguucggggcgaccagcgccgcccugcagcccgaggaggagcaggaggaggacuggcuggacgacgacucccagcagaccgugggccagcaggacgggagcgaggacaaccagaccacgaccauccagaccaucguggagguccagccccagcucgagauggagcugaccccgguggugcagacgaucgaggucaacuccuucagcggcuaccugaagcucaccgacaacguguacaucaagaacgccgacaucguggaggaggcgaagaaggucaagcccaccgugguggucaacgccgccaacguguaccugaagcacgggggcggcguggccggggcccugaacaaggcgaccaacaacgccaugcaggucgaguccgacgacuacaucgccacgaacggcccccucaagguggggggcagcugcguccuguccggccacaaccuggccaagcacugccuccacgugguggggcccaacgucaacaagggcgaggacauccagcugcugaagagcgccuacgagaacuucaaccagcacgaggugcuccuggcgccgcugcucuccgccgggaucuucggcgccgaccccauccacagccugcgggugugcgucgacaccgugcgcaccaacguguaccuggccgucuucgacaagaaccucuacgacaagcugguguccagcuuccuggagaugaagagcgagaagcagguggagcagaagaucgccgagauccccaaggaggaggucaagcccuucaucaccgaguccaagccgagcguggagcagcggaagcaggacgacaagaagaucaaggcgugcguggaggaggucacgaccacccucgaggagaccaaguuccugacggagaaccugcuccuguacaucgacaucaacgggaaccugcaccccgacuccgccacccucgugagcgacaucgacaucaccuuccugaagaaggacgcccccuacaucgugggcgacgucgugcaggagggcgugcugaccgccgucgugauccccacgaagaaggccgggggcaccaccgagaugcucgcgaaggcccugcgcaaggugccgaccgacaacuacaucacgaccuaccccgggcagggccugaacggguacaccgucgaggaggccaagaccgugcucaagaagugcaaguccgccuucuacauccugcccagcaucaucuccaacgagaagcaggagauccugggcaccgugagcuggaaccuccgggagaugcuggcgcacgccgaggagacgcgcaagcugaugcccgucugcguggagaccaaggccaucguguccaccauccagcggaaguacaagggcaucaagauccaggagggggucguggacuacggcgcccgcuucuacuucuacaccagcaagacgaccguggccucccugaucaacacccucaacgaccugaacgagacccuggucacgaugccgcucggguacgugacccacggccugaaccuggaggaggcggcccgguacaugcgcagccucaaggugcccgccaccgucuccgugagcucccccgacgccgugaccgccuacaacggguaccugacgagcuccagcaagacccccgaggagcacuucaucgagaccaucucccuggcgggcagcuacaaggacuggagcuacuccggccagagcacccagcucgggaucgaguuccugaagcggggcgacaaguccgucuacuacacgagcaacccgaccaccuuccaccuggacggggaggugaucaccuucgacaaccucaagacgcugcugucccuccgcgaggugcggaccaucaaggucuucaccaccguggacaacaucaaccugcacacgcagguggucgacaugagcaugaccuacggccagcaguucggccccaccuaccuggacggggccgacgugaccaagaucaagccccacaacucccacgagggcaagacguucuacgugcucccgaacgacgacacccugcgcgucgaggccuucgaguacuaccacaccaccgaccccagcuuccuggggcgguacauguccgcccucaaccacacgaagaaguggaaguacccccaggugaacggccugaccagcaucaagugggccgacaacaacugcuaccuggcgaccgcccuccugacccugcagcagaucgagcucaaguucaaccccccggcccugcaggacgccuacuaccgcgcgcgggccggggaggccgccaacuucugcgcccugauccucgcguacugcaacaagacggugggcgagcugggcgacguccgcgagaccauguccuaccuguuccagcacgccaaccucgacagcugcaagcgggugcugaacgucgugugcaagaccugcgggcagcagcagaccacccugaagggcguggaggccgucauguacauggggacgcucuccuacgagcaguucaagaagggcgugcagauccccugcaccugcgggaagcaggccaccaaguaccuggugcagcaggagagccccuucgucaugauguccgcccccccggcgcaguacgagcugaagcacggcaccuucacgugcgccagcgaguacaccggcaacuaccagugcgggcacuacaagcacaucaccuccaaggagacccucuacugcaucgacggcgcccugcugacgaagagcagcgaguacaaggggcccaucaccgacguguucuacaaggagaacuccuacaccaccacgaucaagcccgugaccuacaagcucgacggcgucgugugcaccgagaucgaccccaagcuggacaacuacuacaagaaggacaacagcuacuucaccgagcagccgaucgaccuggugcccaaccagcccuaccccaacgccuccuucgacaacuucaaguucgucugcgacaacaucaaguucgccgacgaccucaaccagcugacgggguacaagaagccggcgagccgcgagcugaaggugaccuucuuccccgaccucaacggcgacguggucgccaucgacuacaagcacuacacccccuccuucaagaagggcgccaagcugcugcacaagcccaucguguggcacgugaacaacgccaccaacaaggcgacguacaagccgaacaccuggugcauccggugccucuggagcaccaagcccgucgagaccuccaacagcuucgacgugcugaaguccgaggacgcccaggggauggacaaccuggccugcgaggaccucaagcccgugagcgaggaggucguggagaaccccacgauccagaaggacgugcuggagugcaacgucaagaccaccgagguggugggcgacaucauccugaagccggccaacaaccgccucaagaucaccgaggaggucgggcacacggaccugauggccgcguacguggacaacuccagccugaccaucaagaagcccaacgagcucucccgcgugcugggccugaagacccucgccacccacgggcuggccgccgucaacagcgugcccugggacacgaucgccaacuacgcgaagccguuccugaacaagguggucuccaccaccaccaacaucgugacgcggugccucaaccgcgugugcaccaacuacaugcccuacuucuucacccugcugcuccagcugugcaccuucacccggagcacgaacucccgcaucaaggccagcaugcccaccaccaucgccaagaacaccgucaaguccgugggcaaguucugccuggaggccagcuucaacuaccucaagagccccaacuucuccaagcugaucaacaucaucaucugguuccugcuccugagcgugugccugggcucccucaucuacagcacggccgcgcuggggguccugauguccaaccucggcaugccgagcuacugcaccggguaccgggagggcuaccugaacuccaccaacgugaccaucgccacguacugcaccggcagcauccccugcuccgugugccugagcgggcucgacucccuggacaccuaccccagccuggagaccauccagaucacgaucuccagcuucaagugggaccucaccgccuucggccuggucgccgagugguuccuggccuacauccucuucacccgcuucuucuacgugcuggggcuggcggccaucaugcagcucuucuucuccuacuucgccgugcacuucaucagcaacuccuggcugauguggcugaucaucaaccugguccagauggcccccaucagcgcgauggugcggauguacaucuucuucgccuccuucuacuacguguggaagagcuacguccacgugguggacggcugcaacagcuccaccugcaugaugugcuacaagcgcaaccgggccacgcgcgucgagugcaccaccaucgugaacgggguccggcgcagcuucuacguguacgccaacggcggcaagggguucugcaagcuccacaacuggaacugcgugaacugcgacaccuucugcgccggcuccacguucaucagcgacgaggucgcgcgggaccugucccugcaguucaagcgcccgaucaaccccaccgaccagagcuccuacaucguggacagcgugaccgucaagaacggguccauccaccucuacuucgacaaggccggccagaagaccuacgagcggcacagccugucccacuucgugaaccuggacaaccuccgcgccaacaacacgaaggggagccugcccaucaacgugaucgucuucgacggcaaguccaagugcgaggagagcuccgccaagagcgccuccguguacuacagccagcugaugugccagcccauccuccugcuggaccaggcgcucguguccgacgucggcgacagcgccgagguggccgugaagauguucgacgccuacgucaacaccuucagcuccaccuucaacgugccgauggagaagcugaagacccugguggccacggcggaggccgagcucgccaagaacgucagccuggacaacgugcuguccaccuucaucagcgccgcgcggcagggguucguggacuccgacgucgagaccaaggacgugguggagugccucaagcugagccaccaguccgacaucgaggucaccggcgacagcugcaacaacuacaugcugacguacaacaagguggagaacaugaccccccgcgaccucggggccugcaucgacugcuccgcccggcacaucaacgcccagguggccaagagccacaacaucgcgcugaucuggaacgucaaggacuucaugucccugagcgagcagcuccgcaagcagauccgcuccgccgccaagaagaacaaccugcccuucaagcugaccugcgccaccacgcggcagguggugaacgucgugaccaccaagaucgcccucaagggcggguga

SEQ ID NO: 18162 - RNA, 5841 nt, Artificial Sequence
  SARS-CoV-2__MT536977.1__non-structural protein 3 (NSP3) CDS gc
auggcccccaccaaggugaccuucggcgacgacacggucaucgaggugcagggguacaagagcgugaacaucaccuucgagcuggacgagcgcaucgacaagguccucaacgagaagugcuccgccuacaccguggagcugggcaccgaggugaacgaguucgcgugcgucguggccgacgccgugaucaagacgcugcagccggucagcgagcuccugaccccccuggggaucgaccucgacgagugguccauggccaccuacuaccuguucgacgagagcggcgaguucaagcuggccucccacauguacugcagcuucuacccccccgacgaggacgaggaggagggggacugcgaggaggaggaguucgagccguccacccaguacgaguacggcacggaggacgacuaccagggcaagccccucgaguucggggcgaccagcgccgcccugcagcccgaggaggagcaggaggaggacuggcuggacgacgacucccagcagaccgugggccagcaggacgggagcgaggacaaccagaccacgaccauccagaccaucguggagguccagccccagcucgagauggagcugaccccgguggugcagacgaucgaggucaacuccuucagcggcuaccugaagcucaccgacaacguguacaucaagaacgccgacaucguggaggaggcgaagaaggucaagcccaccgugguggucaacgccgccaacguguaccugaagcacgggggcggcguggccggggcccugaacaaggcgaccaacaacgccaugcaggucgaguccgacgacuacaucgccacgaacggcccccucaagguggggggcagcugcguccuguccggccacaaccuggccaagcacugccuccacgugguggggcccaacgucaacaagggcgaggacauccagcugcugaagagcgccuacgagaacuucaaccagcacgaggugcuccuggcgccgcugcucuccgccgggaucuucggcgccgaccccauccacagccugcgggugugcgucgacaccgugcgcaccaacguguaccuggccgucuucgacaagaaccucuacgacaagcugguguccagcuuccuggagaugaagagcgagaagcagguggagcagaagaucgccgagauccccaaggaggaggucaagcccuucaucaccgaguccaagccgagcguggagcagcggaagcaggacgacaagaagaucaaggcgugcguggaggaggucacgaccacccucgaggagaccaaguuccugacggagaaccugcuccuguacaucgacaucaacgggaaccugcaccccgacuccgccacccucgugagcgacaucgacaucaccuuccugaagaaggacgcccccuacaucgugggcgacgucgugcaggagggcgugcugaccgccgucgugauccccacgaagaaggccgggggcaccaccgagaugcucgcgaaggcccugcgcaaggugccgaccgacaacuacaucacgaccuaccccgggcagggccugaacggguacaccgucgaggaggccaagaccgugcucaagaagugcaaguccgccuucuacauccugcccagcaucaucuccaacgagaagcaggagauccugggcaccgugagcuggaaccuccgggagaugcuggcgcacgccgaggagacgcgcaagcugaugcccgucugcguggagaccaaggccaucguguccaccauccagcggaaguacaagggcaucaagauccaggagggggucguggacuacggcgcccgcuucuacuucuacaccagcaagacgaccguggccucccugaucaacacccucaacgaccugaacgagacccuggucacgaugccgcucggguacgugacccacggccugaaccuggaggaggcggcccgguacaugcgcagccucaaggugcccgccaccgucuccgugagcucccccgacgccgugaccgccuacaacggguaccugacgagcuccagcaagacccccgaggagcacuucaucgagaccaucucccuggcgggcagcuacaaggacuggagcuacuccggccagagcacccagcucgggaucgaguuccugaagcggggcgacaaguccgucuacuacacgagcaacccgaccaccuuccaccuggacggggaggugaucaccuucgacaaccucaagacgcugcugucccuccgcgaggugcggaccaucaaggucuucaccaccguggacaacaucaaccugcacacgcagguggucgacaugagcaugaccuacggccagcaguucggccccaccuaccuggacggggccgacgugaccaagaucaagccccacaacucccacgagggcaagacguucuacgugcucccgaacgacgacacccugcgcgucgaggccuucgaguacuaccacaccaccgaccccagcuuccuggggcgguacauguccgcccucaaccacacgaagaaguggaaguacccccaggugaacggccugaccagcaucaagugggccgacaacaacugcuaccuggcgaccgcccuccugacccugcagcagaucgagcucaaguucaaccccccggcccugcaggacgccuacuaccgcgcgcgggccggggaggccgccaacuucugcgcccugauccucgcguacugcaacaagacggugggcgagcugggcgacguccgcgagaccauguccuaccuguuccagcacgccaaccucgacagcugcaagcgggugcugaacgucgugugcaagaccugcgggcagcagcagaccacccugaagggcguggaggccgucauguacauggggacgcucuccuacgagcaguucaagaagggcgugcagauccccugcaccugcgggaagcaggccaccaaguaccuggugcagcaggagagccccuucgucaugauguccgcccccccggcgcaguacgagcugaagcacggcaccuucacgugcgccagcgaguacaccggcaacuaccagugcgggcacuacaagcacaucaccuccaaggagacccucuacugcaucgacggcgcccugcugacgaagagcagcgaguacaaggggcccaucaccgacguguucuacaaggagaacuccuacaccaccacgaucaagcccgugaccuacaagcucgacggcgucgugugcaccgagaucgaccccaagcuggacaacuacuacaagaaggacaacagcuacuucaccgagcagccgaucgaccuggugcccaaccagcccuaccccaacgccuccuucgacaacuucaaguucgucugcgacaacaucaaguucgccgacgaccucaaccagcugacgggguacaagaagccggcgagccgcgagcugaaggugaccuucuuccccgaccucaacggcgacguggucgccaucgacuacaagcacuacacccccuccuucaagaagggcgccaagcugcugcacaagcccaucguguggcacgugaacaacgccaccaacaaggcgacguacaagccgaacaccuggugcauccggugccucuggagcaccaagcccgucgagaccuccaacagcuucgacgugcugaaguccgaggacgcccaggggauggacaaccuggccugcgaggaccucaagcccgugagcgaggagguccuggagaaccccacgauccagaaggacgugcuggagugcaacgugaagaccaccgaggucgugggcgacaucauccucaagccggccaacaacucccugaagaucaccgaggagguggggcacacggaccugauggccgcguacgucgacaacagcucccucaccaucaagaagcccaacgagcugagccgcgugcugggccucaagacccuggccacccacgggcuggccgccgugaacuccguccccugggacacgaucgccaacuacgcgaagccguuccucaacaagguggugagcaccaccaccaacaucgucacgcgcugccugaaccgggugugcaccaacuacaugcccuacuucuucacccugcuccugcagcugugcaccuucacccgcuccacgaacagccggaucaaggccuccaugcccaccaccaucgccaagaacaccgugaagagcgucggcaaguucugccucgaggccagcuucaacuaccugaagucccccaacuucagcaagcugaucaacaucaucaucugguuccuccugcuguccgugugccucggcagccugaucuacuccacggccgcgcugggggugcucaugagcaaccugggcaugccguccuacugcaccggguaccgcgagggcuaccugaacagcaccaacgucaccaucgccacguacugcaccggcuccauccccugcagcgugugccucuccgggcuggacagccuggacaccuaccccucccucgagaccauccagaucacgaucagcuccuucaagugggaccugaccgccuucggccugguggccgagugguuccucgccuacauccuguucacccgguucuucuacguccuggggcucgcggccaucaugcagcuguucuucagcuacuucgccgugcacuucaucuccaacagcuggcugauguggcugaucaucaaccucgugcagauggcccccaucuccgcgaugguccgcauguacaucuucuucgccagcuucuacuacguguggaagagcuacgugcacgucguggacggcugcaacuccagcaccugcaugaugugcuacaagcggaaccgcgccacgcggguggagugcaccaccaucgucaacggggugcgccgguccuucuacgucuacgccaacggcggcaagggguucugcaagcugcacaacuggaacugcgugaacugcgacaccuucugcgccggcagcacguucaucuccgacgagguggcgcgcgaccugagccuccaguucaagcggccgaucaaccccaccgaccaguccagcuacaucgucgacuccgugaccgugaagaacgggagcauccaccuguacuucgacaaggccggccagaagaccuacgagcgccacucccugagccacuucgucaaccucgacaaccugcgggccaacaacacgaaggggucccugcccaucaacgugaucguguucgacggcaagagcaagugcgaggaguccagcgccaaguccgccagcgucuacuacucccagcucaugugccagcccauccugcugcucgaccaggcgcuggugagcgacgugggcgacagcgccgaggucgccgugaagauguucgacgccuacgugaacaccuucuccagcaccuucaacgucccgauggagaagcugaagacccucguggccacggcggaggccgagcuggccaagaacgugucccuggacaacguccucagcaccuucaucuccgccgcgcgccagggguucguggacagcgacguggagaccaaggacgucguggagugccugaagcugucccaccagagcgacaucgaggugaccggcgacuccugcaacaacuacaugcucacguacaacaaggucgagaacaugaccccccgggaccugggggccugcaucgacugcagcgcccgccacaucaacgcccagguggccaagucccacaacaucgcgcugaucuggaacgugaaggacuucaugagccucuccgagcagcugcggaagcagauccgcagcgccgccaagaagaacaaccugcccuucaagcucaccugcgccaccacgcgccaggucgugaacguggucaccaccaagaucgcccugaagggcggguga

SEQ ID NO: 18163 - RNA, 5841 nt, Artificial Sequence
  SARS-CoV-2__MT532437.1__non-structural protein 3 (NSP3) CDS gc
auggcccccaccaaggugaccuucggcgacgacacggucaucgaggugcagggguacaagagcgugaacaucaccuucgagcuggacgagcgcaucgacaagguccucaacgagaagugcuccgccuacaccguggagcugggcaccgaggugaacgaguucgcgugcgucguggccgacgccgugaucaagacgcugcagccggucagcgagcuccugaccccccuggggaucgaccucgacgagugguccauggccaccuacuaccuguucgacgagagcggcgaguucaagcuggccucccacauguacugcagcuucuacccccccgacgaggacgaggaggagggggacugcgaggaggaggaguucgagccguccacccaguacgaguacggcacggaggacgacuaccagggcaagccccucgaguucggggcgaccagcgccgcccugcagcccgaggaggagcaggaggaggacuggcuggacgacgacucccagcagaccgugggccagcaggacgggagcgaggacaaccagaccacgaccauccagaccaucguggagguccagccccagcucgagauggagcugaccccgguggugcagacgaucgaggucaacuccuucagcggcuaccugaagcucaccgacaacguguacaucaagaacgccgacaucguggaggaggcgaagaaggucaagcccaccgugguggucaacgccgccaacguguaccugaagcacgggggcggcguggccggggcccugaacaaggcgaccaacaacgccaugcaggucgaguccgacgacuacaucgccacgaacggcccccucaagguggggggcagcugcguccuguccggccacaaccuggccaagcacugccuccacgugguggggcccaacgucaacaagggcgaggacauccagcugcugaagagcgccuacgagaacuucaaccagcacgaggugcuccuggcgccgcugcucuccgccgggaucuucggcgccgaccccauccacagccugcgggugugcgucgacaccgugcgcaccaacguguaccuggccgucuucgacaagaaccucuacgacaagcugguguccagcuuccuggagaugaagagcgagaagcagguggagcagaagaucgccgagauccccaaggaggaggucaagcccuucaucaccgaguccaagccgagcguggagcagcggaagcaggacgacaagaagaucaaggcgugcguggaggaggucacgaccacccucgaggagaccaaguuccugacggagaaccugcuccuguacaucgacaucaacgggaaccugcaccccgacuccgccacccucgugagcgacaucgacaucaccuuccugaagaaggacgcccccuacaucgugggcgacgucgugcaggagggcgugcugaccgccgucgugauccccacgaagaaggccgggggcaccaccgagaugcucgcgaaggcccugcgcaaggugccgaccgacaacuacaucacgaccuaccccgggcagggccugaacggguacaccgucgaggaggccaagaccgugcucaagaagugcaaguccgccuucuacauccugcccagcaucaucuccaacgagaagcaggagauccugggcaccgugagcuggaaccuccgggagaugcuggcgcacgccgaggagacgcgcaagcugaugcccgucugcguggagaccaaggccaucguguccaccauccagcggaaguacaagggcaucaagauccaggagggggucguggacuacggcgcccgcuucuacuucuacaccagcaagacgaccguggccucccugaucaacacccucaacgaccugaacgagacccuggucacgaugccgcucggguacgugacccacggccugaaccuggaggaggcggcccgguacaugcgcagccucaaggugcccgccaccgucuccgugagcucccccgacgccgugaccgccuacaacggguaccugacgagcuccagcaagacccccgaggagcacuucaucgagaccaucucccuggcgggcagcuacaaggacuggagcuacuccggccagagcacccagcucgggaucgaguuccugaagcggggcgacaaguccgucuacuacacgagcaacccgaccaccuuccaccuggacggggaggugaucaccuucgacaaccucaagacgcugcugucccuccgcgaggugcggaccaucaaggucuucaccaccguggacaacaucaaccugcacacgcagguggucgacaugagcaugaccuacggccagcaguucggccccaccuaccuggacggggccgacgugaccaagaucaagccccacaacucccacgagggcaagacguucuacgugcucccgaacgacgacacccugcgcgucgaggccuucgaguacuaccacaccaccgaccccagcuuccuggggcgguacauguccgcccucaaccacacgaagaaguggaaguacccccaggugaacggccugaccagcaucaagugggccgacaacaacugcuaccuggcgaccgcccuccugacccugcagcagaucgagcucaaguucaaccccccggcccugcaggacgccuacuaccgcgcgcgggccggggaggccgccaacuucugcgcccugauccucgcguacugcaacaagacggugggcgagcugggcgacguccgcgagaccauguccuaccuguuccagcacgccaaccucgacagcugcaagcgggugcugaacgucgugugcaagaccugcgggcagcagcagaccacccugaagggcguggaggccgucauguacauggggacgcucuccuacgagcaguucaagaagggcgugcagauccccugcaccugcgggaagcaggccaccaaguaccuggugcagcaggagagccccuucgucaugauguccgcccccccggcgcaguacgagcugaagcacggcaccuucacgugcgccagcgaguacaccggcaacuaccagugcgggcacuacaagcacaucaccuccaaggagacccucuacugcaucgacggcgcccugcugacgaagagcagcgaguacaaggggcccaucaccgacguguucuacaaggagaacuccuacaccaccacgaucaagcccgugaccuacaagcucgacggcgucgugugcaccgagaucgaccccaagcuggacaacuacuacaagaaggacaacagcuacuucaccgagcagccgaucgaccuggugcccaaccagcccuaccccaacgccuccuucgacaacuucaaguucgucugcgacaacaucaaguucgccgacgaccucaaccagcugacgggguacaagaagccggcgagccgcgagcugaaggugaccuucuuccccgaccucaacggcgacguggucgccaucgacuacaagcacuacacccccuccuucaagaagcgggccaagcugcugcacaagcccaucguguggcacgugaacaacgccaccaacaaggcgacguacaagccgaacaccuggugcauccgcugccucuggagcaccaagcccgucgagaccuccaacagcuucgacgugcugaaguccgaggacgcccagggcauggacaaccuggccugcgaggaccucaagcccgugagcgaggaggucguggagaaccccacgauccagaaggacgugcuggagugcaacgucaagaccaccgagguggugggggacaucauccugaagccggccaacaacucccucaagaucaccgaggaggucggccacacggaccugauggccgcguacguggacaacagcucccugaccaucaagaagcccaacgagcucagccgcgugcuggggcugaagacccucgccacccacggccuggccgccgucaacuccgugcccugggacacgaucgccaacuacgcgaagccguuccugaacaagguggucagcaccaccaccaacaucgugacgcggugccucaaccgcgugugcaccaacuacaugcccuacuucuucacccugcugcuccagcugugcaccuucacccgguccacgaacagccgcaucaaggccuccaugcccaccaccaucgccaagaacaccgucaagagcguggggaaguucugccuggaggccagcuucaacuaccucaagucccccaacuucagcaagcugaucaacaucaucaucugguuccugcuccuguccgugugccugggcagccucaucuacuccacggccgcgcugggcguccugaugagcaaccucgggaugccguccuacugcaccggcuaccgggagggguaccugaacagcaccaacgugaccaucgccacguacugcaccggcuccauccccugcagcgugugccuguccggccucgacagccuggacaccuaccccucccuggagaccauccagaucacgaucagcuccuucaagugggaccucaccgccuucgggcuggucgccgagugguuccuggccuacauccucuucacccgcuucuucuacgugcugggccuggcggccaucaugcagcucuucuucagcuacuucgccgugcacuucaucuccaacagcuggcugauguggcugaucaucaaccugguccagauggcccccaucuccgcgauggugcggauguacaucuucuucgccagcuucuacuacguguggaagagcuacguccacgugguggacgggugcaacuccagcaccugcaugaugugcuacaagcgcaaccgggccacgcgcgucgagugcaccaccaucgugaacggcguccggcgcuccuucuacguguacgccaacgggggcaagggcuucugcaagcuccacaacuggaacugcgugaacugcgacaccuucugcgccgggagcacguucaucuccgacgaggucgcgcgggaccugagccugcaguucaagcgcccgaucaaccccaccgaccaguccagcuacaucguggacuccgugaccgucaagaacggcagcauccaccucuacuucgacaaggccgggcagaagaccuacgagcggcacucccugagccacuucgugaaccuggacaaccuccgcgccaacaacacgaagggcucccugcccaucaacgugaucgucuucgacgggaagagcaagugcgaggaguccagcgccaaguccgccagcguguacuacucccagcugaugugccagcccauccuccugcuggaccaggcgcucgugagcgacgucggcgacagcgccgagguggccgugaagauguucgacgccuacgucaacaccuucuccagcaccuucaacgugccgauggagaagcugaagacccugguggccacggcggaggccgagcucgccaagaacgucucccuggacaacgugcugagcaccuucaucuccgccgcgcggcagggcuucguggacagcgacgucgagaccaaggacgugguggagugccucaagcugucccaccagagcgacaucgaggucaccggggacuccugcaacaacuacaugcugacguacaacaagguggagaacaugaccccccgcgaccucggcgccugcaucgacugcagcgcccggcacaucaacgcccagguggccaagucccacaacaucgcgcugaucuggaacgucaaggacuucaugagccuguccgagcagcuccgcaagcagauccgcagcgccgccaagaagaacaaccugcccuucaagcugaccugcgccaccacgcggcagguggugaacgucgugaccaccaagaucgcccucaaggggggcuga

SEQ ID NO: 18164 - RNA, 5841 nt, Artificial Sequence
  SARS-CoV-2__MT517420.1__non-structural protein 3 (NSP3) CDS gc
auggcccccaccaaggugaccuucggcgacgacacggucaucgaggugcagggguacaagagcgugaacaucaccuucgagcuggacgagcgcaucgacaagguccucaacgagaagugcuccgccuacaccguggagcugggcaccgaggugaacgaguucgcgugcgucguggccgacgccgugaucaagacgcugcagccggucagcgagcuccugaccccccuggggaucgaccucgacgagugguccauggccaccuacuaccuguucgacgagagcggcgaguucaagcuggccucccacauguacugcagcuucuacccccccgacgaggacgaggaggagggggacugcgaggaggaggaguucgagccguccacccaguacgaguacggcacggaggacgacuaccagggcaagccccucgaguucggggcgaccagcgccgcccugcagcacgaggaggagcaggaggaggacuggcuggacgacgacucccagcagaccgugggccagcaggacgggagcgaggacaaccagaccacgaccauccagaccaucguggagguccagccccagcucgagauggagcugacccccguggugcagacgaucgaggucaacuccuucagcggcuaccugaagcucaccgacaacguguacaucaagaacgccgacaucguggaggaggcgaagaaggucaagccgaccgugguggucaacgccgccaacguguaccugaagcacgggggcggcguggccggggcccugaacaaggcgaccaacaacgccaugcaggucgaguccgacgacuacaucgccacgaacggcccccucaagguggggggcagcugcguccuguccggccacaaccuggccaagcacugccuccacgugguggggcccaacgucaacaagggcgaggacauccagcugcugaagagcgccuacgagaacuucaaccagcacgaggugcuccuggcgccccugcucuccgccgggaucuucggcgccgacccgauccacagccugcgggugugcgucgacaccgugcgcaccaacguguaccuggccgucuucgacaagaaccucuacgacaagcugguguccagcuuccuggagaugaagagcgagaagcagguggagcagaagaucgccgagauccccaaggaggaggucaagcccuucaucaccgaguccaagcccagcguggagcagcggaagcaggacgacaagaagaucaaggcgugcguggaggaggucacgaccacccucgaggagaccaaguuccugacggagaaccugcuccuguacaucgacaucaacgggaaccugcacccggacuccgccacccucgugagcgacaucgacaucaccuuccugaagaaggacgcccccuacaucgugggcgacgucgugcaggagggcgugcugaccgccgucgugauccccacgaagaaggccgggggcaccaccgagaugcucgcgaaggcccugcgcaaggugcccaccgacaacuacaucacgaccuacccggggcagggccugaacggguacaccgucgaggaggccaagaccgugcucaagaagugcaaguccgccuucuacauccugcccagcaucaucuccaacgagaagcaggagauccugggcaccgugagcuggaaccuccgggagaugcuggcgcacgccgaggagacgcgcaagcugaugcccgucugcguggagaccaaggccaucguguccaccauccagcggaaguacaagggcaucaagauccaggagggggucguggacuacggcgcccgcuucuacuucuacaccagcaagacgaccguggccucccugaucaacacccucaacgaccugaacgagacccuggucacgaugccccucggguacgugacccacggccugaaccuggaggaggcggcccgguacaugcgcagccucaaggugccggccaccgucuccgugagcucccccgacgccgugaccgccuacaacggguaccugacgagcuccagcaagacccccgaggagcacuucaucgagaccaucucccuggcgggcagcuacaaggacuggagcuacuccggccagagcacccagcucgggaucgaguuccugaagcggggcgacaaguccgucuacuacacgagcaaccccaccaccuuccaccuggacggggaggugaucaccuucgacaaccucaagacgcugcugucccuccgcgaggugcggaccaucaaggucuucaccaccguggacaacaucaaccugcacacgcagguggucgacaugagcaugaccuacggccagcaguucggcccgaccuaccuggacggggccgacgugaccaagaucaagccccacaacucccacgagggcaagacguucuacgugcuccccaacgacgacacccugcgcgucgaggccuucgaguacuaccacaccaccgacccgagcuuccuggggcgguacauguccgcccucaaccacacgaagaaguggaaguacccccaggugaacggccugaccagcaucaagugggccgacaacaacugcuaccuggcgaccgcccuccugacccugcagcagaucgagcucaaguucaacccccccgcccugcaggacgccuacuaccgcgcgcgggccggggaggccgccaacuucugcgcccugauccucgcguacugcaacaagacggugggcgagcugggcgacguccgcgagaccauguccuaccuguuccagcacgccaaccucgacagcugcaagcgggugcugaacgucgugugcaagaccugcgggcagcagcagaccacccugaagggcguggaggccgucauguacauggggacgcucuccuacgagcaguucaagaagggcgugcagaucccgugcaccugcgggaagcaggccaccaaguaccuggugcagcaggagagccccuucgucaugauguccgccccccccgcgcaguacgagcugaagcacggcaccuucacgugcgccagcgaguacaccggcaacuaccagugcgggcacuacaagcacaucaccuccaaggagacccucuacugcaucgacggcgcccugcugacgaagagcagcgaguacaaggggccgaucaccgacguguucuacaaggagaacuccuacaccaccacgaucaagcccgugaccuacaagcucgacggcgucgugugcaccgagaucgaccccaagcuggacaacuacuacaagaaggacaacagcuacuucaccgagcagcccaucgaccuggugccgaaccagcccuaccccaacgccuccuucgacaacuucaaguucgucugcgacaacaucaaguucgccgacgaccucaaccagcugacgggguacaagaagcccgcgagccgcgagcugaaggugaccuucuucccggaccucaacggcgacguggucgccaucgacuacaagcacuacacccccuccuucaagaagggcgccaagcugcugcacaagcccaucguguggcacgugaacaacgccaccaacaaggcgacguacaagcccaacaccuggugcauccggugccucuggagcaccaagccggucgagaccuccaacagcuucgacgugcugaaguccgaggacgcccaggggauggacaaccuggccugcgaggaccucaagcccgugagcgaggaggucguggagaaccccacgauccagaaggacgugcuggagugcaacgucaagaccaccgagguggugggcgacaucauccugaagcccgccaacaacucccucaagaucaccgaggaggucgggcacacggaccugauggccgcguacguggacaacagcucccugaccaucaagaagccgaacgagcucagccgcgugcugggccugaagacccucgccacccacgggcuggccgccgucaacuccgugcccugggacacgaucgccaacuacgcgaagcccuuccugaacaagguggucagcaccaccaccaacaucgugacgcgcugccucaaccgggugugcaccaacuacaugccguacuucuucacccugcugcuccagcugugcaccuucacccgcuccacgaacagccggaucaaggccuucaugcccaccaccaucgccaagaacaccgucaaguccgugggcaaguucugccuggaggccagcuucaacuaccucaagagccccaacuucuccaagcugaucaacaucaucaucugguuccugcuccugagcgugugccugggcucccucaucuacagcacggccgcgcuggggguccugauguccaaccucggcaugcccagcuacugcaccggguaccgcgagggcuaccugaacuccaccaacgugaccaucgccacguacugcaccggcagcaucccgugcuccgugugccugagcgggcucgacucccuggacaccuaccccagccuggagaccauccagaucacgaucuccagcuucaagugggaccucaccgccuucggccuggucgccgagugguuccuggccuacauccucuucacccgguucuucuacgugcuggggcuggcggccaucaugcagcucuucuucuccuacuucgccgugcacuucaucagcaacuccuggcugauguggcugaucaucaaccugguccagauggcccccaucagcgcgauggugcgcauguacaucuucuucgccuccuucuacuacguguggaagagcuacguccacgugguggacggcugcaacagcuccaccugcaugaugugcuacaagcggaaccgcgccacgcgggucgagugcaccaccaucgugaacgggguccgccggagcuucuacguguacgccaacggcggcaagggguucugcaagcuccacaacuggaacugcgugaacugcgacaccuucugcgccggcuccacguucaucagcgacgaggucgcgcgcgaccugucccugcaguucaagcggcccaucaacccgaccgaccagagcuccuacaucguggacagcgugaccgucaagaacggguccauccaccucuacuucgacaaggccggccagaagaccuacgagcgccacagccugucccacuucgugaaccuggacaaccuccgggccaacaacacgaaggggagccugcccaucaacgugaucgucuucgacggcaaguccaagugcgaggagagcuccgccaagagcgccuccguguacuacagccagcugaugugccagcccauccuccugcuggaccaggcgcucguguccgacgucggcgacagcgccgagguggccgugaagauguucgacgccuacgucaacaccuucagcuccaccuucaacgugcccauggagaagcugaagacccugguggccacggcggaggccgagcucgccaagaacgucagccuggacaacgugcuguccaccuucaucagcgccgcgcgccagggguucguggacuccgacgucgagaccaaggacgugguggagugccucaagcugagccaccaguccgacaucgaggucaccggcgacagcugcaacaacuacaugcugacguacaacaagguggagaacaugaccccgcgggaccucggggccugcaucgacugcuccgcccgccacaucaacgcccagguggccaagagccacaacaucgcgcugaucuggaacgucaaggacuucaugucccugagcgagcagcuccggaagcagauccgcuccgccgccaagaagaacaaccugcccuucaagcugaccugcgccaccacgcgccagguggugaacgucgugaccaccaagaucgcccucaagggcggguga

SEQ ID NO: 18165 - RNA, 5841 nt, Artificial Sequence
  SARS-CoV-2__MT517423.1__non-structural protein 3 (NSP3) CDS gc
auggcccccaccaaggugaccuucggcgacgacacggucaucgaggugcagggguacaagagcgugaacaucaccuucgagcuggacgagcgcaucgacaagguccucaacgagaagugcuccgccuacaccguggagcugggcaccgaggugaacgaguucgcgugcgucguggccgacgccgugaucaagacgcugcagccggucagcgagcuccugaccccccuggggaucgaccucgacgagugguccauggccaccuacuaccuguucgacgagagcggcgaguucaagcuggccucccacauguacugcagcuucuacccccccgacgaggacgaggaggagggggacugcgaggaggaggaguucgagccguccacccaguacgaguacggcacggaggacgacuaccagggcaagccccucgaguucggggcgaccagcgccgcccugcagcccgaggaggagcaggaggaggacuggcuggacgacgacucccagcagaccgugggccagcaggacgggagcgaggacaaccagaccacgaccauccagaccaucguggagguccagccccagcucgagauggagcugaccccgguggugcagacgaucgaggucaacuccuucagcggcuaccugaagcucaccgacaacguguacaucaagaacgccgacaucguggaggaggcgaagaaggucaagcccaccgugguggucaacgccgccaacguguaccugaagcacgggggcggcguggccggggcccugaacaaggcgaccaacaacgccaugcaggucgaguccgacgacuacaucgccacgaacggcccccucaagguggggggcagcugcguccuguccggccacaaccuggccaagcacugccuccacgugguggggcccaacgucaacaagggcgaggacauccagcugcugaagagcgccuacgagaacuucaaccagcacgaggugcuccuggcgccgcugcucuccgccgggaucuucggcgccgaccccauccacagccugcgggugugcgucgacaccgugcgcaccaacguguaccuggccgucuucgacaagaaccucuacgacaagcugguguccagcuuccuggagaugaagagcgagaagcagguggagcagaagaucgccgagauccccaaggaggaggucaagcccuucaucaccgaguccaagccgagcguggagcagcggaagcaggacgacaacaagaucaaggcgugcguggaggaggucacgaccacccucgaggagaccaaguuccugacggagaaccugcuccuguacaucgacaucaacgggaaccugcaccccgacuccgccacccucgugagcgacaucgacaucaccuuccugaagaaggacgcccccuacaucgugggcgacgucgugcaggagggcgugcugaccgccgucgugauccccacgaagaaggccgggggcaccaccgagaugcucgcgaaggcccugcgcaaggugccgaccgacaacuacaucacgaccuaccccgggcagggccugaacggguacaccgucgaggaggccaagaccgugcucaagaagugcaaguccgccuucuacauccugcccagcaucaucuccaacgagaagcaggagauccugggcaccgugagcuggaaccuccgggagaugcuggcgcacgccgaggagacgcgcaagcugaugcccgucugcguggagaccaaggccaucguguccaccauccagcggaaguacaagggcaucaagauccaggagggggucguggacuacggcgcccgcuucuacuucuacaccagcaagacgaccguggccucccugaucaacacccucaacgaccugaacgagacccuggucacgaugccgcucggguacgugacccacggccugaaccuggaggaggcggcccgguacaugcgcagccucaaggugcccgccaccgucuccgugagcucccccgacgccgugaccgccuacaacggguaccugacgagcuccagcaagacccccgaggagcacuucaucgagaccaucucccuggcgggcagcuacaaggacuggagcuacuccggccagagcacccagcucgggaucgaguuccugaagcggggcgacaaguccgucuacuacacgagcaacccgaccaccuuccaccuggacggggaggugaucaccuucgacaaccucaagacguuccugucccugcgcgaggugcggaccaucaaggucuucaccaccguggacaacaucaaccuccacacgcagguggucgacaugagcaugaccuacggccagcaguucggccccaccuaccuggacggggccgacgugaccaagaucaagccccacaacucccacgagggcaagacguucuacgugcugccgaacgacgacacccuccgcgucgaggccuucgaguacuaccacaccaccgaccccagcuuccuggggcgguacauguccgcccugaaccacacgaagaaguggaaguacccccaggugaacggccucaccagcaucaagugggccgacaacaacugcuaccuggcgaccgcccugcucacccugcagcagaucgagcugaaguucaaccccccggcccuccaggacgccuacuaccgcgcgcgggccggggaggccgccaacuucugcgcccugauccuggcguacugcaacaagacggugggcgagcucggcgacguccgcgagaccauguccuaccuguuccagcacgccaaccuggacagcugcaagcgggugcucaacgucgugugcaagaccugcgggcagcagcagaccacccugaagggcguggaggccgucauguacauggggacgcuguccuacgagcaguucaagaagggcgugcagauccccugcaccugcgggaagcaggccaccaaguaccucgugcagcaggagagccccuucgucaugauguccgcccccccggcgcaguacgagcugaagcacggcaccuucacgugcgccagcgaguacaccggcaacuaccagugcgggcacuacaagcacaucaccuccaaggagacccuguacugcaucgacggcgcccuccugacgaagagcagcgaguacaaggggcccaucaccgacguguucuacaaggagaacuccuacaccaccacgaucaagcccgugaccuacaagcuggacggcgucgugugcaccgagaucgaccccaagcucgacaacuacuacaagaaggacaacagcuacuucaccgagcagccgaucgaccuggugcccaaccagcccuaccccaacgccuccuucgacaacuucaaguucgucugcgacaacaucaaguucgccgacgaccugaaccagcucacgggguacaagaagccggcgagccgcgagcugaaggugaccuucuuccccgaccugaacggcgacguggucgccaucgacuacaagcacuacacccccuccuucaagaagggcgccaagcuccugcacaagcccaucguguggcacgugaacaacgccaccaacaaggcgacguacaagccgaacaccuggugcauccggugccuguggagcaccaagcccgucgagaccuccaacagcuucgacgugcucaaguccgaggacgcccaggggauggacaaccuggccugcgaggaccugaagcccgugagcgaggaggucguggagaaccccacgauccagaaggacgugcucgagugcaacgucaagaccaccgagguggugggcgacaucauccugaagccggccaacaacucccugaagaucaccgaggaggucgggcacacggaccucauggccgcguacguggacaacagcucccugaccaucaagaagcccaacgagcugagccgcgugcucggccugaagacccuggccacccacgggcucgccgccgucaacuccgugcccugggacacgaucgccaacuacgcgaagccguuccugaacaagguggucagcaccaccaccaacaucgugacgcgcugccugaaccgggugugcaccaacuacaugcccuacuucuucacccuccugcugcagcucugcaccuucacccgcuccacgaacagccggaucaaggccuccaugcccaccaccaucgccaagaacaccgucaagagcgugggcaaguucugccuggaggccagcuucaacuaccugaagucccccaacuucagcaagcucaucaacaucaucaucugguuccugcugcucuccgugugccugggcagccugaucuacuccacggccgcgcucgggguccugaugagcaaccugggcaugccguccuacugcaccggguaccgcgagggcuaccucaacagcaccaacgugaccaucgccacguacugcaccggcuccauccccugcagcgugugccuguccgggcuggacagccucgacaccuaccccucccuggagaccauccagaucacgaucagcuccuucaagugggaccugaccgccuucggccucgucgccgagugguuccuggccuacauccuguucacccgguucuucuacgugcucgggcuggcggccaucaugcagcuguucuucagcuacuucgccgugcacuucaucuccaacagcuggcucauguggcugaucaucaaccugguccagauggcccccaucuccgcgauggugcgcauguacaucuucuucgccagcuucuacuacguguggaagagcuacguccacgugguggacggcugcaacuccagcaccugcaugaugugcuacaagcggaaccgcgccacgcgggucgagugcaccaccaucgugaacgggguccgccgguccuucuacguguacgccaacggcggcaagggguucugcaagcugcacaacuggaacugcgugaacugcgacaccuucugcgccggcagcacguucaucuccgacgaggucgcgcgcgaccucagccugcaguucaagcggccgaucaaccccaccgaccaguccagcuacaucguggacuccgugaccgucaagaacgggagcauccaccuguacuucgacaaggccggccagaagaccuacgagcgccacucccucagccacuucgugaaccuggacaaccugcgggccaacaacacgaaggggucccuccccaucaacgugaucgucuucgacggcaagagcaagugcgaggaguccagcgccaaguccgccagcguguacuacucccagcugaugugccagcccauccugcuccuggaccaggcgcuggugagcgacgucggcgacagcgccgagguggccgugaagauguucgacgccuacgucaacaccuucuccagcaccuucaacgugccgauggagaagcucaagacccugguggccacggcggaggccgagcuggccaagaacgucucccucgacaacgugcugagcaccuucaucuccgccgcgcgccagggguucguggacagcgacgucgagaccaaggacgugguggagugccugaagcucucccaccagagcgacaucgaggucaccggcgacuccugcaacaacuacaugcugacguacaacaagguggagaacaugaccccccgggaccugggggccugcaucgacugcagcgcccgccacaucaacgcccagguggccaagucccacaacaucgcgcucaucuggaacgucaaggacuucaugagccuguccgagcagcugcggaagcagauccgcagcgccgccaagaagaacaaccuccccuucaagcugaccugcgccaccacgcgccagguggugaacgucgugaccaccaagaucgcccugaagggcggguga

SEQ ID NO: 18166 - RNA, 5841 nt, Artificial Sequence
  SARS-CoV-2__MT517424.1__non-structural protein 3 (NSP3) CDS gc
auggcccccaccaaggugaccuucggcgacgacacggucaucgaggugcagggguacaagagcgugaacaucaccuucgagcuggacgagcgcaucgacaagguccucaacgagaagugcuccgccuacaccguggagcugggcaccgaggugaacgaguucgcgugcgucguggccgacgccgugaucaagacgcugcagccggucagcgagcuccugaccccccuggggaucgaccucgacgagugguccauggccaccuacuaccuguucgacgagagcggcgaguucaagcuggccucccacauguacugcagcuucuacccccccgacgaggacgaggaggagggggacugcgaggaggaggaguucgagccguccacccaguacgaguacggcacggaggacgacuaccagggcaagccccucgaguucggggcgaccagcgccgcccugcagcacgaggaggagcaggaggaggacuggcuggacgacgacucccagcagaccgugggccagcaggacgggagcgaggacaaccagaccacgaccauccagaccaucguggagguccagccccagcucgagauggagcugacccccguggugcagacgaucgaggucaacuccuucagcggcuaccugaagcucaccgacaacguguacaucaagaacgccgacaucguggaggaggcgaagaaggucaagccgaccgugguggucaacgccgccaacguguaccugaagcacgggggcggcguggccggggcccugaacaaggcgaccaacaacgccaugcaggucgaguccgacgacuacaucgccacgaacggcccccucaagguggggggcagcugcguccuguccggccacaaccuggccaagcacugccuccacgugguggggcccaacgucaacaagggcgaggacauccagcugcugaagagcgccuacgagaacuucaaccagcacgaggugcuccuggcgccccugcucuccgccgggaucuucggcgccgacccgauccacagccugcgggugugcgucgacaccgugcgcaccaacguguaccuggccgucuucgacaagaaccucuacgacaagcugguguccagcuuccuggagaugaagagcgagaagcagguggagcagaagaucgccgagauccccaaggaggaggucaagcccuucaucaccgaguccaagcccagcguggagcagcggaagcaggacgacaagaagaucaaggcgugcguggaggaggucacgaccacccucgaggagaccaaguuccugacggagaaccugcuccuguacaucgacaucaacgggaaccugcacccggacuccgccacccucgugagcgacaucgacaucaccuuccugaagaaggacgcccccuacaucgugggcgacgucgugcaggagggcgugcugaccgccgucgugauccccacgaagaaggccgggggcaccaccgagaugcucgcgaaggcccugcgcaaggugcccaccgacaacuacaucacgaccuacccggggcagggccugaacggguacaccgucgaggaggccaagaccgugcucaagaagugcaaguccgccuucuacauccugcccagcaucaucuccaacgagaagcaggagauccugggcaccgugagcuggaaccuccgggagaugcuggcgcacgccgaggagacgcgcaagcugaugcccgucugcguggagaccaaggccaucguguccaccauccagcggaaguacaagggcaucaagauccaggagggggucguggacuacggcgcccgcuucuacuucuacaccagcaagacgaccguggccucccugaucaacacccucaacgaccugaacgagacccuggucacgaugccccucggguacgugacccacggccugaaccuggaggaggcggcccgguacaugcgcagccucaaggugccggccaccgucuccgugagcucccccgacgccgugaccgccuacaacggguaccugacgagcuccagcaagacccccgaggagcacuucaucgagaccaucucccuggcgggcagcuacaaggacuggagcuacuccggccagagcacccagcucgggaucgaguuccugaagcggggcgacaaguccgucuacuacacgagcaaccccaccaccuuccaccuggacggggaggugaucaccuucgacaaccucaagacgcugcugucccuccgcgaggugcggaccaucaaggucuucaccaccguggacaacaucaaccugcacacgcagguggucgacaugagcaugaccuacggccagcaguucggcccgaccuaccuggacggggccgacgugaccaagaucaagccccacaacucccacgagggcaagacguucuacgugcuccccaacgacgacacccugcgcgucgaggccuucgaguacuaccacaccaccgacccgagcuuccuggggcgguacauguccgcccucaaccacacgaagaaguggaaguacccccaggugaacggccugaccagcaucaagugggccgacaacaacugcuaccuggcgaccgcccuccugacccugcagcagaucgagcucaaguucaacccccccgcccugcaggacgccuacuaccgcgcgcgggccggggaggccgccaacuucugcgcccugauccucgcguacugcaacaagacggugggcgagcugggcgacguccgcgagaccauguccuaccuguuccagcacgccaaccucgacagcugcaagcgggugcugaacgucgugugcaagaccugcgggcagcagcagaccacccugaagggcguggaggccgucauguacauggggacgcucuccuacgagcaguucaagaagggcgugcagaucccgugcaccugcgggaagcaggccaccaaguaccuggugcagcaggagagccccuucgucaugauguccgccccccccgcgcaguacgagcugaagcacggcaccuucacgugcgccagcgaguacaccggcaacuaccagugcgggcacuacaagcacaucaccuccaaggagacccucuacugcaucgacggcgcccugcugacgaagagcagcgaguacaaggggccgaucaccgacguguucuacaaggagaacuccuacaccaccacgaucaagcccgugaccuacaagcucgacggcgucgugugcaccgagaucgaccccaagcuggacaacuacuacaagaaggacaacagcuacuucaccgagcagcccaucgaccuggugccgaaccagcccuaccccaacgccuccuucgacaacuucaaguucgucugcgacaacaucaaguucgccgacgaccucaaccagcugacgggguacaagaagcccgcgagccgcgagcugaaggugaccuucuucccggaccucaacggcgacguggucgccaucgacuacaagcacuacacccccuccuucaagaagggcgccaagcugcugcacaagcccaucguguggcacgugaacaacgccaccaacaaggcgacguacaagcccaacaccuggugcauccggugccucuggagcaccaagccggucgagaccuccaacagcuucgacgugcugaaguccgaggacgcccaggggauggacaaccuggccugcgaggaccucaagcccgugagcgaggaggucguggagaaccccacgauccagaaggacgugcuggagugcaacgucaagaccaccgagguggugggcgacaucauccugaagcccgccaacaacucccucaagaucaccgaggaggucgggcacacggaccugauggccgcguacguggacaacagcucccugaccaucaagaagccgaacgagcucagccgcgugcugggccugaagacccucgccacccacgggcuggccgccgucaacuccgugcccugggacacgaucgccaacuacgcgaagcccuuccugaacaagguggucagcaccaccaccaacaucgugacgcgcugccucaaccgggugugcaccaacuacaugccguacuucuucacccugcugcuccagcugugcaccuucacccgcuccacgaacagccggaucaaggccuccaugcccaccaccaucgccaagaacaccgucaagagcgugggcaaguucugccuggaggccagcuucaacuaccucaagucccccaacuucagcaagcugaucaacaucaucaucugguuccugcuccuguccgugugccugggcagccucaucuacuccacggccgcgcuggggguccugaugagcaaccucggcaugcccuccuacugcaccggguaccgcgagggcuaccugaacagcaccaacgugaccaucgccacguacugcaccggcuccaucccgugcagcgugugccuguccgggcucgacagccuggacaccuaccccucccuggagaccauccagaucacgaucagcuccuucaagugggaccucaccgccuucggccuggucgccgagugguuccuggccuacauccucuucacccgguucuucuacgugcuggggcuggcggccaucaugcagcucuucuucagcuacuucgccgugcacuucaucuccaacagcuggcugauguggcugaucaucaaccugguccagauggcccccaucuccgcgauggugcgcauguacaucuucuucgccagcuucuacuacguguggaagagcuacguccacgugguggacggcugcaacuccagcaccugcaugaugugcuacaagcggaaccgcgccacgcgggucgagugcaccaccaucgugaacgggguccgccgguccuucuacguguacgccaacggcggcaagggguucugcaagcuccacaacuggaacugcgugaacugcgacaccuucugcgccggcagcacguucaucuccgacgaggucgcgcgcgaccugagccugcaguucaagcggcccaucaacccgaccgaccaguccagcuacaucguggacuccgugaccgucaagaacgggagcauccaccucuacuucgacaaggccggccagaagaccuacgagcgccacucccugagccacuucgugaaccuggacaaccuccgggccaacaacacgaaggggucccugcccaucaacgugaucgucuucgacggcaagagcaagugcgaggaguccagcgccaaguccgccagcguguacuacucccagcugaugugccagcccauccuccugcuggaccaggcgcucgugagcgacgucggcgacagcgccgagguggccgugaagauguucgacgccuacgucaacaccuucuccagcaccuucaacgugcccauggagaagcugaagacccugguggccacggcggaggccgagcucgccaagaacgucucccuggacaacgugcugagcaccuucaucuccgccgcgcgccagggguucguggacagcgacgucgagaccaaggacgugguggagugccucaagcugucccaccagagcgacaucgaggucaccggcgacuccugcaacaacuacaugcugacguacaacaagguggagaacaugaccccgcgggaccucggggccugcaucgacugcagcgcccgccacaucaacgcccagguggccaagucccacaacaucgcgcugaucuggaacgucaaggacuucaugagccuguccgagcagcuccggaagcagauccgcagcgccgccaagaagaacaaccugcccuucaagcugaccugcgccaccacgcgccagguggugaacgucgugaccaccaagaucgcccucaagggcggguga

SEQ ID NO: 18167 - RNA, 5841 nt, Artificial Sequence
  SARS-CoV-2__MT517425.1__non-structural protein 3 (NSP3) CDS gc
auggcccccaccaaggugaccuucggcgacgacacggucaucgaggugcagggguacaagagcgugaacaucaccuucgagcuggacgagcgcaucgacaagguccucaacgagaagugcuccgccuacaccguggagcugggcaccgaggugaacgaguucgcgugcgucguggccgacgccgugaucaagacgcugcagccggucagcgagcuccugaccccccuggggaucgaccucgacgagugguccauggccaccuacuaccuguucgacgagagcggcgaguucaagcuggccucccacauguacugcagcuucuacccccccgacgaggacgaggaggagggggacugcgaggaggaggaguucgagccguccacccaguacgaguacggcacggaggacgacuaccagggcaagccccucgaguucggggcgaccagcgccgcccugcagcccgaggaggagcaggaggaggacuggcuggacgacgacucccagcagaccgugggccagcaggacgggagcgaggacaaccagaccacgaccauccagaccaucguggagguccagccccagcucgagauggagcugaccccgguggugcagacgaucgaggucaacuccuucagcggcuaccugaagcucaccgacaacguguacaucaagaacgccgacaucguggaggaggcgaagaaggucaagcccaccgugguggucaacgccgccaacguguaccugaagcacgggggcggcguggccggggcccugaacaaggcgaccaacaacgccaugcaggucgaguccgacgacuacaucgccacgaacggcccccucaagguggggggcagcugcguccuguccggccacaaccuggccaagcacugccuccacgugguggggcccaacgucaacaagggcgaggacauccagcugcugaagagcgccuacgagaacuucaaccagcacgaggugcuccuggcgccgcugcucuccgccgggaucuucggcgccgaccccauccacagccugcgggugugcgucgacaccgugcgcaccaacguguaccuggccgucuucgacaagaaccucuacgacaagcugguguccagcuuccuggagaugaagagcgagaagcagguggagcagaagaucgccgagauccccaaggaggaggucaagcccuucaucaccgaguccaagccgagcguggagcagcggaagcaggacgacaagaagaucaaggcgugcguggaggaggucacgaccacccucgaggagaccaaguuccugacggagaaccugcuccuguacaucgacaucaacgggaaccugcaccccgacuccgccacccucgugagcgacaucgacaucaccuuccugaagaaggacgcccccuacaucgugggcgacgucgugcaggagggcgugcugaccgccgucgugauccccacgaagaaggccgggggcaccaccgagaugcucgcgaaggcccugcgcaaggugccgaccgacaacuacaucacgaccuaccccgggcagggccugaacggguacaccgucgaggaggccaagaccgugcucaagaagugcaaguccgccuucuacauccugcccagcaucaucuccaacgagaagcaggagauccugggcaccgugagcuggaaccuccgggagaugcuggcgcacgccgaggagacgcgcaagcugaugcccgucugcguggagaccaaggccaucguguccaccauccagcggaaguacaagggcaucaagauccaggagggggucguggacuacggcgcccgcuucuacuucuacaccagcaagacgaccguggccucccugaucaacacccucaacgaccugaacgagacccuggucacgaugccgcucggguacgugacccacggccugaaccuggaggaggcggcccgguacaugcgcagccucaaggugcccgccaccgucuccgugagcucccccgacgccgugaccgccuacaacggguaccugacgagcuccagcaagacccccgaggagcacuucaucgagaccaucucccuggcgggcagcuacaaggacuggagcuacuccggccagagcacccagcucgggaucgaguuccugaagcggggcgacaaguccgucuacuacacgagcaacccgaccaccuuccaccuggacggggaggugaucaccuucgacaaccucaagacgcugcugucccuccgcgaggugcggaccaucaaggucuucaccaccguggacaacaucaaccugcacacgcagguggucgacaugagcaugaccuacggccagcaguucggccccaccuaccuggacggggccgacgugaccaagaucaagccccacaacucccacgagggcaagacguucuacgugcucccgaacgacgacacccugcgcgucgaggccuucgaguacuaccacaccaccgaccccagcuuccuggggcgguacauguccgcccucaaccacacgaagaaguggaaguacccccaggugaacggccugaccagcaucaagugggccgacaacaacugcuaccuggcgaccgcccuccugacccugcagcagaucgagcucaaguucaaccccccggcccugcaggacgccuacuaccgcgcgcgggccggggaggccgccaacuucugcgcccugauccucgcguacugcaacaagacggugggcgagcugggcgacguccgcgagaccauguccuaccuguuccagcacgccaaccucgacagcugcaagcgggugcugaacgucgugugcaagaccugcgggcagcagcagaccacccugaagggcguggaggccgucauguacauggggacgcucuccuacgagcaguucaagaagggcgugcagauccccugcaccugcgggaagcaggccaccaaguaccuggugcagcaggagagccccuucgucaugauguccgcccccccggcgcaguacgagcugaagcacggcaccuucacgugcgccagcgaguacaccggcaacuaccagugcgggcacuacaagcacaucaccuccaaggagacccucuacugcaucgacggcgcccugcugacgaagagcagcgaguacaaggggcccaucaccgacguguucuacaaggagaacuccuacaccaccacgaucaagcccgugaccuacaagcucgacggcgucgugugcaccgagaucgaccccaagcuggacaacuacuacaagaaggacaacagcuacuucaccgagcagccgaucgaccuggugcccaaccagcccuaccccaacgccuccuucgacaacuucaaguucgucugcgacaacaucaaguucgccgacgaccucaaccagcugacgggguacaagaagccggcgagccgcgagcugaaggugaccuucuuccccgaccucaacggcgacguggucgccaucgacuacaagcacuacacccccuccuucaagaagggcgccaagcugcugcacaagcccaucguguggcacgugaacaacgccaccaacaaggcgacguacaagccgaacaccuggugcauccggugccucuggagcaccaagcccgucgagaccuccaacagcuucgacgugcugaaguccgaggacgcccaggggauggacaaccuggccugcgaggaccucaagcccgugagcgaggaggucguggagaaccccacgauccagaaggacgugcuggagugcaacgucaagaccaccgagguggugggcgacaucauccugaagccggccaacaacucccucaagaucaccgaggaggucgggcacacggaccugaugguggccuacguggacaacagcucccugaccaucaagaagcccaacgagcucagccgcguccugggccugaagacccucgcgacccacgggcuggccgccgugaacuccgugcccugggacacgaucgccaacuacgccaagccguuccugaacaaggucgugagcaccaccaccaacaucgugacgcgcugccucaaccgggucugcaccaacuacaugcccuacuucuucacccugcugcuccagcugugcaccuucacccgcuccacgaacagccggaucaaggcguccaugcccaccaccaucgccaagaacaccgugaagagcgugggcaaguucugccuggaggccagcuucaacuaccucaagucccccaacuucagcaagcugaucaacaucaucaucugguuccugcuccuguccgucugccugggcagccucaucuacuccacggccgcccugggggugcugaugagcaaccucggcaugccguccuacugcaccggguaccgcgagggcuaccugaacagcaccaacgugaccaucgcgacguacugcaccggcuccauccccugcagcgucugccuguccgggcucgacagccuggacaccuaccccucccuggagaccauccagaucacgaucagcuccuucaagugggaccucaccgccuucggccugguggccgagugguuccuggccuacauccucuucacccgguucuucuacgugcuggggcuggccgcgaucaugcagcucuucuucagcuacuucgccguccacuucaucuccaacagcuggcugauguggcugaucaucaaccuggugcagauggcccccaucuccgccauggugcgcauguacaucuucuucgcgagcuucuacuacgucuggaagagcuacgugcacguggucgacggcugcaacuccagcaccugcaugaugugcuacaagcggaaccgcgccacgcggguggagugcaccaccaucgucaacggggugcgccgguccuucuacguguacgccaacggcggcaagggguucugcaagcuccacaacuggaacugcgucaacugcgacaccuucugcgccggcagcacguucaucuccgacgagguggcccgcgaccugagccugcaguucaagcggccgaucaaccccaccgaccaguccagcuacaucguggacuccgucaccgugaagaacgggagcauccaccucuacuucgacaaggcgggccagaagaccuacgagcgccacucccugagccacuucgugaaccuggacaaccuccgggccaacaacacgaaggggucccugcccaucaacgucaucguguucgacggcaagagcaagugcgaggaguccagcgccaaguccgccagcguguacuacucccagcugaugugccagcccauccuccugcuggaccaggcccucgucagcgacgugggcgacagcgcggagguggccgucaagauguucgacgccuacgugaacaccuucuccagcaccuucaacgugccgauggagaagcugaagacccuggucgccacggccgaggcggagcucgccaagaacgugucccuggacaacgugcugagcaccuucaucuccgccgcccgccagggguucgucgacagcgacguggagaccaaggacguggucgagugccucaagcugucccaccagagcgacaucgaggugaccggcgacuccugcaacaacuacaugcugacguacaacaagguggagaacaugaccccccgggaccucggggcgugcaucgacugcagcgcccgccacaucaacgcccaggucgccaagucccacaacaucgcccugaucuggaacgugaaggacuucaugagccuguccgagcagcuccggaagcagauccgcagcgcggccaagaagaacaaccugcccuucaagcugaccugcgccaccacgcgccagguggucaacguggugaccaccaagaucgcccucaagggcggguga

SEQ ID NO: 18168 - RNA, 5841 nt, Artificial Sequence
  SARS-CoV-2__MT517427.1__non-structural protein 3 (NSP3) CDS gc
auggcccccaccaaggugaccuucggcgacgacacggucaucgaggugcagggguacaagagcgugaacaucaccuucgagcuggacgagcgcaucgacaagguccucaacgagaagugcuccgccuacaccguggagcugggcaccgaggugaacgaguucgcgugcgucguggccgacgccgugaucaagacgcugcagccggucagcgagcuccugaccccccuggggaucgaccucgacgagugguccauggccaccuacuaccuguucgacgagagcggcgaguucaagcuggccucccacauguacugcagcuucuacccccccgacgaggacgaggaggagggggacugcgaggaggaggaguucgagccguccacccaguacgaguacggcacggaggacgacuaccagggcaagccccucgaguucggggcgaccagcgccgcccugcagcccgaggaggagcaggaggaggacuggcuggacgacgacucccagcagaccgugggccagcaggacgggagcgaggacaaccagaccacgaccauccagaccaucguggagguccagccccagcucgagauggagcugaccccgguggugcagacgaucgaggucaacuccuucagcggcuaccugaagcucaccgacaacguguacaucaagaacgccgacaucguggaggaggcgaagaaggucaagcccaccgugguggucaacgccgccaacguguaccugaagcacgggggcggcguggccggggcccugaacaaggcgaccaacaacgccaugcaggucgaguccgacgacuacaucgccacgaacggcccccucaagguggggggcagcugcguccuguccggccacaaccuggccaagcacugccuccacgugguggggcccaacgucaacaagggcgaggacauccagcugcugaagagcgccuacgagaacuucaaccagcacgaggugcuccuggcgccgcugcucuccgccgggaucuucggcgccgaccccauccacagccugcggguguucgucgacaccgugcgcaccaacguguaccuggccgucuucgacaagaaccucuacgacaagcugguguccagcuuccuggagaugaagagcgagaagcagguggagcagaagaucgccgagauccccaaggaggaggucaagcccuucaucaccgaguccaagccgagcguggagcagcggaagcaggacgacaagaagaucaaggcgugcguggaggaggucacgaccacccucgaggagaccaaguuccugacggagaaccugcuccuguacaucgacaucaacgggaaccugcaccccgacuccgccacccucgugagcgacaucgacaucaccuuccugaagaaggacgcccccuacaucgugggcgacgucgugcaggagggcgugcugaccgccgucgugauccccacgaagaaggccgggggcaccaccgagaugcucgcgaaggcccugcgcaaggugccgaccgacaacuacaucacgaccuaccccgggcagggccugaacggguacaccgucgaggaggccaagaccgugcucaagaagugcaaguccgccuucuacauccugcccagcaucaucuccaacgagaagcaggagauccugggcaccgugagcuggaaccuccgggagaugcuggcgcacgccgaggagacgcgcaagcugaugcccgucugcguggagaccaaggccaucguguccaccauccagcggaaguacaagggcaucaagauccaggagggggucguggacuacggcgcccgcuucuacuucuacaccagcaagacgaccguggccucccugaucaacacccucaacgaccugaacgagacccuggucacgaugccgcucggguacgugacccacggccugaaccuggaggaggcggcccgguacaugcgcagccucaaggugcccgccaccgucuccgugagcucccccgacgccgugaccgccuacaacggguaccugacgagcuccagcaagacccccgaggagcacuucaucgagaccaucucccuggcgggcagcuacaaggacuggagcuacuccggccagagcacccagcucgggaucgaguuccugaagcggggcgacaaguccgucuacuacacgagcaacccgaccaccuuccaccuggacggggaggugaucaccuucgacaaccucaagacgcugcugucccuccgcgaggugcggaccaucaaggucuucaccaccguggacaacaucaaccugcacacgcagguggucgacaugagcaugaccuacggccagcaguucggccccaccuaccuggacggggccgacgugaccaagaucaagccccacaacucccacgagggcaagacguucuacgugcucccgaacgacgacacccugcgcgucgaggccuucgaguacuaccacaccaccgaccccagcuuccuggggcgguacauguccgcccucaaccacacgaagaaguggaaguacccccaggugaacggccugaccagcaucaagugggccgacaacaacugcuaccuggcgaccgcccuccugacccugcagcagaucgagcucaaguucaaccccccggcccugcaggacgccuacuaccgcgcgcgggccggggaggccgccaacuucugcgcccugauccucgcguacugcaacaagacggugggcgagcugggcgacguccgcgagaccauguccuaccuguuccagcacgccaaccucgacagcugcaagcgggugcugaacgucgugugcaagaccugcgggcagcagcagaccacccugaagggcguggaggccgucauguacauggggacgcucuccuacgagcaguucaagaagggcgugcagauccccugcaccugcgggaagcaggccaccaaguaccuggugcagcaggagagccccuucgucaugauguccgcccccccggcgcaguacgagcugaagcacggcaccuucacgugcgccagcgaguacaccggcaacuaccagugcgggcacuacaagcacaucaccuccaaggagacccucuacugcaucgacggcgcccugcugacgaagagcagcgaguacaaggggcccaucaccgacguguucuacaaggagaacuccuacaccaccacgaucaagcccgugaccuacaagcucgacggcgucgugugcaccgagaucgaccccaagcuggacaacuacuacaagaaggacaacagcuacuucaccgagcagccgaucgaccuggugcccaaccagcccuaccccaacgccuccuucgacaacuucaaguucgucugcgacaacaucaaguucgccgacgaccucaaccagcugacgggguacaagaagccggcgagccgcgagcugaaggugaccuucuuccccgaccucaacggcgacguggucgccaucgacuacaagcacuacacccccuccuucaagaagggcgccaagcugcugcacaagcccaucguguggcacgugaacaacgccaccaacaaggcgacguacaagccgaacaccuggugcauccggugccucuggagcaccaagcccgucgagaccuccaacagcuucgacgugcugaaguccgaggacgcccaggggauggacaaccuggccugcgaggaccucaagcccgugagcgaggaggucguggagaaccccacgauccagaaggacgugcuggagugcaacgucaagaccaccgagguggugggcgacaucauccugaagccggccaacaacucccucaagaucaccgaggaggucgggcacacggaccugauggccgcguacguggacaacagcucccugaccaucaagaagcccaacgagcucagccgcgugcugggccugaagacccucgccacccacgggcuggccgccgucaacuccgugcccugggacacgaucgccaacuacgcgaagccguuccugaacaagguggucagcaccaccaccaacaucgugacgcgcugccucaaccgggugugcaccaacuacaugcccuacuucuucacccugcugcuccagcugugcaccuucacccgcuccacgaacagccggaucaaggccuccaugcccaccaccaucgccaagaacaccgucaagagcgugggcaaguucugccuggaggccagcuucaacuaccucaagucccccaacuucagcaagcugaucaacaucaucaucugguuccugcuccuguccgugugccugggcagccucaucuacuccacggccgcgcuggggguccugaugagcaaccucggcaugccguccuacugcaccggguaccgcgagggcuaccugaacagcaccaacgugaccaucgccacguacugcaccggcuccauccccugcagcgugugccuguccgggcucgacagccuggacaccuaccccucccuggagaccauccagaucacgaucagcuccuucaagugggaccucaccgccuucggccuggucgccgagugguuccuggccuacauccucuucacccgguucuucuacgugcuggggcuggcggccaucaugcagcucuucuucagcuacuucgccgugcacuucaucuccaacagcuggcugauguggcugaucaucaaccugguccagauggcccccaucuccgcgauggugcgcauguacaucuucuucgccagcuucuacuacguguggaagagcuacguccacgugguggacggcugcaacuccagcaccugcaugaugugcuacaagcggaaccgcgccacgcgggucgagugcaccaccaucgugaacgggguccgccgguccuucuacguguacgccaacggcggcaagggguucugcaagcuccacaacuggaacugcgugaacugcgacaccuucugcgccggcagcacguucaucuccgacgaggucgcgcgcgaccugagccugcaguucaagcggccgaucaaccccaccgaccaguccagcuacaucguggacuccgugaccgucaagaacgggagcauccaccucuacuucgacaaggccggccagaagaccuacgagcgccacucccugagccacuucgugaaccuggacaaccuccgggccaacaacacgaaggggucccugcccaucaacgugaucgucuucgacggcaagagcaagugcgaggaguccagcgccaaguccgccagcguguacuacucccagcugaugugccagcccauccuccugcuggaccaggcgcucgugagcgacgucggcgacagcgccgagguggccgugaagauguucgacgccuacgucaacaccuucuccagcaccuucaacgugccgauggagaagcugaagacccugguggccacggcggaggccgagcucgccaagaacgucucccuggacaacgugcugagcaccuucaucuccgccgcgcgccagggguucguggacagcgacgucgagaccaaggacgugguggagugccucaagcugucccaccagagcgacaucgaggucaccggcgacuccugcaacaacuacaugcugacguacaacaagguggagaacaugaccccccgggaccucggggccugcaucgacugcagcgcccgccacaucaacgcccagguggccaagucccacaacaucgcgcugaucuggaacgucaaggacuucaugagccuguccgagcagcuccggaagcagauccgcagcgccgccaagaagaacaaccugcccuucaagcugaccugcgccaccacgcgccagguggugaacgucgugaccaccaagaucgcccucaagggcggguga

SEQ ID NO: 18169 - RNA, 5841 nt, Artificial Sequence
  SARS-CoV-2__MT511066.1__non-structural protein 3 (NSP3) CDS gc
auggcccccaccaaggugaccuucggcgacgacacggucaucgaggugcagggguacaagagcgugaacaucaccuucgagcuggacgagcgcaucgacaagguccucaacgagaagugcuccgccuacaccguggagcugggcaccgaggugaacgaguucgcgugcgucguggccgacgccgugaucaagacgcugcagccggucagcgagcuccugaccccccuggggaucgaccucgacgagugguccauggccaccuacuaccuguucgacgagagcggcgaguucaagcuggccucccacauguacugcagcuucuacccccccgacgaggacgaggaggagggggacugcgaggaggaggaguucgagccguccacccaguacgaguacggcacggaggacgacuaccagggcaagccccucgaguucggggcgaccagcgccgcccugcagcccgaggaggagcaggaggaggacuggcuggacgacgacucccagcagaccgugggccagcaggacgggagcgaggacaaccagaccacgaccauccagaccaucguggagguccagccccagcucgagauggagcugaccccgguggugcagacgaucgaggucaacuccuucagcggcuaccugaagcucaccgacaacguguacaucaagaacgccgacaucguggaggaggcgaagaaggucaagcccaccgugguggucaacgccgccaacguguaccugaagcacgggggcggcguggccggggcccugaacaaggcgaccaacaacgccaugcaggucgaguccgacgacuacaucgccacgaacggcccccucaagguggggggcagcugcguccuguccggccacaaccuggccaagcacugccuccacgugguggggcccaacgucaacaagggcgaggacauccagcugcugaagagcgccuacgagaacuucaaccagcacgaggugcuccuggcgccgcugcucuccgccgggaucuucggcgccgaccccauccacagccugcgggugugcgucgacaccgugcgcaccaacguguaccuggccgucuucgacaagaaccucuacgacaagcugguguccagcuuccuggagaugaagagcgagaagcagguggagcagaagaucgccgagauccccaaggaggaggucaagcccuucaucaccgaguccaagccgagcguggagcagcggaagcaggacgacaagaagaucaaggcgugcguggaggaggucacgaccacccucgaggagaccaaguuccugacggagaaccugcuccuguacaucgacaucaacgggaaccugcaccccgacuccgccacccucgugagcgacaucgacaucaccuuccugaagaaggacgcccccuacaucgugggcgacgucgugcaggagggcgugcugaccgccgucgugauccccacgaagaaggccgggggcaccaccgagaugcucgcgaaggcccugcgcaaggugccgaccgacaacuacaucacgaccuaccccgggcagggccugaacggguacaccgucgaggaggccaagaccgugcucaagaagugcaaguccgccuucuacauccugcccagcaucaucuccaacgagaagcaggagauccugggcaccgugagcuggaaccuccgggagaugcuggcgcacgccgaggagacgcgcaagcugaugcccgucugcguggagaccaaggccaucguguccaccauccagcggaaguacaagggcaucaagauccaggagggggucguggacuacggcgcccgcuucuacuucuacaccagcaagacgaccguggccucccugaucaacacccucaacgaccugaacgagacccuggucacgaugccgcucggguacgugacccacggccugaaccuggaggaggcggcccgguacaugcgcagccucaaggugcccgccaccgucuccgugagcucccccgacgccgugaccgccuacaacggguaccugacgagcuccagcaagacccccgaggagcacuucaucgagaccaucucccuggcgggcagcuacaaggacuggagcuacuccggccagagcacccagcucgggaucgaguuccugaagcggggcgacaaguccgucuacuacacgagcaacccgaccaccuuccaccuggacggggaggugaucaccuucgacaaccucaagacgcugcugucccuccgcgaggugcggaccaucaaggucuucaccaccguggacaacaucaaccugcacacgcagguggucgacaugagcaugaccuacggccagcaguucggccccaccuaccuggacggggccgacgugaccaagaucaagccccacaacucccacgagggcaagacguucuacgugcucccgaacgacgacacccugcgcgucgaggccuucgaguacuaccacaccaccgaccccagcuuccuggggcgguacauguccgcccucaaccacacgaagaaguggaaguacccccaggugaacggccugaccagcaucaagugggccgacaacaacugcuaccuggcgaccgcccuccugacccugcagcagaucgagcucaaguucaaccccccggcccugcaggacgccuacuaccgcgcgcgggccggggaggccgccaacuucugcgcccugauccucgcguacugcaacaagacggugggcgagcugggcgacguccgcgagaccauguccuaccuguuccagcacgccaaccucgacagcugcaagcgggugcugaacgucgugugcaagaccugcgggcagcagcagaccacccugaagggcguggaggccgucauguacauggggacgcucuccuacgagcaguucaagaagggcgugcagauccccugcaccugcgggaagcaggccaccaaguaccuggugcagcaggagagccccuucgucaugauguccgcccccccggcgcaguacgagcugaagcacggcaccuucacgugcgccagcgaguacaccggcaacuaccagugcgggcacuacaagcacaucaccuccaaggagacccucuacugcaucgacggcgcccugcugacgaagagcagcgaguacaaggggcccaucaccgacguguucuacaaggagaacuccuacaccaccacgaucaagcccgugaccuacaagcucgacggcgucgugugcaccgagaucgaccccaagcuggacaacuacuacaagaaggacaacagcuacuucaccgagcagccgaucgaccuggugcccaaccagcccuaccccaacgccuccuucgacaacuucaaguucgucugcgacaacaucaaguucgccgacgaccucaaccagcugacgggguacaagaagccggcgagccgcgagcugaaggugaccuucuuccccgaccucaacggcgacguggucgccaucgacuacaagcacuacacccccuccuucaagaagggcgccaagcugcugcacaagcccaucguguggcacgugaacaacgccaccaacaaggcgacguacaagccgaacaccuggugcauccggugccucuggagcaccaagcccgucgagaccuccaacagcuucgacgugcugaaguccgaggacgcccaggggauggacaaccuggccugcgaggaccucaagcccgugagcgaggaggucguggagaaccccacgauccagaaggacgugcuggagugcaacgucaagaccaccgagguggugggcgacaucauccugaagccggccaacaacucccucaagaucaccgaggaggucgggcacacggaccugauggccgcguacguggacaacagcucccugaccaucaagaagcccaacgagcucagccgcgugcugggccugaagacccucgccacccacgggcuggccgccgucaacuccgugcccugggacacgaucgccaacuacgcgaagccguuccugaacaagguggucagcaccaccaccaacaucgugacgcgcugccucaaccgggugugcaccaacuacaugcccuacuucuucacccugcugcuccagcugugcaccuucacccgcuccacgaacagccggaucaaggccuccaugcccaccaccaucgccaagaacaccgucaagagcgugggcaaguucugccuggaggccagcuucaacuaccucaagucccccaacuucagcaagcugaucaacaucaucaucugguuccugcuccuguccgugugccugggcagccucaucuacuccacggccgcgcuggggguccugaugagcaaccucggcaugccguccuacugcaccggguaccgcgagggcuaccugaacagcaccaacgugaccaucgccacguacugcaccggcuccauccccugcagcgugugccuguccgggcucgacagccuggacaccuaccccucccuggagaccauccagaucacgaucagcuccuucaagugggaccucaccgccuucggccuggucgccgagugguuccuggccuacauccucuucacccgguucuucuacgugcuggggcuggcggccaucaugcagcucuucuucagcuacuucgccgugcacuucaucuccaacagcuggcugauguggcugaucaucaaccugguccagauggcccccaucuccgcgauggugcgcauguacaucuucuucgccagcuucuacuacguguggaagagcuacguccacgugguggacggcugcaacuccagcaccugcaugaugugcuacaagcggaaccgcgccacgcgggucgagugcaccaccaucgugaacgggguccgccgguccuucuacguguacgccaacggcggcaagggguucugcaagcuccacaacuggaacugcgugaacugcgacaccuucugcgccggcagcacguucaucuccgacgaggucgcgcgcgaccugagccugcaguucaagcggccgaucaaccccaccgaccaguccagcuacaucguggacuccgugaccgucaagaacgggagcauccaccucuacuucgacaaggccggccagaagaccuacgagcgccacucccugagccacuucgugaaccuggacaaccuccgggccaacaacacgaaggggucccugcccaucaacgugaucgucuucgacggcaagagcaagugcgaggaguccagcgccaaguccgccagcguguacuacucccagcugaugugccagcccauccuccugcuggaccaggcgcucgugagcgacgucggcgacagcgccgagguggccgugaagauguucgacgccuacgucaacaccuucuccagcaccuucgacgugccgauggagaagcugaagacccugguggccacggcggaggccgagcucgccaagaacgucucccuggacaacgugcugagcaccuucaucuccgccgcgcgccagggguucguggacagcgacgucgagaccaaggacgugguggagugccucaagcugucccaccagagcgacaucgaggucaccggcgacuccugcaacaacuacaugcugacguacaacaagguggagaacaugaccccccgggaccucggggccugcaucgacugcagcgcccgccacaucaacgcccagguggccaagucccacaacaucgcgcugaucuggaacgucaaggacuucaugagccuguccgagcagcuccggaagcagauccgcagcgccgccaagaagaacaaccugcccuucaagcugaccugcgccaccacgcgccagguggugaacgucgugaccaccaagaucgcccucaagggcggguga

SEQ ID NO: 18170 - RNA, 5841 nt, Artificial Sequence
  SARS-CoV-2__MT511068.1__non-structural protein 3 (NSP3) CDS gc
auggcccccaccaaggugaccuucggcgacgacacggucaucgaggugcagggguacaagagcgugaacaucaccuucgagcuggacgagcgcaucgacaagguccucaacgagaagugcuccgccuacaccguggagcugggcaccgaggugaacgaguucgcgugcgucguggccgacgccgugaucaagacgcugcagccggucagcgagcuccugaccccccuggggaucgaccucgacgagugguccauggccaccuacuaccuguucgacgagagcggcgaguucaagcuggccucccacauguacugcagcuucuacccccccgacgaggacgaggaggagggggacugcgaggaggaggaguucgagccguccacccaguacgaguacggcacggaggacgacuaccagggcaagccccucgaguucggggcgaccagcgccgcccugcagcccgaggaggagcaggaggaggacuggcuggacgacgacucccagcagaccgugggccagcaggacgggagcgaggacaaccagaccacgaccauccagaccaucguggagguccagccccagcucgagauggagcugaccccgguggugcagacgaucgaggucaacuccuucagcggcuaccugaagcucaccgacaacguguacaucaagaacgccgacaucguggaggaggcgaagaaggucaagcccaccgugguggucaacgccgccaacguguaccugaagcacgggggcggcguggccggggcccugaacaaggcgaccaacaacgccaugcaggucgaguccgacgacuacaucgccacgaacggcccccucaagguggggggcagcugcguccuguccggccacaaccuggccaagcacugccuccacgugguggggcccaacgucaacaagggcgaggacauccagcugcugaagagcgccuacgagaacuucaaccagcacgaggugcuccuggcgccgcugcucuccgccgggaucuucggcgccgaccccauccacagccugcgggugugcgucgacaccgugcgcaccaacguguaccuggccgucuucgacaagaaccucuacgacaagcugguguccagcuuccuggagaugaagagcgagaagcagguggagcagaagaucgccgagauccccaaggaggaggucaagcccuucaucaccgaguccaagccgagcguggagcagcggaagcaggacgacaagaagaucaaggcgugcguggaggaggucacgaccacccucgaggagaccaaguuccugacggagaaccugcuccuguacaucgacaucaacgggaaccugcaccccgacuccgccacccucgugagcgacaucgacaucaccuuccugaagaaggacgcccccuacaucgugggcgacgucgugcaggagggcgugcugaccgccgucgugauccccacgaagaaggccgggggcaccaccgagaugcucgcgaaggcccugcgcaaggugccgaccgacaacuacaucacgaccuaccccgggcagggccugaacggguacaccgucgaggaggccaagaccgugcucaagaagugcaaguccgccuucuacauccugcccagcaucaucuccaacgagaagcaggagauccugggcaccgugagcuggaaccuccgggagaugcuggcgcacgccgaggagacgcgcaagcugaugcccgucugcguggagaccaaggccaucguguccaccauccagcggaaguacaagggcaucaagauccaggagggggucguggacuacggcgcccgcuucuacuucuacaccagcaagacgaccguggccucccugaucaacacccucaacgaccugaacgagacccuggucacgaugccgcucggguacgugacccacggccugaaccuggaggaggcggcccgguacaugcgcagccucaaggugcccgccaccgucuccgugagcucccccgacgccgugaccgccuacaacggguaccugacgagcuccagcaagacccccgaggagcacuucaucgagaccaucucccuggcgggcagcuacaaggacuggagcuacuccggccagagcacccagcucgggaucgaguuccugaagcggggcgacaaguccgucuacuacacgagcaacccgaccaccuuccaccuggacggggaggugaucaccuucgacaaccucaagacgcugcugucccuccgcgaggugcggaccaucaaggucuucaccaccguggacaacaucaaccugcacacgcagguggucgacaugagcaugaccuacggccagcaguucggccccaccuaccuggacggggccgacgugaccaagaucaagccccacaacucccacgagggcaagacguucuacgugcucccgaacgacgacacccugcgcgucgaggccuucgaguacuaccacaccaccgaccccagcuuccuggggcgguacauguccgcccucaaccacacgaagaaguggaaguacccccaggugaacggccugaccagcaucaagugggccgacaacaacugcuaccuggcgaccgcccuccugacccugcagcagaucgagcucaaguucaaccccccggcccugcaggacgccuacuaccgcgcgcgggccggggaggccgccaacuucugcgcccugauccucgcguacugcaacaagacggugggcgagcugggcgacguccgcgagaccauguccuaccuguuccagcacgccaaccucgacagcugcaagcgggugcugaacgucgugugcaagaccugcgggcagcagcagaccacccugaagggcguggaggccgucauguacauggggacgcucuccuacgagcaguucaagaagggcgugcagauccccugcaccugcgggaagcaggccaccaaguaccuggugcagcaggagagccccuucgucaugauguccgcccccccggcgcaguacgagcugaagcacggcaccuucacgugcgccagcgaguacaccggcaacuaccagugcgggcacuacaagcacaucaccuccaaggagacccucuacugcaucgacggcgcccugcugacgaagagcagcgaguacaaggggcccaucaccgacguguucuacaaggagaacuccuacaccaccacgaucaagcccgugaccuacaagcucgacggcgucgugugcaccgagaucgaccccaagcuggacaacuacuacaagaaggacaacagcuacuucaccgagcagccgaucgaccuggugcccaaccagcccuaccccaacgccuccuucgacaacuucaaguucgucugcgacaacaucaaguucgccgacgaccucaaccagcugacgggguacaagaagccggcgagccgcgagcugaaggugaccuucuuccccgaccucaacggcgacguggucgccaucgacuacaagcacuacacccccuccuucaagaagggcgccaagcugcugcacaagcccaucguguggcacgugaacaacgccaccaacaaggcgacguacaagccgaacaccuggugcauccggugccucuggagcaccaagcccgucgagaccuccaacagcuucgacgugcugaaguccgaggacgcccaggggauggacaaccuggccugcgaggaccucaagcccgugagcgaggaggucguggagaaccccacgauccagaaggacgugcuggagugcaacgucaagaccaccgagguggugggcgacaucauccugaagccggccaacaacucccucaagaucaccgaggaggucgggcacacggaccugauggccgcguacguggacaacagcucccugaccaucaagaagcccaacgagcucagccgcgugcugggccugaagacccucgccacccacgggcuggccgccgucaacuccgugcccugggacacgaucgccaacuacgcgaagccguuccugaacaagguggucagcaccaccaccaacaucgugacgcgcugccucaaccgggugugcaccaacuacaugcccuacuucuucacccugcugcuccagcugugcaccuucacccgcuccacgaacagccggaucaaggccuccaugcccaccaccaucgccaagaacaccgucaagagcgugggcaaguucugccuggaggccagcuucaacuaccucaagucccccaacuucagcaagcugaucaacaucaucaucugguuccugcuccuguccgugugccugggcagccucaucuacuccacggccgcgcuggggguccugaugagcaaccucggcaugccguccuacugcaccggguaccgcgagggcuaccugaacagcaccaacgugaccaucgccacguacugcaccggcuccauccccugcagcgugugccuguccgggcucgacagccuggacaccuaccccucccuggagaccauccagaucacgaucagcuccuucaagugggaccucaccgccuucggccuggucgccgagugguuccuggccuacauccucuucacccgguucuucuacgugcuggggcuggcggccaucaugcagcucuucuucagcuacuucgccgugcacuucaucuccaacagcuggcugauguggcugaucaucaaccugguccagauggcccccaucuccgcgauggugcgcauguacaucuucuucgccagcuucuacuacguguggaagagcuacguccacgugguggacggcugcaacuccagcaccugcaugaugugcuacaagcggaaccgcgccacgcgggucgagugcaccaccaucgugaacgggguccgccgguccuucuacguguacgccaacggcggcaagggguucugcaagcuccacaacuggaacugcgugaacugcgacaccuucugcgccggcagcacguucaucuccgacgaggucgcgcgcgaccugagccugcaguucaagcggccgaucaaccccaccgaccaguccagcuacaucguggacuccgugaccgucaagaacgggagcauccaccucuacuucgacaaggccggccagaagaccuacgagcgccacucccugagccacuucgugaaccuggacaaccuccgggccaacaacacgaaggggucccugcccaucaacgugaucgucuucgacggcaagagcaagugcgaggaguccagcgccaaguccgccagcguguacuacucccagcugaugugccagcccauccuccugcuggaccaggcgcucgugagcgacgucggcgacagcgccgaggugguggucaagauguucgacgccuacgugaacaccuucuccagcaccuucgacgugccgauggagaagcugaagacccuggucgccacggccgaggcggagcucgccaagaacgugucccuggacaacgugcugagcaccuucaucuccgccgcccgccagggguucgucgacagcgacguggagaccaaggacguggucgagugccucaagcugucccaccagagcgacaucgaggugaccggcgacuccugcaacaacuacaugcugacguacaacaagguggagaacaugaccccccgggaccucggggcgugcaucgacugcagcgcccgccacaucaacgcccaggucgccaagucccacaacaucgcccugaucuggaacgugaaggacuucaugagccuguccgagcagcuccggaagcagauccgcagcgcggccaagaagaacaaccugcccuucaagcugaccugcgccaccacgcgccagguggucaacguggugaccaccaagaucgcccucaagggcggguga

SEQ ID NO: 18171 - RNA, 5841 nt, Artificial Sequence
  SARS-CoV-2__MT511069.1__non-structural protein 3 (NSP3) CDS gc
auggcccccaccaaggugaccuucggcgacgacacggucaucgaggugcagggguacaagagcgugaacaucaccuucgagcuggacgagcgcaucgacaagguccucaacgagaagugcuccgccuacaccguggagcugggcaccgaggugaacgaguucgcgugcgucguggccgacgccgugaucaagacgcugcagccggucagcgagcuccugaccccccuggggaucgaccucgacgagugguccauggccaccuacuaccuguucgacgagagcggcgaguucaagcuggccucccacauguacugcagcuucuacccccccgacgaggacgaggaggagggggacugcgaggaggaggaguucgagccguccacccaguacgaguacggcacggaggacgacuaccagggcaagccccucgaguucggggcgaccagcgccgcccugcagcccgaggaggagcaggaggaggacuggcuggacgacgacucccagcagaccgugggccagcaggacgggagcgaggacaaccagaccacgaccauccagaccaucguggagguccagccccagcucgagauggagcugaccccgguggugcagacgaucgaggucaacuccuucagcggcuaccugaagcucaccgacaacguguacaucaagaacgccgacaucguggaggaggcgaagaaggucaagcccaccgugguggucaacgccgccaacguguaccugaagcacgggggcggcguggccggggcccugaacaaggcgaccaacaacgccaugcaggucgaguccgacgacuacaucgccacgaacggcccccucaagguggggggcagcugcguccuguccggccacaaccuggccaagcacugccuccacgugguggggcccaacgucaacaagggcgaggacauccagcugcugaagagcgccuacgagaacuucaaccagcacgaggugcuccuggcgccgcugcucuccgccgggaucuucggcgccgaccccauccacagccugcgggugugcgucgacaccgugcgcaccaacguguaccuggccgucuucgacaagaaccucuacgacaagcugguguccagcuuccuggagaugaagagcgagaagcagguggagcagaagaucgccgagauccccaaggaggaggucaagcccuucaucaccgaguccaagccgagcguggagcagcggaagcaggacgacaagaagaucaaggcgugcguggaggaggucacgaccacccucgaggagaccaaguuccugacggagaaccugcuccuguacaucgacaucaacgggaaccugcaccccgacuccgccacccucgugagcgacaucgacaucaccuuccugaagaaggacgcccccuacaucgugggcgacgucgugcaggagggcgugcugaccgccgucgugauccccacgaagaacgccgggggcaccaccgagaugcucgcgaaggcccugcgcaaggugccgaccgacaacuacaucacgaccuaccccgggcagggccugaacggguacaccgucgaggaggccaagaccgugcucaagaagugcaaguccgccuucuacauccugcccagcaucaucuccaacgagaagcaggagauccugggcaccgugagcuggaaccuccgggagaugcuggcgcacgccgaggagacgcgcaagcugaugcccgucugcguggagaccaaggccaucguguccaccauccagcggaaguacaagggcaucaagauccaggagggggucguggacuacggcgcccgcuucuacuucuacaccagcaagacgaccguggccucccugaucaacacccucaacgaccugaacgagacccuggucacgaugccgcucggguacgugacccacggccugaaccuggaggaggcggcccgguacaugcgcagccucaaggugcccgccaccgucuccgugagcucccccgacgccgugaccgccuacaacggguaccugacgagcuccagcaagacccccgaggagcacuucaucgagaccaucucccuggcgggcagcuacaaggacuggagcuacuccggccagagcacccagcucgggaucgaguuccugaagcggggcgacaaguccgucuacuacacgagcaacccgaccaccuuccaccuggacggggaggugaucaccuucgacaaccucaagacgcugcugucccuccgcgaggugcggaccaucaaggucuucaccaccguggacaacaucaaccugcacacgcagguggucgacaugagcaugaccuacggccagcaguucggccccaccuaccuggacggggccgacgugaccaagaucaagccccacaacucccacgagggcaagacguucuacgugcucccgaacgacgacacccugcgcgucgaggccuucgaguacuaccacaccaccgaccccagcuuccuggggcgguacauguccgcccucaaccacacgaagaaguggaaguacccccaggugaacggccugaccagcaucaagugggccgacaacaacugcuaccuggcgaccgcccuccugacccugcagcagaucgagcucaaguucaaccccccggcccugcaggacgccuacuaccgcgcgcgggccggggaggccgccaacuucugcgcccugauccucgcguacugcaacaagacggugggcgagcugggcgacguccgcgagaccauguccuaccuguuccagcacgccaaccucgacagcugcaagcgggugcugaacgucgugugcaagaccugcgggcagcagcagaccacccugaagggcguggaggccgucauguacauggggacgcucuccuacgagcaguucaagaagggcgugcagauccccugcaccugcgggaagcaggccaccaaguaccuggugcagcaggagagccccuucgucaugauguccgcccccccggcgcaguacgagcugaagcacggcaccuucacgugcgccagcgaguacaccggcaacuaccagugcgggcacuacaagcacaucaccuccaaggagacccucuacugcaucgacggcgcccugcugacgaagagcagcgaguacaaggggcccaucaccgacguguucuacaaggagaacuccuacaccaccacgaucaagcccgugaccuacaagcucgacggcgucgugugcaccgagaucgaccccaagcuggacaacuacuacaagaaggacaacagcuacuucaccgagcagccgaucgaccuggugcccaaccagcccuaccccaacgccuccuucgacaacuucaaguucgucugcgacaacaucaaguucgccgacgaccucaaccagcugacgggguacaagaagccggcgagccgcgagcugaaggugaccuucuuccccgaccucaacggcgacguggucgccaucgacuacaagcacuacacccccuccuucaagaagggcgccaagcugcugcacaagcccaucguguggcacgugaacaacgccaccaacaaggcgacguacaagccgaacaccuggugcauccggugccucuggagcaccaagcccgucgagaccuccaacagcuucgacgugcugaaguccgaggacgcccaggggauggacaaccuggccugcgaggaccucaagcccgugagcgaggaggucguggagaaccccacgauccagaaggacgugcuggagugcaacgucaagaccaccgagguggugggcgacaucauccugaagccggccaacaacucccucaagaucaccgaggaggucgggcacacggaccugauggccgcguacguggacaacagcucccugaccaucaagaagcccaacgagcucagccgcgugcugggccugaagacccucgccacccacgggcuggccgccgucaacuccgugcccugggacacgaucgccaacuacgcgaagccguuccugaacaagguggucagcaccaccaccaacaucgugacgcgcugccucaaccgggugugcaccaacuacaugcccuacuucuucacccugcugcuccagcugugcaccuucacccgcuccacgaacagccggaucaaggccuccaugcccaccaccaucgccaagaacaccgucaagagcgugggcaaguucugccuggaggccagcuucaacuaccucaagucccccaacuucagcaagcugaucaacaucaucaucugguuccugcuccuguccgugugccugggcagccucaucuacuccacggccgcgcuggggguccugaugagcaaccucggcaugccguccuacugcaccggguaccgcgagggcuaccugaacagcaccaacgugaccaucgccacguacugcaccggcuccauccccugcagcgugugccuguccgggcucgacagccuggacaccuaccccucccuggagaccauccagaucacgaucagcuccuucaagugggaccucaccgccuucggccuggucgccgagugguuccuggccuacauccucuucacccgguucuucuacgugcuggggcuggcggccaucaugcagcucuucuucagcuacuucgccgugcacuucaucuccaacagcuggcugauguggcugaucaucaaccugguccagauggcccccaucuccgcgauggugcgcauguacaucuucuucgccagcuucuacuacguguggaagagcuacguccacgugguggacggcugcaacuccagcaccugcaugaugugcuacaagcggaaccgcgccacgcgggucgagugcaccaccaucgugaacgggguccgccgguccuucuacguguacgccaacggcggcaagggguucugcaagcuccacaacuggaacugcgugaacugcgacaccuucugcgccggcagcacguucaucuccgacgaggucgcgcgcgaccugagccugcaguucaagcggccgaucaaccccaccgaccaguccagcuacaucguggacuccgugaccgucaagaacgggagcacccaccucuacuucgacaaggccggccagaagacguacgagcgccacucccugagccacuucgugaaccuggacaaccuccgggccaacaacaccaaggggucccugcccaucaacgugaucgucuucgacggcaagagcaagugcgaggaguccagcgccaaguccgccagcguguacuacucccagcugaugugccagcccauccuccugcuggaccaggcgcucgugagcgacgucggcgacagcgccgagguggccgugaagauguucgacgccuacgucaacaccuucuccagcaccuucaacgugccgauggagaagcugaagacgcugguggccaccgcggaggccgagcucgccaagaacgucucccuggacaacgugcugagcaccuucaucuccgccgcgcgccagggguucguggacagcgacgucgagaccaaggacgugguggagugccucaagcugucccaccagagcgacaucgaggucacgggcgacuccugcaacaacuacaugcugaccuacaacaagguggagaacaugaccccccgggaccucggggccugcaucgacugcagcgcccgccacaucaacgcccagguggccaagucccacaacaucgcgcugaucuggaacgucaaggacuucaugagccuguccgagcagcuccggaagcagauccgcagcgccgccaagaagaacaaccugcccuucaagcugaccugcgccacgacccgccagguggugaacgucgugaccaccaagaucgcccucaagggcggguga

SEQ ID NO: 18172 - RNA, 5841 nt, Artificial Sequence
  SARS-CoV-2__MT509958.1__non-structural protein 3 (NSP3) CDS gc
auggcccccaccaaggugaccuucggcgacgacacggucaucgaggugcagggguacaagagcgugaacaucaccuucgagcuggacgagcgcaucgacaagguccucaacgagaagugcuccgccuacaccguggagcugggcaccgaggugaacgaguucgcgugcgucguggccgacgccgugaucaagacgcugcagccggucagcgagcuccugaccccccuggggaucgaccucgacgagugguccauggccaccuacuaccuguucgacgagagcggcgaguucaagcuggccucccacauguacugcagcuucuacccccccgacgaggacgaggaggagggggacugcgaggaggaggaguucgagccguccacccaguacgaguacggcacggaggacgacuaccagggcaagccccucgaguucggggcgaccagcgccgcccugcagcccgaggaggagcaggaggaggacuggcuggacgacgacucccagcagaccgugggccagcaggacgggagcgaggacaaccagaccacgaccauccagaccaucguggagguccagccccagcucgagauggagcugaccccgguggugcagacgaucgaggucaacuccuucagcggcuaccugaagcucaccgacaacguguacaucaagaacgccgacaucguggaggaggcgaagaaggucaagcccaccgugguggucaacgccgccaacguguaccugaagcacgggggcggcguggccggggcccugaacaaggcgaccaacaacgccaugcaggucgaguccgacgacuacaucgccacgaacggcccccucaagguggggggcagcugcguccuguccggccacaaccuggccaagcacugccuccacgugguggggcccaacgucaacaagggcgaggacauccagcugcugaagagcgccuacgagaacuucaaccagcacgaggugcuccuggcgccgcugcucuccgccgggaucuucggcgccgaccccauccacagccugcgggugugcgucgacaccgugcgcaccaacguguaccuggccgucuucgacaagaaccucuacgacaagcugguguccagcuuccuggagaugaagagcgagaagcagguggagcagaagaucgccgagauccccaaggaggaggucaagcccuucaucaccgaguccaagccgagcguggagcagcggaagcaggacgacaagaagaucaaggcgugcguggaggaggucacgaccacccucgaggagaccaaguuccugacggagaaccugcuccuguacaucgacaucaacgggaaccugcaccccgacuccgccacccucgugagcgacaucgacaucaccuuccugaagaaggacgcccccuacaucgugggcgacgucgugcaggagggcgugcugaccgccgucgugauccccacgaagaaggccgggggcaccaccgagaugcucgcgaaggcccugcgcaaggugccgaccgacaacuacaucacgaccuaccccgggcagggccugaacggguacaccgucgaggaggccaagaccgugcucaagaagugcaaguccgccuucuacauccugcccagcaucaucuccaacgagaagcaggagauccugggcaccgugagcuggaaccuccgggagaugcuggcgcacgccgaggagacgcgcaagcugaugcccgucugcguggagaccaaggccaucguguccaccauccagcggaaguacaagggcaucaagauccaggagggggucguggacuacggcgcccgcuucuacuucuacaccagcaagacgaccguggccucccugaucaacacccucaacgaccugaacgagacccuggucacgaugccgcucggguacgugacccacggccugaaccuggaggaggcggcccgguacaugcgcagccucaaggugcccgccaccgucuccgugagcucccccgacgccgugaccgccuacaacggguaccugacgagcuccagcaagacccccgaggagcacuucaucgagaccaucucccuggcgggcagcuacaaggacuggagcuacuccggccagagcacccagcucgggaucgaguuccugaagcggggcgacaaguccgucuacuacacgagcaacccgaccaccuuccaccuggacggggaggugaucaccuucgacaaccucaagacgcugcugucccuccgcgaggugcggaccaucaaggucuucaccaccguggacaacaucaaccugcacacgcagguggucgacaugagcaugaccuacggccagcaguucggccccaccuaccuggacggggccgacgugaccaagaucaagccccacaacucccacgagggcaagacguucuacgugcucccgaacgacgacacccugcgcgucgaggccuucgaguacuaccacaccaccgaccccagcuuccuggggcgguacauguccgcccucaaccacacgaagaaguggaaguacccccaguucaacggccugaccagcaucaagugggccgacaacaacugcuaccuggcgaccgcccuccugacccugcagcagaucgagcucaaguucaaccccccggcccugcaggacgccuacuaccgcgcgcgggccggggagguggccaacuucugcgcccugauccucgccuacugcaacaagacggugggcgagcugggcgacguccgcgagaccauguccuaccuguuccagcacgcgaaccucgacagcugcaagcgggugcugaacgucgugugcaagaccugcgggcagcagcagaccacccugaagggcguggaggccgucauguacauggggacgcucuccuacgagcaguucaagaagggcgugcagauccccugcaccugcgggaagcaggccaccaaguaccuggugcagcaggagagccccuucgucaugauguccgcccccccggcccaguacgagcugaagcacggcaccuucacgugcgcgagcgaguacaccggcaacuaccagugcgggcacuacaagcacaucaccuccaaggagacccucuacugcaucgacggcgcccugcugacgaagagcagcgaguacaaggggcccaucaccgacguguucuacaaggagaacuccuacaccaccacgaucaagcccgugaccuacaagcucgacggcgucgugugcaccgagaucgaccccaagcuggacaacuacuacaagaaggacaacagcuacuucaccgagcagccgaucgaccuggugcccaaccagcccuaccccaacgccuccuucgacaacuucaaguucgucugcgacaacaucaaguucgccgacgaccucaaccagcugacgggguacaagaagccggccagccgcgagcugaaggugaccuucuuccccgaccucaacggcgacguggucgcgaucgacuacaagcacuacacccccuccuucaagaagggcgccaagcugcugcacaagcccaucguguggcacgugaacaacgccaccaacaaggccacguacaagccgaacaccuggugcauccggugccucuggagcaccaagcccgucgagaccuccaacagcuucgacgugcugaaguccgaggacgcgcaggggauggacaaccuggccugcgaggaccucaagcccgugagcgaggaggucguggagaaccccacgauccagaaggacgugcuggagugcaacgucaagaccaccgagguggugggcgacaucauccugaagccggccaacaacucccucaagaucaccgaggaggucgggcacacggaccugauggccgccuacguggacaacagcucccugaccaucaagaagcccaacgagcucagccgcgugcugggccugaagacccucgcgacccacgggcuggccgccgucaacuccgugcccugggacacgaucgccaacuacgccaagccguuccugaacaagguggucagcaccaccaccaacaucgugacgcgcugccucaaccgggugugcaccaacuacaugcccuacuucuucacccugcugcuccagcugugcaccuucacccgcuccacgaacagccggaucaaggcguccaugcccaccaccaucgccaagaacaccgucaagagcgugggcaaguucugccuggaggccagcuucaacuaccucaagucccccaacuucagcaagcugaucaacaucaucaucugguuccugcuccuguccgugugccugggcagccucaucuacuccacggccgcccuggggguccugaugagcaaccucggcaugccguccuacugcaccggguaccgcgagggcuaccugaacagcaccaacgugaccaucgcgacguacugcaccggcuccauccccugcagcgugugccuguccgggcucgacagccuggacaccuaccccucccuggagaccauccagaucacgaucagcuccuucaagugggaccucaccgccuucggccuggucgccgagugguuccuggccuacauccucuucacccgguucuucuacgugcuggggcuggccgcgaucaugcagcucuucuucagcuacuucgccgugcacuucaucuccaacagcuggcugauguggcugaucaucaaccugguccagauggcccccaucuccgccauggugcgcauguacaucuucuucgcgagcuucuacuacguguggaagagcuacguccacgugguggacggcugcaacuccagcaccugcaugaugugcuacaagcggaaccgcgccacgcgggucgagugcaccaccaucgugaacgggguccgccgguccuucuacguguacgccaacggcggcaagggguucugcaagcuccacaacuggaacugcgugaacugcgacaccuucugcgccggcagcacguucaucuccgacgaggucgcccgcgaccugagccugcaguucaagcggccgaucaaccccaccgaccaguccagcuacaucguggacuccgugaccgucaagaacgggagcauccaccucuacuucgacaaggcgugccagaagaccuacgagcgccacucccugagccacuucgugaaccuggacaaccuccgggccaacaacacgaagggcucccugcccaucaacgugaucgucuucgacgggaagagcaagugcgaggaguccagcgccaaguccgccagcguguacuacucccagcugaugugccagcccauccuccugcuggaccaggcccucgugagcgacgucggcgacagcgcggagguggccgugaagauguucgacgccuacgucaacaccuucuccagcaccuucaacgugccgauggagaagcugaagacccugguggccacggccgaggcggagcucgccaagaacgucucccuggacaacgugcugagcaccuucaucuccaccgcccgccagggcuucguggacagcgacgucgagaccaaggacgugguggagugccucaagcugucccaccagagcgacaucgaggucacgggggacuccugcaacaacuacaugcugaccuacaacaagguggagaacaugaccccccgggaccucggcgccugcaucgacugcagcgcgcgccacaucaacgcccagguggccaagucccacaacaucgcccugaucuggaacgucaaggacuucaugagccuguccgagcagcuccggaagcagauccgcagcgccgcgaagaagaacaaccugcccuucaagcugaccugcgccacgacccgccagguggugaacgucgugaccaccaagaucgcccucaaggggggcuga

SEQ ID NO: 18173 - RNA, 5841 nt, Artificial Sequence
  SARS-CoV-2__MT509657.1__non-structural protein 3 (NSP3) CDS gc
auggcccccaccaaggugaccuucggcgacgacacggucaucgaggugcagggguacaagagcgugaacaucaccuucgagcuggacgagcgcaucgacaagguccucaacgagaagugcuccgccuacaccguggagcugggcaccgaggugaacgaguucgcgugcgucguggccgacgccgugaucaagacgcugcagccggucagcgagcuccugaccccccuggggaucgaccucgacgagugguccauggccaccuacuaccuguucgacgagagcggcgaguucaagcuggccucccacauguacugcagcuucuacccccccgacgaggacgaggaggagggggacugcgaggaggaggaguucgagccguccacccaguacgaguacggcacggaggacgacuaccagggcaagccccucgaguucggggcgaccagcgccgcccugcagcccgaggaggagcaggaggaggacuggcuggacgacgacucccagcagaccgugggccagcaggacgggagcgaggacaaccagaccacgaccauccagaccaucguggagguccagccccagcucgagauggagcugaccccgguggugcagacgaucgaggucaacuccuucagcggcuaccugaagcucaccgacaacguguacaucaagaacgccgacaucguggaggaggcgaagaaggucaagcccaccgugguggucaacgccgccaacguguaccugaagcacgggggcggcguggccggggcccugaacaaggcgaccaacaacgccaugcaggucgaguccgacgacuacaucgccacgaacggcccccucaagguggggggcagcugcguccuguccggccacaaccuggccaagcacugccuccacgugguggggcccaacgucaacaagggcgaggacauccagcugcugaagagcgccuacgagaacuucaaccagcacgaggugcuccuggcgccgcugcucuccgccgggaucuucggcgccgaccccauccacagccugcgggugugcgucgacaccgugcgcaccaacguguaccuggccgucuucgacaagaaccucuacgacaagcugguguccagcuuccuggagaugaagagcgagaagcagguggagcagaagaucgccgagauccccaaggaggaggucaagcccuucaucaccgaguccaagccgagcguggagcagcggaagcaggacgacaagaagaucaaggcgugcguggaggaggucacgaccacccucgaggagaccaaguuccugacggagaaccugcuccuguacaucgacaucaacgggaaccugcaccccgacuccgccacccucgugagcgacaucgacaucaccuuccugaagaaggacgcccccuacaucgugggcgacgucgugcaggagggcgugcugaccgccgucgugauccccacgaagaaggccgggggcaccaccgagaugcucgcgaaggcccugcgcaaggugccgaccgacaacuacaucacgaccuaccccgggcagggccugaacggguacaccgucgaggaggccaagaccgugcucaagaagugcaaguccgccuucuacauccugcccagcaucaucuccaacgagaagcaggagauccugggcaccgugagcuggaaccuccgggagaugcuggcgcacgccgaggagacgcgcaagcugaugcccgucugcguggagaccaaggccaucguguccaccauccagcggaaguacaagggcaucaagauccaggagggggucguggacuacggcgcccgcuucuacuucuacaccagcaagacgaccguggccucccugaucaacacccucaacgaccugaacgagacccuggucacgaugccgcucggguacgugacccacggccugaaccuggaggaggcggcccgguacaugcgcagccucaaggugcccgccaccgucuccgugagcucccccgacgccgugaccgccuacaacggguaccugacgagcuccagcaagacccccgaggagcacuucaucgagaccaucucccuggcgggcagcuacaaggacuggagcuacuccggccagagcacccagcucgggaucgaguuccugaagcggggcgacaaguccgucuacuacacgagcaacccgaccaccuuccaccuggacggggaggugaucaccuucgacaaccucaagacgcugcugucccuccgcgaggugcggaccaucaaggucuucaccaccguggacaacaucaaccugcacacgcagguggucgacaugagcaugaccuacggccagcaguucggccccaccuaccuggacggggccgacgugaccaagaucaagccccacaacucccacgagggcaagacguucuacgugcucccgaacgacgacacccugcgcgucgaggccuucgaguacuaccacaccaccgaccccagcuuccuggggcgguacauguccgcccucaaccacacgaagaaguggaaguacccccaggugaacggccugaccagcaucaagugggccgacaacaacugcuaccuggcgaccgcccuccugacccugcagcagaucgagcucaaguucaaccccccggcccugcaggacgccuacuaccgcgcgcgggccggggaggccgccaacuucugcgcccugauccucgcguacugcaacaagacggugggcgagcugggcgacguccgcgagaccauguccuaccuguuccagcacgccaaccucgacagcugcaagcgggugcugaacgucgugugcaagaccugcgggcagcagcagaccacccugaagggcguggaggccgucauguacauggggacgcucuccuacgagcaguucaagaagggcgugcagauccccugcaccugcgggaagcaggccaccaaguaccuggugcagcaggagagccccuucgucaugauguccgcccccccggcgcaguacgagcugaagcacggcaccuucacgugcgccagcgaguacaccggcaacuaccagugcgggcacuacaagcacaucaccuccaaggagacccucuacugcaucgacggcgcccugcugacgaagagcagcgaguacaaggggcccaucaccgacguguucuacaaggagaacuccuacaccaccacgaucaagcccgugaccuacaagcucgacggcgucgugugcaccgagaucgaccccaagcuggacaacuacuacaagaaggacaacagcuacuucaccgagcagccgaucgaccuggugcccaaccagcccuaccccaacgccuccuucgacaacuucaaguucgucugcgacaacaucaaguucgccgacgaccucaaccagcugacgggguacaagaagccggcgagccgcgagcugaaggugaccuucuuccccgaccucaacggcgacguggucgccaucgacuacaagcacuacacccccuccuucaagaagggcgccaagcugcugcacaagcccaucguguggcacgugaacaacgccaccaacaaggcgacguacaagccgaacaccuggugcauccggugccucuggcgcaagaagcccgucgagaccagcaacuccuucgacgugcugaagagcgaggacgcccaggggauggacaaccuggccugcgaggaccucaagcccguguccgaggaggucguggagaaccccaccauccagaaggacgugcuggagugcaacgucaagacgaccgagguggugggcgacaucauccugaagccggccaacaacagccucaagaucaccgaggaggucgggcacaccgaccugauggccgcguacguggacaacuccagccugacgaucaagaagcccaacgagcucucccgcgugcugggccugaagacccucgccacccacgggcuggccgccgucaacagcgugcccugggacaccaucgccaacuacgcgaagccguuccugaacaagguggucuccacgaccaccaacaucgugacccggugccucaaccgcgugugcacgaacuacaugcccuacuucuucacccugcugcuccagcugugcaccuucacccggagcaccaacucccgcaucaaggccagcaugcccacgaccaucgccaagaacaccgucaaguccgugggcaaguucugccuggaggccagcuucaacuaccucaagagccccaacuucuccaagcugaucaacaucaucaucugguuccugcuccugagcgugugccugggcucccucaucuacagcaccgccgcgcuggggguccugauguccaaccucggcaugccgagcuacugcacgggguaccgggagggcuaccugaacuccaccaacgugaccaucgccaccuacugcacgggcagcauccccugcuccgugugccugagcgggcucgacucccuggacaccuaccccagccuggagaccauccagaucaccaucuccagcuucaagugggaccucacggccuucggccuggucgccgagugguuccuggccuacauccucuucacccgcuucuucuacgugcuggggcuggcggccaucaugcagcucuucuucuccuacuucgccgugcacuucaucagcaacuccuggcugauguggcugaucaucaaccugguccagauggcccccaucagcgcgauggugcggauguacaucuucuucgccuccuucuacuacguguggaagagcuacguccacgugguggacggcugcaacagcuccaccugcaugaugugcuacaagcgcaaccgggccacccgcgucgagugcacgaccaucgugaacgggguccggcgcagcuucuacguguacgccaacggcggcaagggguucugcaagcuccacaacuggaacugcgugaacugcgacaccuucugcgccggcuccaccuucaucagcgacgaggucgcgcgggaccugucccugcaguucaagcgcccgaucaaccccacggaccagagcuccuacaucguggacagcgugaccgucaagaacggguccauccaccucuacuucgacaaggccggccagaagaccuacgagcggcacagccugucccacuucgugaaccuggacaaccuccgcgccaacaacaccaaggggagccugcccaucaacgugaucgucuucgacggcaaguccaagugcgaggagagcuccgccaagagcgccuccguguacuacagccagcugaugugccagcccauccuccugcuggaccaggcgcucguguccgacgucggcgacagcgccgagguggccgugaagauguucgacgccuacgucaacacguucagcuccaccuucaacgugccgauggagaagcugaagacccugguggccaccgcggaggccgagcucgccaagaacgucagccuggacaacgugcuguccacguucaucagcgccgcgcggcagggguucguggacuccgacgucgagaccaaggacgugguggagugccucaagcugagccaccaguccgacaucgaggucaccggcgacagcugcaacaacuacaugcugaccuacaacaagguggagaacaugacgccccgcgaccucggggccugcaucgacugcuccgcccggcacaucaacgcccagguggccaagagccacaacaucgcgcugaucuggaacgucaaggacuucaugucccugagcgagcagcuccgcaagcagauccgcuccgccgccaagaagaacaaccugcccuucaagcugaccugcgccaccacccggcagguggugaacgucgugacgaccaagaucgcccucaagggcggguga

SEQ ID NO: 18174 - RNA, 5841 nt, Artificial Sequence
  SARS-CoV-2__MT509497.1__non-structural protein 3 (NSP3) CDS gc
auggcccccaccaaggugaccuucggcgacgacacggucaucgaggugcagggguacaagagcgugaacaucaccuucgagcuggacgagcgcaucgacaagguccucaacgagaagugcuccgccuacaccguggagcugggcaccgaggugaacgaguucgcgugcgucguggccgacgccgugaucaagacgcugcagccggucagcgagcuccugaccccccuggggaucgaccucgacgagugguccauggccaccuacuaccuguucgacgagagcggcgaguucaagcuggccucccacauguacugcagcuucuacccccccgacgaggacgaggaggagggggacugcgaggaggaggaguucgagccguccacccaguacgaguacggcacggaggacgacuaccagggcaagccccucgaguucggggcgaccagcgccgcccugcagcccgaggaggagcaggaggaggacuggcuggacgacgacucccagcagaccgugggccagcaggacgggagcgaggacaaccagaccacgaccauccagaccaucguggagguccagccccagcucgagauggagcugaccccgguggugcagacgaucgaggucaacuccuucagcggcuaccugaagcucaccgacaacguguacaucaagaacgccgacaucguggaggaggcgaagaaggucaagcccaccgugguggucaacgccgccaacguguaccugaagcacgggggcggcguggccggggcccugaacaaggcgaccaacaacgccaugcaggucgaguccgacgacuacaucgccacgaacggcccccucaagguggggggcagcugcguccuguccggccacaaccuggccaagcacugccuccacgugguggggcccaacgucaacaagggcgaggacauccagcugcugaagagcgccuacgagaacuucaaccagcacgaggugcuccuggcgccgcugcucuccgccgggaucuucggcgccgaccccauccacagccugcgggugugcgucgacaccgugcgcaccaacguguaccuggccgucuucgacaagaaccucuacgacaagcugguguccagcuuccuggagaugaagagcgagaagcagguggagcagaagaucgccgagauccccaaggaggaggucaagcccuucaucaccgaguccaagccgagcguggagcagcggaagcaggacgacaagaagaucaaggcgugcguggaggaggucacgaccacccucgaggagaccaaguuccugacggagaaccugcuccuguacaucgacaucaacgggaaccugcaccccgacuccgccacccucgugagcgacaucgacaucaccuuccugaagaaggacgcccccuacaucgugggcgacgucgugcaggagggcgugcugaccgccgucgugauccccacgaagaaggccgggggcaccaccgagaugcucgcgaaggcccugcgcaaggugccgaccgacaacuacaucacgaccuaccccgggcagggccugaacggguacaccgucgaggaggccaagaccgugcucaagaagugcaaguccgccuucuacauccugcccagcaucaucuccaacgagaagcaggagauccugggcaccgugagcuggaaccuccgggagaugcuggcgcacgccgaggagacgcgcaagcugaugcccgucugcguggagaccaaggccaucguguccaccauccagcggaaguacaagggcaucaagauccaggagggggucguggacuacggcgcccgcuucuacuucuacaccagcaagacgaccguggccucccugaucaacacccucaacgaccugaacgagacccuggucacgaugccgcucggguacgugacccacggccugaaccuggaggaggcggcccgguacaugcgcagccucaaggugcccgccaccgucuccgugagcucccccgacgccgugaccgccuacaacggguaccugacgagcuccagcaagacccccgaggagcacuucaucgagaccaucucccuggcgggcagcuacaaggacuggagcuacuccggccagagcacccagcucgggaucgaguuccugaagcggggcgacaaguccgucuacuacacgagcaacccgaccaccuuccaccuggacggggaggugaucaccuucgacaaccucaagacgcugcugucccuccgcgaggugcggaccaucaaggucuucaccaccguggacaacaucaaccugcacacgcagguggucgacaugagcaugaccuacggccagcaguucggccccaccuaccuggacggggccgacgugaccaagaucaagccccacaacucccacgagggcaagacguucuacgugcucccgaacgacgacacccugcgcgucgaggccuucgaguacuaccacaccaccgaccccagcuuccuggggcgguacauguccgcccucaaccacacgaagaaguggaaguacccccaggugaacggccugaccagcaucaagugggccgacaacaacugcuaccuggcgaccgcccuccugacccugcagcagaucgagcucaaguucaaccccccggcccugcaggacgccuacuaccgcgcgcgggccggggaggccgccaacuucugcgcccugauccucgcguacugcaacaagacggugggcgagcugggcgacguccgcgagaccauguccuaccuguuccagcacgccaaccucgacagcugcaagcgggugcugaacgucgugugcaagaccugcgggcagcagcagaccacccugaagggcguggaggccgucauguacauggggacgcucuccuacgagcaguucaagaagggcgugcagauccccugcaccugcgggaagcaggccaccaaguaccuggugcagcaggagagccccuucgucaugauguccgcccccccggcgcaguacgagcugaagcacggcaccuucacgugcgccagcgaguacaccggcaacuaccagugcgggcacuacaagcacaucaccuccaaggagacccucuacugcaucgacggcgcccugcugacgaagagcagcgaguacaaggggcccaucaccgacguguucuacaaggagaacuccuacaccaccacgaucaagcccgugaccuacaagcucgacggcgucgugugcaccgagaucgaccccaagcuggacaacuacuacaagaaggacaacagcuacuucaccgagcagccgaucgaccuggugcccaaccagcccuaccccaacgccuccuucgacaacuucaaguucgucugcgacaacaucaaguucgccgacgaccucaaccagcugacgggguacaagaagccggcgagccgcgagcugaaggugaccuucuuccccgaccucaacggcgacguggucgccaucgacuacaagcacuacacccccuccuucaagaagggcgccaagcugcugcacaagcccaucguguggcacgugaacaacgccaccaacaaggcgacguacaagccgaacaccuggugcauccggugccucuggcgcaagaagcccgucgagaccagcaacuccuucgacgugcugaagagcgaggacgcccaggggauggacaaccuggccugcgaggaccucaagcccguguccgaggaggucguggagaaccccaccauccagaaggacgugcuggagugcaacgucaagacgaccgagguggugggcgacaucauccugaagccggccaacaacagccucaagaucaccgaggaggucgggcacaccgaccugauggccgcguacguggacaacuccagccugacgaucaagaagcccaacgagcucucccgcgugcugggccugaagacccucgccacccacgggcuggccgccgucaacagcgugcccugggacaccaucgccaacuacgcgaagccguuccugaacaagguggucuccacgaccaccaacaucgugacccggugccucaaccgcgugugcacgaacuacaugcccuacuucuucacccugcugcuccagcugugcaccuucacccggagcaccaacucccgcaucaaggccagcaugcccacgaccaucgccaagaacaccgucaaguccgugggcaaguucugccuggaggccagcuucaacuaccucaagagccccaacuucuccaagcugaucaacaucaucaucugguuccugcuccugagcgugugccugggcucccucaucuacagcaccgccgcgcuggggguccugauguccaaccucggcaugccgagcuacugcacgggguaccgggagggcuaccugaacuccaccaacgugaccaucgccaccuacugcacgggcagcauccccugcuccgugugccugagcgggcucgacucccuggacaccuaccccagccuggagaccauccagaucaccaucuccagcuucaagugggaccucacggccuucggccuggucgccgagugguuccuggccuacauccucuucacccgcuucuucuacgugcuggggcuggcggccaucaugcagcucuucuucuccuacuucgccgugcacuucaucagcaacuccuggcugauguggcugaucaucaaccugguccagauggcccccaucagcgcgauggugcggauguacaucuucuucgccuccuucuacuacguguggaagagcuacguccacgugguggacggcugcaacagcuccaccugcaugaugugcuacaagcgcaaccgggccacccgcgucgagugcacgaccaucgugaacgggguccggcgcagcuucuacguguacgccaacggcggcaagggguucugcaagcuccacaacuggaacugcgugaacugcgacaccuucugcgccggcuccaccuucaucagcgacgaggucgcgcgggaccugucccugcaguucaagcgcccgaucaaccccacggaccagagcuccuacaucguggacagcgugaccgucaagaacggguccauccaccucuacuucgacaaggccggccagaagaccuacgagcggcacagccugucccacuucgugaaccuggacaaccuccgcgccaacaacaccaaggggagccugcccaucaacgugaucgucuucgacggcaaguccaagugcgaggagagcuccgccaagagcgccuccguguacuacagccagcugaugugccagcccauccuccugcuggaccaggcgcucguguccgacgucggcgacagcgccgagguggccgugaagauguucgacgccuacgucaacacguucagcuccaccuucaacgugccgauggagaagcugaagacccugguggccaccgcggaggccgagcucgccaagaacgucagccuggacaacgugcuguccacguucaucagcgccgcgcggcagggguucguggacuccgacgucgagaccaaggacgugguggagugccucaagcugagccaccaguccgacaucgaggucaccggcgacagcugcaacaacuacaugcugaccuacaacaagguggagaacaugacgccccgcgaccucggggccugcaucgacugcuccgcccggcacaucaacgcccagguggccaagagccacaacaucgcgcugaucuggaacgucaaggacuucaugucccugagcgagcagcuccgcaagcagauccgcuccgccgccaagaagaacaaccugcuguucaagcucaccugcgccaccacccggcagguggugaacgucgugacgaccaagaucgcccugaagggcggguga

SEQ ID NO: 18175 - RNA, 5841 nt, Artificial Sequence
  SARS-CoV-2__MT509504.1__non-structural protein 3 (NSP3) CDS gc
auggcccccaccaaggugaccuucggcgacgacacggucaucgaggugcagggguacaagagcgugaacaucaccuucgagcuggacgagcgcaucgacaagguccucaacgagaagugcuccgccuacaccguggagcugggcaccgaggugaacgaguucgcgugcgucguggccgacgccgugaucaagacgcugcagccggucagcgagcuccugaccccccuggggaucgaccucgacgagugguccauggccaccuacuaccuguucgacgagagcggcgaguucaagcuggccucccacauguacugcagcuucuacccccccgacgaggacgaggaggagggggacugcgaggaggaggaguucgagccguccacccaguacgaguacggcacggaggacgacuaccagggcaagccccucgaguucggggcgaccagcgccgcccugcagcccgaggaggagcaggaggaggacuggcuggacgacgacucccagcagaccgugggccagcaggacgggagcgaggacaaccagaccacgaccauccagaccaucguggagguccagccccagcucgagauggagcugaccccgguggugcagacgaucgaggucaacuccuucagcggcuaccugaagcucaccgacaacguguacaucaagaacgccgacaucguggaggaggcgaagaaggucaagcccaccgugguggucaacgccgccaacguguaccugaagcacgggggcggcguggccggggcccugaacaaggcgaccaacaacgccaugcaggucgaguccgacgacuacaucgccacgaacggcccccucaagguggggggcagcugcguccuguccggccacaaccuggccaagcacugccuccacgugguggggcccaacgucaacaagggcgaggacauccagcugcugaagagcgccuacgagaacuucaaccagcacgaggugcuccuggcgccgcugcucuccgccgggaucuucggcgccgaccccauccacagccugcgggugugcgucgacaccgugcgcaccaacguguaccuggccgucuucgacaagaaccucuacgacaagcugguguccagcuuccuggagaugaagagcgagaagcagguggagcagaagaucgccgagauccccaaggaggaggucaagcccuucaucaccgaguccaagccgagcguggagcagcggaagcaggacgacaagaagaucaaggcgugcguggaggaggucacgaccacccucgaggagaccaaguuccugacggagaaccugcuccuguacaucgacaucaacgggaaccugcaccccgacuccgccacccucgugagcgacaucgacaucaccuuccugaagaaggacgcccccuacaucgugggcgacgucgugcaggagggcgugcugaccgccgucgugauccccacgaagaaggccgggggcaccaccgagaugcucgcgaaggcccugcgcaaggugccgaccgacaacuacaucacgaccuaccccgggcagggccugaacggguacaccgucgaggaggccaagaccgugcucaagaagugcaaguccgccuucuacauccugcccagcaucaucuccaacgagaagcaggagauccugggcaccgugagcuggaaccuccgggagaugcuggcgcacgccgaggagacgcgcaagcugaugcccgucugcguggagaccaaggccaucguguccaccauccagcggaaguacaagggcaucaagauccaggagggggucguggacuacggcgcccgcuucuacuucuacaccagcaagacgaccguggccucccugaucaacacccucaacgaccugaacgagacccuggucacgaugccgcucggguacgugacccacggccugaaccuggaggaggcggcccgguacaugcgcagccucaaggugcccgccaccgucuccgugagcucccccgacgccgugaccgccuacaacggguaccugacgagcuccagcaagacccccgaggagcacuucaucgagaccaucucccuggcgggcagcuacaaggacuggagcuacuccggccagagcacccagcucgggaucgaguuccugaagcggggcgacaagaucgucuacuacacguccaacccgaccaccuuccaccuggacggggaggugaucaccuucgacaaccucaagacgcugcugagccuccgcgaggugcggaccaucaaggucuucaccaccguggacaacaucaaccugcacacgcagguggucgacauguccaugaccuacggccagcaguucggccccaccuaccuggacggggccgacgugaccaagaucaagccccacaacagccacgagggcaagacguucuacgugcucccgaacgacgacacccugcgcgucgaggccuucgaguacuaccacaccaccgaccccuccuuccuggggcgguacaugagcgcccucaaccacacgaagaaguggaaguacccccaggugaacggccugaccuccaucaagugggccgacaacaacugcuaccuggcgaccgcccuccugacccugcagcagaucgagcucaaguucaaccccccggcccugcaggacgccuacuaccgcgcgcgggccggggaggccgccaacuucugcgcccugauccucgcguacugcaacaagacggugggcgagcugggcgacguccgcgagaccaugagcuaccuguuccagcacgccaaccucgacuccugcaagcgggugcugaacgucgugugcaagaccugcgggcagcagcagaccacccugaagggcguggaggccgucauguacauggggacgcucagcuacgagcaguucaagaagggcgugcagauccccugcaccugcgggaagcaggccaccaaguaccuggugcagcaggagucccccuucgucaugaugagcgcccccccggcgcaguacgagcugaagcacggcaccuucacgugcgccuccgaguacaccggcaacuaccagugcgggcacuacaagcacaucaccagcaaggagacccucuacugcaucgacggcgcccugcugacgaaguccagcgaguacaaggggcccaucaccgacguguucuacaaggagaacagcuacaccaccacgaucaagcccgugaccuacaagcucgacggcgucgugugcaccgagaucgaccccaagcuggacaacuacuacaagaaggacaacuccuacuucaccgagcagccgaucgaccuggugcccaaccagcccuaccccaacgccagcuucgacaacuucaaguucgucugcgacaacaucaaguucgccgacgaccucaaccagcugacgggguacaagaagccggcgucccgcgagcugaaggugaccuucuuccccgaccucaacggcgacguggucgccaucgacuacaagcacuacacccccagcuucaagaagggcgccaagcugcugcacaagcccaucguguggcacgugaacaacgccaccaacaaggcgacguacaagccgaacaccuggugcauccggugccucugguccaccaagcccgucgagaccagcaacuccuucgacgugcugaagagcgaggacgcccaggggauggacaaccuggccugcgaggaccucaagcccguguccgaggaggucguggagaaccccacgauccagaaggacgugcuggagugcaacgucaagaccaccgagguggugggcgacaucauccugaagccggccaacaacagccucaagaucaccgaggaggucgggcacacggaccugauggccgcguacguggacaacuccagccugaccaucaagaagcccaacgagcucucccgcgugcugggccugaagacccucgccacccacgggcuggccgccgucaacagcgugcccugggacacgaucgccaacuacgcgaagccguuccugaacaagguggucuccaccaccaccaacaucgugacgcgcugccucaaccgggugugcaccaacuacaugcccuacuucuucacccugcugcuccagcugugcaccuucacccgcagcacgaacucccggaucaaggccagcaugcccaccaccaucgccaagaacaccgucaaguccgugggcaaguucugccuggaggccagcuucaacuaccucaagagccccaacuucuccaagcugaucaacaucaucaucugguuccugcuccugagcgugugccugggcucccucaucuacagcacggccgcgcuggggguccugauguccaaccucggcaugccgagcuacugcaccggguaccgcgagggcuaccugaacuccaccaacgugaccaucgccacguacugcaccggcagcauccccugcuccgugugccugagcgggcucgacucccuggacaccuaccccagccuggagaccauccagaucacgaucuccagcuucaagugggaccucaccgccuucggccuggucgccgagugguuccuggccuacauccucuucacccgguucuucuacgugcuggggcuggcggccaucaugcagcucuucuucuccuacuucgccgugcacuucaucagcaacuccuggcugauguggcugaucaucaaccugguccagauggcccccaucagcgcgauggugcgcauguacaucuucuucgccuccuucuacuacguguggaagagcuacguccacgugguggacggcugcaacagcuccaccugcaugaugugcuacaagcggaaccgcgccacgcgggucgagugcaccaccaucgugaacgggguccgccggagcuucuacguguacgccaacggcggcaagggguucugcaagcuccacaacuggaacugcgugaacugcgacaccuucugcgccggcuccacguucaucagcgacgaggucgcgcgcgaccugucccugcaguucaagcggccgaucaaccccaccgaccagagcuccuacaucguggacagcgugaccgucaagaacggguccauccaccucuacuucgacaaggccggccagaagaccuacgagcgccacagccugucccacuucgugaaccuggacaaccuccgggccaacaacacgaaggggagccugcccaucaacgugaucgucuucgacggcaaguccaagugcgaggagagcuccgccaagagcgccuccguguacuacagccagcugaugugccagcccauccuccugcuggaccaggcgcucguguccgacgucggcgacagcgccgagguggccgugaagauguucgacgccuacgucaacaccuucagcuccaccuucaacgugccgauggagaagcugaagacccugguggccacggcggaggccgagcucgccaagaacgucagccuggacaacgugcuguccaccuucaucagcgccgcgcgccagggguucguggacuccgacgucgagaccaaggacgugguggagugccucaagcugagccaccaguccgacaucgaggucaccggcgacagcugcaacaacuacaugcugacguacaacaagguggagaacaugaccccccgggaccucggggccugcaucgacugcuccgcccgccacaucaacgcccagguggccaagagccacaacaucgcgcugaucuggaacgucaaggacuucaugucccugagcgagcagcuccggaagcagauccgcuccgccgccaagaagaacaaccugcccuucaagcugaccugcgccaccacgcgccagguggugaacgucgugaccaccaagaucgcccucaagggcggguga

SEQ ID NO: 18176 - RNA, 5841 nt, Artificial Sequence
  SARS-CoV-2__MT509503.1__non-structural protein 3 (NSP3) CDS gc
auggcccccaccaaggugaccuucggcgacgacacggucaucgaggugcagggguacaagagcgugaacaucaccuucgagcuggacgagcgcaucgacaagguccucaacgagaagugcuccgccuacaccguggagcugggcaccgaggugaacgaguucgcgugcgucguggccgacgccgugaucaagacgcugcagccggucagcgagcuccugaccccccuggggaucgaccucgacgagugguccauggccaccuacuaccuguucgacgagagcggcgaguucaagcuggccucccacauguacugcagcuucuacccccccgacgaggacgaggaggagggggacugcgaggaggaggaguucgagccguccacccaguacgaguacggcacggaggacgacuaccagggcaagccccucgaguucggggcgaccagcgccgcccugcagcccgaggaggagcaggaggaggacuggcuggacgacgacucccagcagaccgugggccagcaggacgggagcgaggacaaccagaccacgaccauccagaccaucguggagguccagccccagcucgagauggagcugaccccgguggugcagacgaucgaggucaacuccuucagcggcuaccugaagcucaccgacaacguguacaucaagaacgccgacaucguggaggaggcgaagaaggucaagcccaccgugguggucaacgccgccaacguguaccugaagcacgggggcggcguggccggggcccugaacaaggcgaccaacaacgccaugcaggucgaguccgacgacuacaucgccacgaacggcccccucaagguggggggcagcugcguccuguccggccacaaccuggccaagcacugccuccacgugguggggcccaacgucaacaagggcgaggacauccagcugcugaagagcgccuacgagaacuucaaccagcacgaggugcuccuggcgccgcugcucuccgccgggaucuucggcgccgaccccauccacagccugcgggugugcgucgacaccgugcgcaccaacguguaccuggccgucuucgacaagaaccucuacgacaagcugguguccagcuuccuggagaugaagagcgagaagcagguggagcagaagaucgccgagauccccaaggaggaggucaagcccuucaucaccgaguccaagccgagcguggagcagcggaagcaggacgacaagaagaucaaggcgugcguggaggaggucacgaccacccucgaggagaccaaguuccugacggagaaccugcuccuguacaucgacaucaacgggaaccugcaccccgacuccgccacccucgugagcgacaucgacaucaccuuccugaagaaggacgcccccuacaucgugggcgacgucgugcaggagggcgugcugaccgccgucgugauccccacgaagaaggccgggggcaccaccgagaugcucgcgaaggcccugcgcaaggugccgaccgacaacuacaucacgaccuaccccgggcagggccugaacggguacaccgucgaggaggccaagaccgugcucaagaagugcaaguccgccuucuacauccugcccagcaucaucuccaacgagaagcaggagauccugggcaccgugagcuggaaccuccgggagaugcuggcgcacgccgaggagacgcgcaagcugaugcccgucugcguggagaccaaggccaucguguccaccauccagcggaaguacaagggcaucaagauccaggagggggucguggacuacggcgcccgcuucuacuucuacaccagcaagacgaccguggccucccugaucaacacccucaacgaccugaacgagacccuggucacgaugccgcucggguacgugacccacggccugaaccuggaggaggcggcccgguacaugcgcagccucaaggugcccgccaccgucuccgugagcucccccgacgccgugaccgccuacaacggguaccugacgagcuccagcaagacccccgaggagcacuucaucgagaccaucucccuggcgggcagcuacaaggacuggagcuacuccggccagagcacccagcucgggaucgaguuccugaagcggggcgacaaguccgucuacuacacgagcaacccgaccaccuuccaccuggacggggaggugaucaccuucgacaaccucaagacgcugcugucccuccgcgaggugcggaccaucaaggucuucaccaccguggacaacaucaaccugcacacgcagguggucgacaugagcaugaccuacggccagcaguucggccccaccuaccuggacggggccgacgugaccaagaucaagccccacaacucccacgagggcaagacguucuacgugcucccgaacgacgacacccugcgcgucgaggccuucgaguacuaccacaccaccgaccccagcuuccuggggcgguacauguccgcccucaaccacacgaagaaguggaaguacccccaggugaacggccugaccagcaucaagugggccgacaacaacugcuaccuggcgaccgcccuccugacccugcagcagaucgagcucaaguucaaccccccggcccugcaggacgccuacuaccgcgcgcgggccggggaggccgccaacuucugcgcccugauccucgcguacugcaacaagacggugggcgagcugggcgacguccgcgagaccauguccuaccuguuccagcacgccaaccucgacagcugcaagcgggugcugaacgucgugugcaagaccugcgggcagcagcagaccacccugaagggcguggaggccgucauguacauggggacgcucuccuacgagcaguucaagaagggcgugcagauccccugcaccugcgggaagcaggccaccaaguaccuggugcagcaggagagccccuucgucaugauguccgcccccccggcgcaguacgagcugaagcacggcaccuucacgugcgccagcgaguacaccggcaacuaccagugcgggcacuacaagcacaucaccuccaaggagacccucuacugcaucgacggcgcccugcugacgaagagcagcgaguacaaggggcccaucaccgacguguucuacaaggagaacuccuacaccaccacgaucaagcccgugaccuacaagcucgacggcgucgugugcaccgagaucgaccccaagcuggacaacuacuacaagaaggacaacagcuacuucaccgagcagccgaucgaccuggugcccaaccagcccuaccccaacgccuccuucgacaacuucaaguucgucugcgacaacaucaaguucgccgacgaccucaaccagcugacgggguacaagaagccggcgagccgcgagcugaaggugaccuucuuccccgaccucaacggcgacguggucgccaucgacuacaagcacuacacccccuccuucaagaagggcgccaagcugcugcacaagcccaucguguggcacgugaacaacgccaccaacaaggcgacguacaagccgaacaccuggugcauccggugccucuggagcaccaagcccgucgagaccuccaacagcuucgacgugcuggaguccgaggacgcccaggggauggacaaccuggccugcgaggaccucaagcccgugagcgaggaggucguggagaaccccacgauccagaaggacgugcuggagugcaacgucaagaccaccgagguggugggcgacaucauccugaagccggccaacaacucccucaagaucaccgaggaggucgggcacacggaccugauggccgcguacguggacaacagcucccugaccaucaagaagcccaacgagcucagccgcgugcugggccugaagacccucgccacccacgggcuggccgccgucaacuccgugcccugggacacgaucgccaacuacgcgaagccguuccugaacaagguggucagcaccaccaccaacaucgugacgcgcugccucaaccgggugugcaccaacuacaugcccuacuucuucacccugcugcuccagcugugcaccuucacccgcuccacgaacagccggaucaaggccuccaugcccaccaccaucgccaagaacaccgucaagagcgugggcaaguucugccuggaggccagcuucaacuaccucaagucccccaacuucagcaagcugaucaacaucaucaucugguuccugcuccuguccgugugccugggcagccucaucuacuccacggccgcgcuggggguccugaugagcaaccucggcaugccguccuacugcaccggguaccgcgagggcuaccugaacagcaccaacgugaccaucgccacguacugcaccggcuccauccccugcagcgugugccuguccgggcucgacagccuggacaccuaccccucccuggagaccauccagaucacgaucagcuccuucaagugggaccucaccgccuucggccuggucgccgagugguuccuggccuacauccucuucacccgguucuucuacgugcuggggcuggcggccaucaugcagcucuucuucagcuacuucgccgugcacuucaucuccaacagcuggcugauguggcugaucaucaaccugguccagauggcccccaucuccgcgauggugcgcauguacaucuucuucgccagcuucuacuacguguggaagagcuacguccacgugguggacggcugcaacuccagcaccugcaugaugugcuacaagcggaaccgcgccacgcgggucgagugcaccaccaucgugaacgggguccgccgguccuucuacguguacgccaacggcggcaagggguucugcaagcuccacaacuggaacugcgugaacugcgacaccuucugcgccggcagcacguucaucuccgacgaggucgcgcgcgaccugagccugcaguucaagcggccgaucaaccccaccgaccaguccagcuacaucguggacuccgugaccgucaagaacgggagcauccaccucuacuucgacaaggccggccagaagaccuacgagcgccacucccugagccacuucgugaaccuggacaaccuccgggccaacaacacgaaggggucccugcccaucaacgugaucgucuucgacggcaagagcaagugcgaggaguccagcgccaaguccgccagcguguacuacucccagcugaugugccagcccauccuccugcuggaccaggcgcucgugagcgacgucggcgacagcgccgagguggccgugaagauguucgacgccuacgucaacaccuucuccagcaccuucaacgugccgauggagaagcugaagacccugguggccacggcggaggccgagcucgccaagaacgucucccuggacaacgugcugagcaccuucaucuccgccgcgcgccagggguucguggacagcgacgucgagaccaaggacgugguggagugccucaagcugucccaccagagcgacaucgaggucaccggcgacuccugcaacaacuacaugcugacguacaacaagguggagaacaugaccccccgggaccucggggccugcaucgacugcagcgcccgccacaucaacgcccagguggccaagucccacaacaucgcgcugaucuggaacgucaaggacuucaugagccuguccgagcagcuccggaagcagauccgcagcgccgccaagaagaacaaccugcccuucaagcugaccugcgccaccacgcgccagguggugaacgucgugaccaccaagaucgcccucaagggcggguga

SEQ ID NO: 18177 - RNA, 5841 nt, Artificial Sequence
  SARS-CoV-2__MT506571.1__non-structural protein 3 (NSP3) CDS gc
auggcccccaccaaggugaccuucggcgacgacacggucaucgaggugcagggguacaagagcgugaacaucaccuucgagcuggacgagcgcaucgacaagguccucaacgagaagugcuccgccuacaccguggagcugggcaccgaggugaacgaguucgcgugcgucguggccgacgccgugaucaagacgcugcagccggucagcgagcuccugaccccccuggggaucgaccucgacgagugguccauggccaccuacuaccuguucgacgagagcggcgaguucaagcuggccucccacauguacugcagcuucuacccccccgacgaggacgaggaggagggggacugcgaggaggaggaguucgagccguccacccaguacgaguacggcacggaggacgacuaccagggcaagccccucgaguucggggcgaccagcgccgcccugcagcccgaggaggagcaggaggaggacuggcuggacgacgacucccagcagaccgugggccagcaggacgggagcgaggacaaccagaccacgaccauccagaccaucguggagguccagccccagcucgagauggagcugaccccgguggugcagacgaucgaggucaacuccuucagcggcuaccugaagcucaccgacaacguguacaucaagaacgccgacaucguggaggaggcgaagaaggucaagcccaccgugguggucaacgccgccaacguguaccugaagcacgggggcggcguggccggggcccugaacaaggcgaccaacaacgccaugcaggucgaguccgacgacuacaucgccacgaacggcccccucaagguggggggcagcugcguccuguccggccacaaccuggccaagcacugccuccacgugguggggcccaacgucaacaagggcgaggacauccagcugcugaagagcgccuacgagaacuucaaccagcacgaggugcuccuggcgccgcugcucuccgccgggaucuucggcgccgaccccauccacagccugcgggugugcgucgacaccgugcgcaccaacguguaccuggccgucuucgacaagaaccucuacgacaagcugguguccagcuuccuggagaugaagagcgagaagcagguggagcagaagaucgccgagauccccaaggaggaggucaagcccuucaucaccgaguccaagccgagcguggagcagcggaagcaggacgacaagaagaucaaggcgugcguggaggaggucacgaccacccucgaggagaccaaguuccugacggagaaccugcuccuguacaucgacaucaacgggaaccugcaccccgacuccgccacccucgugagcgacaucgacaucaccuuccugaagaaggacgcccccuacaucgugggcgacgucgugcaggagggcgugcugaccgccgucgugauccccacgaagaaggccgggggcaccaccgagaugcucgcgaaggcccugcgcaaggugccgaccgacaacuacaucacgaccuaccccgggcagggccugaacggguacaccgucgaggaggccaagaccgugcucaagaagugcaaguccgccuucuacauccugcccagcaucaucuccaacgagaagcaggagauccugggcaccgugagcuggaaccuccgggagaugcuggcgcacgccgaggagacgcgcaagcugaugcccgucugcguggagaccaaggccaucguguccaccauccagcggaaguacaagggcaucaagauccaggagggggucguggacuacggcgcccgcuucuacuucuacaccagcaagacgaccguggccucccugaucaacacccucaacgaccugaacgagacccuggucacgaugccgcucggguacgugacccacggccugaaccuggaggaggcggcccgguacaugcgcagccucaaggugcccgccaccgucuccgugagcucccccgacgccgugaccgccuacaacggguaccugacgagcuccagcaagacccccgaggagcacuucaucgagaccaucucccuggcgggcagcuacaaggacuggagcuacuccggccagagcacccagcucgggaucgaguuccugaagcggggcgacaaguccgucuacuacacgagcaacccgaccaccuuccaccuggacggggaggugaucaccuucgacaaccucaagacgcugcugucccuccgcgaggugcggaccaucaaggucuucaccaccguggacaacaucaaccugcacacgcagguggucgacaugagcaugaccuacggccagcaguucggccccaccuaccuggacggggccgacgugaccaagaucaagccccacaacucccacgagggcaagacguucuacgugcucccgaacgacgacacccugcgcgucgaggccuucgaguacuaccacaccaccgaccccagcuuccuggggcgguacauguccgcccucaaccacacgaagaaguggaaguacccccaggugaacggccugaccagcaucaagugggccgacaacaacugcuaccuggcgaccgcccuccugacccugcagcagaucgagcucaaguucaaccccccggcccugcaggacgccuacuaccgcgcgcgggccggggaggccgccaacuucugcgcccugauccucgcguacugcaacaagacggugggcgagcugggcgacguccgcgagaccauguccuaccuguuccagcacgccaaccucgacagcugcaagcgggugcugaacgucgugugcaagaccugcgggcagcagcagaccacccugaagggcguggaggccgucauguacauggggacgcucuccuacgagcaguucaagaagggcgugcagauccccugcaccugcgggaagcaggccaccaaguaccuggugcagcaggagagccccuucgucaugauguccgcccccccggcgcaguacgagcugaagcacggcaccuucacgugcgccagcgaguacaccggcaacuaccagugcgggcacuacaagcacaucaccuccaaggagacccucuacugcaucgacggcgcccugcugacgaagagcagcgaguacaaggggcccaucaccgacguguucuacaaggagaacuccuacaccaccacgaucaagcccgugaccuacaagcucgacggcgucgugugcaccgagaucgaccccaagcuggacaacuacuacaagaaggacaacagcuacuucaccgagcagccgaucgaccuggugcccaaccagcccuaccccaacgccuccuucgacaacuucaaguucgucugcgacaacaucaaguucgccgacgaccucaaccagcugacgggguacaagaagccggcgagccgcgagcugaaggugaccuucuuccccgaccucaacggcgacguggucgccaucgacuacaagcacuacacccccuccuucaagaagggcgccaagcugcugcacaagcccaucguguggcacgugaacaacgccaccaacaaggcgacguacaagccgaacaccuggugcauccggugccucuggagcaccaagcccgucgagaccuccaacagcuucgacgugcugaaguccgaggacgcccaggggauggacaaccuggccugcgaggaccucaagcccgugagcgaggaggucguggagaaccccacgauccagaaggacgugcuggagugcaacgucaagaccaccgagguggugggcgacaucauccugaagccggccaacaacucccucaagaucaccgaggaggucgggcacacggaccugauggccgcguacguggacaacagcucccugaccaucaagaagcccaacgagcucagccgcgugcugggccugaagacccucgccacccacgggcuggccgccgucaacuccgugcccugggacacgaucgccaacuacgcgaagccguuccugaacaagguggucagcaccaccaccaacaucgugacgcgcugccucaaccgggugugcaccaacuacaugcccuacuucuucacccugcugcuccagcugugcaccuucacccgcuccacgaacagccggaucaaggccuccaugcccaccaccaucgccaagaacaccgucaagagcgugggcaaguucugccuggaggccagcuucaacuaccucaagucccccaacuucagcaagcugaucaacaucaucaucugguuccugcuccuguccgugugccugggcagccucaucuacuccacggccgcgcuggggguccugaugagcaaccucggcaugccguccuacugcaccggguaccgcgagggcuaccugaacagcaccaacgugaccaucgccacguacugcaccggcuccauccccugcagcgugugccuguccgggcucgacagccuggacaccuaccccucccuggagaccauccagaucacgaucagcuccuucaagugggaccucaccgccuucggccuggucgccgagugguuccuggccuacauccucuucacccgguucuucuacgugcuggggcuggcggccaucaugcagcucuucuucagcuacuucgccgugcacuucaucuccaacagcuggcugauguggcugaucaucaaccugguccagauggcccccaucuccgcgauggugcgcauguacaucuucuucgccagcuucuacuacguguggaagagcuacguccacgugguggacggcugcaacuccagcaccugcaugaugugcuacaagcggaaccgcgccacgcgggucgagugcaccaccaucgugaacgggguccgccgguccuucuacguguacgccaacggcggcaagggguucugcaagcuccacaacuggaacugcgugaacugcgacaccuucugcgccggcagcacguucaucuccgacgaggucgcgcgcgaccugagccugcaguucaagcggccgaucaaccccaccgaccaguccagcuacaucguggacuccgugaccgucaagaacgggagcauccaccucuacuucgacaaggccggccagaagaccuacgagcgccacucccugagccacuucgugaaccuggacaaccuccgggccaacaacacgaaggggucccugcccaucaacgugaucgucuucgacggcaagagcaagugcgaggaguccagcgccaaguccgccagcguguacuacucccagcugaugugccagcccauccuccugcuggaccaggcgcucgugagcgacgucggcgacagcgccgagguggccgugaagauguucgacgccuacgucaacaccuucuccagcaccuucaacgugccgauggagaagcugaagacccugguggccacggcggaggccgagcucgccaagaacgucucccuggacaacgugcugagcaccuucaucuccgccgcgcgccagggguucguggacagcgacgucgagaccaaggacgugguggagugccucaagcugucccaccagagcgacaucgaggucaccggcgacuccugcaacaacuacaugcugacguacaacaagguggagaacaugaccccccgggaccucggggccugcaucgacugcagcgcccgccacaucaacgugcaggucgccaagucccacaacaucgcccugaucuggaacgugaaggacuucaugagccuguccgagcagcuccggaagcagauccgcagcgcggccaagaagaacaaccugcccuucaagcugaccugcgccaccacgcgccagguggucaacguggugaccaccaagaucgcccucaagggcggguga

SEQ ID NO: 18178 - RNA, 5841 nt, Artificial Sequence
  SARS-CoV-2__MT507793.1__non-structural protein 3 (NSP3) CDS gc
auggcccccaccaaggugaccuucggcgacgacacggucaucgaggugcagggguacaagagcgugaacaucaccuucgagcuggacgagcgcaucgacaagguccucaacgagaagugcuccgccuacaccguggagcugggcaccgaggugaacgaguucgcgugcgucguggccgacgccgugaucaagacgcugcagccggucagcgagcuccugaccccccuggggaucgaccucgacgagugguccauggccaccuacuaccuguucgacgagagcggcgaguucaagcuggccucccacauguacugcagcuucuacccccccgacgaggacgaggaggagggggacugcgaggaggaggaguucgagccguccacccaguacgaguacggcacggaggacgacuaccagggcaagccccucgaguucggggcgaccagcgccgcccugcagcccgaggaggagcaggaggaggacuggcuggacgacgacucccagcagaccgugggccagcaggacgggagcgaggacaaccagaccacgaccauccagaccaucguggagguccagccccagcucgagauggagcugaccccgguggugcagacgaucgaggucaacuccuucagcggcuaccugaagcucaccgacaacguguacaucaagaacgccgacaucguggaggaggcgaagaaggucaagcccaccgugguggucaacgccgccaacguguaccugaagcacgggggcggcguggccggggcccugaacaaggcgaccaacaacgccaugcaggucgaguccgacgacuacaucgccacgaacggcccccucaagguggggggcagcugcguccuguccggccacaaccuggccaagcacugccuccacgugguggggcccaacgucaacaagggcgaggacauccagcugcugaagagcgccuacgagaacuucaaccagcacgaggugcuccuggcgccgcugcucuccgccgggaucuucggcgccgaccccauccacagccugcgggugugcgucgacaccgugcgcaccaacguguaccuggccgucuucgacaagaaccucuacgacaagcugguguccagcuuccuggagaugaagagcgagaagcagguggagcagaagaucgccgagauccccaaggaggaggucaagcccuucaucaccgaguccaagccgagcguggagcagcggaagcaggacgacaagaagaucaaggcgugcguggaggaggucacgaccacccucgaggagaccaaguuccugacggagaaccugcuccuguacaucgacaucaacgggaaccugcaccccgacuccgccacccucgugagcgacaucgacaucaccuuccugaagaaggacgcccccuacaucgugggcgacgucgugcaggagggcgugcugaccgccgucgugauccccacgaagaaggccgggggcaccaccgagaugcucgcgaaggcccugcgcaaggugccgaccgacaacuacaucacgaccuaccccgggcagggccugaacggguacaccgucgaggaggccaagaccgugcucaagaagugcaaguccgccuucuacauccugcccagcaucaucuccaacgagaagcaggagauccugggcaccgugagcuggaaccuccgggagaugcuggcgcacgccgaggagacgcgcaagcugaugcccgucugcguggagaccaaggccaucguguccaccauccagcggaaguacaagggcaucaagauccaggagggggucguggacuacggcgcccgcuucuacuucuacaccagcaagacgaccguggccucccugaucaacacccucaacgaccugaacgagacccuggucacgaugccgcucggguacgugacccacggccugaaccuggaggaggcggcccgguacaugcgcagccucaaggugcccgccaccgucuccgugagcucccccgacgccgugaccgccuacaacggguaccugacgagcuccagcaagacccccgaggagcacuucaucgagaccaucucccuggcgggcagcuacaaggacuggagcuacuccggccagagcacccagcucgggaucgaguuccugaagcggggcgacaaguccgucuacuacacgagcaacccgaccaccuuccaccuggacggggaggugaucaccuucgacaaccucaagacgcugcugucccuccgcgaggugcggaccaucaaggucuucaccaccguggacaacaucaaccugcacacgcagguggucgacaugagcaugaccuacggccagcaguucggccccaccuaccuggacggggccgacgugaccaagaucaagccccacaacucccacgagggcaagacguucuacgugcucccgaacgacgacacccugcgcgucgaggccuucgaguacuaccacaccaccgaccccagcuuccuggggcgguacauguccgcccucaaccacacgaagaaguggaaguacccccaggugaacggccugaccagcaucaagugggccgacaacaacugcuaccuggcgaccgcccuccugacccugcagcagaucgagcucaaguucaaccccccggcccugcaggacgccuacuaccgcgcgcgggccggggaggccgccaacuucugcgcccugauccucgcguacugcaacaagacggugggcgagcugggcgacguccgcgagaccauguccuaccuguuccagcacgccaaccucgacagcugcaagcgggugcugaacgucgugugcaagaccugcgggcagcagcagaccacccugaagggcguggaggccgucauguacauggggacgcucuccuacgagcaguucaagaagggcgugcagauccccugcaccugcgggaagcaggccaccaaguaccuggugcagcaggagagccccuucgucaugauguccgcccccccggcgcaguacgagcugaagcacggcaccuucacgugcgccagcgaguacaccggcaacuaccagugcgggcacuacaagcacaucaccuccaaggagacccucuacugcaucgacggcgcccugcugacgaagagcagcgaguacaaggggcccaucaccgacguguucuacaaggagaacuccuacaccaccacgaucaagcccgugaccuacaagcucgacggcgucgugugcaccgagaucgaccccaagcuggacaacuacuacaagaaggacaacagcuacuucaccgagcagccgaucgaccuggugcccaaccagcccuaccccaacgccuccuucgacaacuucaaguucgucugcgacaacaucaaguucgccgacgaccucaaccagcugacgggguacaagaagccggcgagccgcgagcugaaggugaccuucuuccccgaccucaacggcgacguggucgccaucgacuacaagcacuacacccccuccuucaagaagggcgccaagcugcugcacaagcccaucguguggcacgugaacaacgccaccaacaaggcgacguacaagccgaacaccuggugcauccggugccucuggagcaccaagcccgucgagaccuccaacagcuucgacgugcugaaguccgaggacgcccaggggauggacaaccuggccugcgaggaccucaagcccgugagcgaggaggucguggagaaccccacgauccagaaggacgugcuggagugcaacgucaagaccaccgagguggugggcgacaucauccugaagccggccaacaacucccucaagaucaccgaggaggucgggcacacggaccugauggccgcguacguggacaacagcucccugaccaucaacaagcccaacgagcucagccgcgugcugggccugaagacccucgccacccacgggcuggccgccgucaacuccgugcccugggacacgaucgccaacuacgcgaagccguuccugaacaagguggucagcaccaccaccaacaucgugacgcgcugccucaaccgggugugcaccaacuacaugcccuacuucuucacccugcugcuccagcugugcaccuucacccgcuccacgaacagccggaucaaggccuccaugcccaccaccaucgccaagaacaccgucaagagcgugggcaaguucugccuggaggccagcuucaacuaccucaagucccccaacuucagcaagcugaucaacaucaucaucugguuccugcuccuguccgugugccugggcagccucaucuacuccacggccgcgcuggggguccugaugagcaaccucggcaugccguccuacugcaccggguaccgcgagggcuaccugaacagcaccaacgugaccaucgccacguacugcaccggcuccauccccugcagcgugugccuguccgggcucgacagccuggacaccuaccccucccuggagaccauccagaucacgaucagcuccuucaagugggaccucaccgccuucggccuggucgccgagugguuccuggccuacauccucuucacccgguucuucuacgugcuggggcuggcggccaucaugcagcucuucuucagcuacuucgccgugcacuucaucuccaacagcuggcugauguggcugaucaucaaccugguccagauggcccccaucuccgcgauggugcgcauguacaucuucuucgccagcuucuacuacguguggaagagcuacguccacgugguggacggcugcaacuccagcaccugcaugaugugcuacaagcggaaccgcgccacgcgggucgagugcaccaccaucgugaacgggguccgccgguccuucuacguguacgccaacggcggcaagggguucugcaagcuccacaacuggaacugcgugaacugcgacaccuucugcgccggcagcacguucaucuccgacgaggucgcgcgcgaccugagccugcaguucaagcggccgaucaaccccaccgaccaguccagcuacaucguggacuccgugaccgucaagaacgggagcauccaccucuacuucgacaaggccggccagaagaccuacgagcgccacucccugagccacuucgugaaccuggacaaccuccgggccaacaacacgaaggggucccugcccaucaacgugaucgucuucgacggcaagagcaagugcgaggaguccagcgccaaguccgccagcguguacuacucccagcugaugugccagcccauccuccugcuggaccaggcgcucgugagcgacgucggcgacagcgccgagguggccgugaagauguucgacgccuacgucaacaccuucuccagcaccuucaacgugccgauggagaagcugaagacccugguggccacggcggaggccgagcucgccaagaacgucucccuggacaacgugcugagcaccuucaucuccgccgcgcgccagggguucguggacagcgacgucgagaccaaggacgugguggagugccucaagcugucccaccagagcgacaucgaggucaccggcgacuccugcaacaacuacaugcugacguacaacaagguggagaacaugaccccccgggaccucggggccugcaucgacugcagcgcccgccacaucaacgcccagguggccaagucccacaacaucgcgcugaucuggaacgucaaggacuucaugagccuguccgagcagcuccggaagcagauccgcagcgccgccaagaagaacaaccugcccuucaagcugaccugcgccaccacgcgccagguggugaacgucgugaccaccaagaucgcccucaagggcggguga

SEQ ID NO: 18179 - RNA, 5841 nt, Artificial Sequence
  SARS-CoV-2__MT499208.1__non-structural protein 3 (NSP3) CDS gc
auggcccccaccaaggugaccuucggcgacgacacggucaucgaggugcagggguacaagagcgugaacaucaccuucgagcuggacgagcgcaucgacaagguccucaacgagaagugcuccgccuacaccguggagcugggcaccgaggugaacgaguucgcgugcgucguggccgacgccgugaucaagacgcugcagccggucagcgagcuccugaccccccuggggaucgaccucgacgagugguccauggccaccuacuaccuguucgacgagagcggcgaguucaagcuggccucccacauguacugcagcuucuacccccccgacgaggacgaggaggagggggacugcgaggaggaggaguucgagccguccacccaguacgaguacggcacggaggacgacuaccagggcaagccccucgaguucggggcgaccagcgccgcccugcagcccgaggaggagcaggaggaggacuggcuggacgacgacucccagcagaccgugggccagcaggacgggagcgaggacaaccagaccacgaccauccagaccaucguggagguccagccccagcucgagauggagcugaccccgguggugcagacgaucgaggucaacuccuucagcggcuaccugaagcucaccgacaacguguacaucaagaacgccgacaucguggaggaggcgaagaaggucaagcccaccgugguggucaacgccgccaacguguaccugaagcacgggggcggcguggccggggcccugaacaaggcgaccaacaacgccaugcaggucgaguccgacgacuacaucgccacgaacggcccccucaagguggggggcagcugcguccuguccggccacaaccuggccaagcacugccuccacgugguggggcccaacgucaacaagggcgaggacauccaguuccugaagagcgccuacgagaacuucaaccagcacgaggugcugcucgcgccgcugcuguccgccgggaucuucggcgccgaccccauccacagccuccgggugugcgucgacaccgugcgcaccaacguguaccuggccgucuucgacaagaaccuguacgacaagcucguguccagcuuccuggagaugaagagcgagaagcagguggagcagaagaucgccgagauccccaaggaggaggucaagcccuucaucaccgaguccaagccgagcguggagcagcggaagcaggacgacaagaagaucaaggcgugcguggaggaggucacgaccacccuggaggagaccaaguuccucacggagaaccugcugcucuacaucgacaucaacgggaaccugcaccccgacuccgccacccuggugagcgacaucgacaucaccuuccucaagaaggacgcccccuacaucgugggcgacgucgugcaggagggcgugcugaccgccgucgugauccccacgaagaaggccgggggcaccaccgagaugcuggcgaaggcccuccgcaaggugccgaccgacaacuacaucacgaccuaccccgggcagggccugaacggguacaccgucgaggaggccaagaccgugcugaagaagugcaaguccgccuucuacauccuccccagcaucaucuccaacgagaagcaggagauccugggcaccgugagcuggaaccugcgggagaugcucgcgcacgccgaggagacgcgcaagcugaugcccgucugcguggagaccaaggccaucguguccaccauccagcggaaguacaagggcaucaagauccaggagggggucguggacuacggcgcccgcuucuacuucuacaccagcaagacgaccguggccucccugaucaacacccugaacgaccucaacgagacccuggucacgaugccgcugggguacgugacccacggccucaaccuggaggaggcggcccgguacaugcgcagccugaaggugcccgccaccgucuccgugagcucccccgacgccgugaccgccuacaacggguaccucacgagcuccagcaagacccccgaggagcacuucaucgagaccaucucccuggcgggcagcuacaaggacuggagcuacuccggccagagcacccagcuggggaucgaguuccucaagcggggcgacaaguccgucuacuacacgagcaacccgaccaccuuccaccuggacggggaggugaucaccuucgacaaccugaagacgcuccugucccugcgcgaggugcggaccaucaaggucuucaccaccguggacaacaucaaccuccacacgcagguggucgacaugagcaugaccuacggccagcaguucggccccaccuaccuggacggggccgacgugaccaagaucaagccccacaacucccacgagggcaagacguucuacgugcugccgaacgacgacacccuccgcgucgaggccuucgaguacuaccacaccaccgaccccagcuuccuggggcgguacauguccgcccugaaccacacgaagaaguggaaguacccccaggugaacggccucaccagcaucaagugggccgacaacaacugcuaccuggcgaccgcccugcucacccugcagcagaucgagcugaaguucaaccccccggcccuccaggacgccuacuaccgcgcgcgggccggggaggccgccaacuucugcgcccugauccuggcguacugcaacaagacggugggcgagcucggcgacguccgcgagaccauguccuaccuguuccagcacgccaaccuggacagcugcaagcgggugcucaacgucgugugcaagaccugcgggcagcagcagaccacccugaagggcguggaggccgucaucuacauggggacgcuguccuacgagcaguucaagaagggcgugcagauccccugcaccugcgggaagcaggccaccaaguaccucgugcagcaggagagccccuucgucaugauguccgcccccccggcgcaguacgagcugaagcacggcaccuucacgugcgccagcgaguacaccggcaacuaccagugcgggcacuacaagcacaucaccuccaaggagacccuguacugcaucgacggcgcccuccugacgaagagcagcgaguacaaggggcccaucaccgacguguucuacaaggagaacuccuacaccaccacgaucaagcccgugaccuacaagcuggacggcgucgugugcaccgagaucgaccccaagcucgacaacuacuacaagaaggacaacagcuacuucaccgagcagccgaucgaccuggugcccaaccagcccuaccccaacgccuccuucgacaacuucaaguucgucugcgacaacaucaaguucgccgacgaccugaaccagcucacgggguacaagaagccggcgagccgcgagcugaaggugaccuucuuccccgaccugaacggcgacguggucgccaucgacuacaagcacuacacccccuccuucaagaagggcgccaagcuccugcacaagcccaucguguggcacgugaacaacgccaccaacaaggcgacguacaagccgaacaccuggugcauccggugccuguggagcaccaagcccgucgagaccuccaacagcuucgacgugcucaaguccgaggacgcccaggggauggacaaccuggccugcgaggaccugaagcccgugagcgaggaggucguggagaaccccacgauccagaaggacgugcucgagugcaacgucaagaccaccgagguggugggcgacaucauccugaagccggccaacaacucccugaagaucaccgaggaggucgggcacacggaccucauggccgcguacguggacaacagcucccugaccaucaagaagcccaacgagcugagccgcgugcucggccugaagacccuggccacccacgggcucgccgccgucaacuccgugcccugggacacgaucgccaacuacgcgaagccguuccugaacaagguggucagcaccaccaccaacaucgugacgcgcugccugaaccgggugugcaccaacuacaugcccuacuucuucacccuccugcugcagcucugcaccuucacccgcuccacgaacagccggaucaaggccuccaugcccaccaccaucgccaagaacaccgucaagagcgugggcaaguucugccuggaggccagcuucaacuaccugaagucccccaacuucagcaagcucaucaacaucaucaucugguuccugcugcucuccgugugccugggcagccugaucuacuccacggccgcgcucgggguccugaugagcaaccugggcaugccguccuacugcaccggguaccgcgagggcuaccucaacagcaccaacgugaccaucgccacguacugcaccggcuccauccccugcagcgugugccuguccgggcuggacagccucgacaccuaccccucccuggagaccauccagaucacgaucagcuccuucaagugggaccugaccgccuucggccucgucgccgagugguuccuggccuacauccuguucacccgguucuucuacgugcucgggcuggcggccaucaugcagcuguucuucagcuacuucgccgugcacuucaucuccaacagcuggcucauguggcugaucaucaaccugguccagauggcccccaucuccgcgauggugcgcauguacaucuucuucgccagcuucuacuacguguggaagagcuacguccacgugguggacggcugcaacuccagcaccugcaugaugugcuacaagcggaaccgcgccacgcgggucgagugcaccaccaucgugaacgggguccgccgguccuucuacguguacgccaacggcggcaagggguucugcaagcugcacaacuggaacugcgugaacugcgacaccuucugcgccggcagcacguucaucuccgacgaggucgcgcgcgaccucagccugcaguucaagcggccgaucaaccccaccgaccaguccagcuacaucguggacuccgugaccgucaagaacgggagcauccaccuguacuucgacaaggccggccagaagaccuacgagcgccacucccucagccacuucgugaaccuggacaaccugcgggccaacaacacgaaggggucccuccccaucaacgugaucgucuucgacggcaagagcaagugcgaggaguccagcgccaaguccgccagcguguacuacucccagcugaugugccagcccauccugcuccuggaccaggcgcuggugagcgacgucggcgacagcgccgagguggccgugaagauguucgacgccuacgucaacaccuucuccagcaccuucaacgugccgauggagaagcucaagacccugguggccacggcggaggccgagcuggccaagaacgucucccucgacaacgugcugagcaccuucaucuccgccgcgcgccagggguucguggacagcgacgucgagaccaaggacgugguggagugccugaagcucucccaccagagcgacaucgaggucaccggcgacuccugcaacaacuacaugcugacguacaacaagguggagaacaugaccccccgggaccugggggccugcaucgacugcagcgcccgccacaucaacgcccagguggccaagucccacaacaucgcgcucaucuggaacgucaaggacuucaugagccuguccgagcagcugcggaagcagauccgcagcgccgccaagaagaacaaccuccccuucaagcugaccugcgccaccacgcgccagguggugaacgucgugaccaccaagaucgcccugaagggcggguga

SEQ ID NO: 18180 - RNA, 5841 nt, Artificial Sequence
  SARS-CoV-2__MT270104.1__non-structural protein 3 (NSP3) CDS gc
auggcccccaccaaggugaccuucggcgacgacacggucaucgaggugcagggguacaagagcgugaacaucaccuucgagcuggacgagcgcaucgacaagguccucaacgagaagugcuccgccuacaccguggagcugggcaccgaggugaacgaguucgcgugcgucguggccgacgccgugaucaagacgcugcagccggucagcgagcuccugaccccccuggggaucgaccucgacgagugguccauggccaccuacuaccuguucgacgagagcggcgaguucaagcuggccucccacauguacugcagcuucuacccccccgacgaggacgaggaggagggggacugcgaggaggaggaguucgagccguccacccaguacgaguacggcacggaggacgacuaccagggcaagccccucgaguucggggcgaccagcgccgcccugcagcccgaggaggagcaggaggaggacuggcuggacgacgacucccagcagaccgugggccagcaggacgggagcgaggacaaccagaccacgaccauccagaccaucguggagguccagccccagcucgagauggagcugaccccgguggugcagacgaucgaggucaacuccuucagcggcuaccugaagcucaccgacaacguguacaucaagaacgccgacaucguggaggaggcgaagaaggucaagcccaccgugguggucaacgccgccaacguguaccugaagcacgggggcggcguggccggggcccugaacaaggcgaccaacaacgccaugcaggucgaguccgacgacuacaucgccacgaacggcccccucaagguggggggcagcugcguccuguccggccacaaccuggccaagcacugccuccacgugguggggcccaacgucaacaagggcgaggacauccagcugcugaagagcgccuacgagaacuucaaccagcacgaggugcuccuggcgccgcugcucuccgccgggaucuucggcgccgaccccauccacagccugcgggugugcgucgacaccgugcgcaccaacguguaccuggccgucuucgacaagaaccucuacgacaagcugguguccagcuuccuggagaugaagagcgagaagcagguggagcagaagaucgccgagauccccaaggaggaggucaagcccuucaucaccgaguccaagccgagcguggagcagcggaagcaggacgacaagaagaucaaggcgugcguggaggaggucacgaccacccucgaggagaccaaguuccugacggagaaccugcuccuguacaucgacaucaacgggaaccugcaccccgacuccgccacccucgugagcgacaucgacaucaccuuccugaagaaggacgcccccuacaucgugggcgacgucgugcaggagggcgugcugaccgccgucgugauccccacgaagaaggccgggggcaccaccgagaugcucgcgaaggcccugcgcaaggugccgaccgacaacuacaucacgaccuaccccgggcagggccugaacggguacaccgucgaggaggccaagaccgugcucaagaagugcaaguccgccuucuacauccugcccagcaucaucuccaacgagaagcaggagauccugggcaccgugagcuggaaccuccgggagaugcuggcgcacgccgaggagacgcgcaagcugaugcccgucugcguggagaccaaggccaucguguccaccauccagcggaaguacaagggcaucaagauccaggagggggucguggacuacggcgcccgcuucuacuucuacaccagcaagacgaccguggccucccugaucaacacccucaacgaccugaacgagacccuggucacgaugccgcucggguacgugacccacggccugaaccuggaggaggcggcccgguacaugcgcagccucaaggugcccgccaccgucuccgugagcucccccgacgccgugaccgccuacaacggguaccugacgagcuccagcaagacccccgaggagcacuucaucgagaccaucucccuggcgggcagcuacaaggacuggagcuacuccggccagagcacccagcucgggaucgaguuccugaagcggggcgacaaguccgucuacuacacgagcaacccgaccaccuuccaccuggacggggaggugaucaccuucgacaaccucaagacgcugcugucccuccgcgaggugcggaccaucaaggucuucaccaccguggacaacaucaaccugcacacgcagguggucgacaugagcaugaccuacggccagcaguucggccccaccuaccuggacggggccgacgugaccaagaucaagccccacaacucccacgagggcaagacguucuacgugcucccgaacgacgacacccugcgcgucgaggccuucgaguacuaccacaccaccgaccccagcuuccuggggcgguacauguccgcccucaaccacacgaagaaguggaaguacccccaggugaacggccugaccagcaucaagugggccgacaacaacugcuaccuggcgaccgcccuccugacccugcagcagaucgagcucaaguucaaccccccggcccugcaggacgccuacuaccgcgcgcgggccggggaggccgccaacuucugcgcccugauccucgcguacugcaacaagacggugggcgagcugggcgacguccgcgagaccauguccuaccuguuccagcacgccaaccucgacagcugcaagcgggugcugaacgucgugugcaagaccugcgggcagcagcagaccacccugaagggcguggaggccgucauguacauggggacgcucuccuacgagcaguucaagaagggcgugcagauccccugcaccugcgggaagcaggccaccaaguaccuggugcagcaggagagccccuucgucaugauguccgcccccccggcgcaguacgagcugaagcacggcaccuucacgugcgccagcgaguacaccggcaacuaccagugcgggcacuacaagcacaucaccuccaaggagacccucuacugcaucgacggcgcccugcugacgaagagcagcgaguacaaggggcccaucaccgacguguucuacaaggagaacuccuacaccaccacgaucaagcccgugaccuacaagcucgacggcgucgugugcaccgagaucgaccccaagcuggacaacuacuacaagaaggacaacagcuacuucaccgagcagccgaucgaccuggugcccaaccagcccuaccccaacgccuccuucgacaacuucaaguucgucugcgacaacaucaaguucgccgacgaccucaaccagcugacgggguacaagaagccggcgagccgcgagcugaaggugaccuucuuccccgaccucaacggcgacguggucgccaucgacuacaagcacuacacccccuccuucaagaagggcgccaagcugcugcacaagcccaucguguggcacgugaacaacgccaccaacaaggcgacguacaagccgaacaccuggugcauccggugccucuggagcaccaagcccgucgagaccuccaacagcuucgacgugcugaaguccgaggacgcccaggggauggacaaccuggccugcgaggaccucaagcccgugagcgaggaggucguggagaaccccacgauccagaaggacauccuggagugcaacgugaagaccaccgaggucgugggcgacaucauccugaagccggccaacaacucccucaagaucaccgaggagguggggcacacggaccugauggccgcguacgucgacaacagcucccugaccaucaagaagcccaacgagcucagccgcgugcugggccugaagacccucgccacccacgggcuggccgccgugaacuccguccccugggacacgaucgccaacuacgcgaagccguuccugaacaagguggugagcaccaccaccaacaucgucacgcgcugccucaaccgggugugcaccaacuacaugcccuacuucuucacccugcugcuccagcugugcaccuucacccgcuccacgaacagccggaucaaggccuccaugcccaccaccaucgccaagaacaccgugaagagcgucggcaaguucugccuggaggccagcuucaacuaccucaagucccccaacuucagcaagcugaucaacaucaucaucugguuccugcuccuguccgugugccugggcagccucaucuacuccacggccgcgcugggggugcugaugagcaaccucggcaugccguccuacugcaccggguaccgcgagggcuaccugaacagcaccaacgucaccaucgccacguacugcaccggcuccauccccugcagcgugugccuguccgggcucgacagccuggacaccuaccccucccuggagaccauccagaucacgaucagcuccuucaagugggaccucaccgccuucggccugguggccgagugguuccuggccuacauccucuucacccgguucuucuacguccuggggcuggcggccaucaugcagcucuucuucagcuacuucgccgugcacuucaucuccaacagcuggcugauguggcugaucaucaaccuggugcagauggcccccaucuccgcgaugguccgcauguacaucuucuucgccagcuucuacuacguguggaagagcuacgugcacgucguggacggcugcaacuccagcaccugcaugaugugcuacaagcggaaccgcgccacgcggguggagugcaccaccaucgucaacggggugcgccgguccuucuacgucuacgccaacggcggcaagggguucugcaagcuccacaacuggaacugcgugaacugcgacaccuucugcgccggcagcacguucaucuccgacgagguggcgcgcgaccugagccugcaguucaagcggccgaucaaccccaccgaccaguccagcuacaucgucgacuccgugaccgugaagaacgggagcauccaccucuacuucgacaaggccggccagaagaccuacgagcgccacucccugagccacuucgucaaccuggacaaccuccgggccaacaacacgaaggggucccugcccaucaacgugaucguguucgacggcaagagcaagugcgaggaguccagcgccaaguccgccagcgucuacuacucccagcugaugugccagcccauccuccugcuggaccaggcgcucgugagcgacgugggcgacagcgccgaggucgccgugaagauguucgacgccuacgugaacaccuucuccagcaccuucaacgucccgauggagaagcugaagacccugguggccacggcggaggccgagcucgccaagaacgugucccuggacaacguccugagcaccuucaucuccgccgcgcgccagggguucguggacagcgacguggagaccaaggacgucguggagugccucaagcugucccaccagagcgacaucgaggugaccggcgacuccugcaacaacuacaugcugacguacaacaaggucgagaacaugaccccccgggaccucggggccugcaucgacugcagcgcccgccacaucaacgcccagguggccaagucccacaacaucgcgcugaucuggaacgugaaggacuucaugagccuguccgagcagcuccggaagcagauccgcagcgccgccaagaagaacaaccugcccuucaagcugaccugcgccaccacgcgccaggucgugaacguggucaccaccaagaucgcccucaagggcggguga

SEQ ID NO: 18181 - RNA, 5841 nt, Artificial Sequence
  SARS-CoV-2__MT477835.1__non-structural protein 3 (NSP3) CDS gc
auggcccccaccaaggugaccuucggcgacgacacggucaucgaggugcagggguacaagagcgugaacaucaccuucgagcuggacgagcgcaucgacaagguccucaacgagaagugcuccgccuacaccguggagcugggcaccgaggugaacgaguucgcgugcgucguggccgacgccgugaucaagacgcugcagccggucagcgagcuccugaccccccuggggaucgaccucgacgagugguccauggccaccuacuaccuguucgacgagagcggcgaguucaagcuggccucccacauguacugcagcuucuacccccccgacgaggacgaggaggagggggacugcgaggaggaggaguucgagccguccacccaguacgaguacggcacggaggacgacuaccagggcaagccccucgaguucggggcgaccagcgccgcccugcagcccgaggaggagcaggaggaggacuggcuggacgacgacucccagcagaccgugggccagcaggacgggagcgaggacaaccagaccacgaccauccagaccaucguggagguccagccccagcucgagauggagcugaccccgguggugcagacgaucgaggucaacuccuucagcggcuaccugaagcucaccgacaacguguacaucaagaacgccgacaucguggaggaggcgaagaaggucaagcccaccgugguggucaacgccgccaacguguaccugaagcacgggggcggcguggccggggcccugaacaaggcgaccaacaacgccaugcaggucgaguccgacgacuacaucgccacgaacggcccccucaagguggggggcagcugcguccuguccggccacaaccuggccaagcacugccuccacgugguggggcccaacgucaacaagggcgaggacauccagcugcugaagagcgccuacgagaacuucaaccagcacgaggugcuccuggcgccgcugcucuccgccgggaucuucggcgccgaccccauccacagccugcgggugugcgucgacaccgugcgcaccaacguguaccuggccgucuucgacaagaaccucuacgacaagcugguguccagcuuccuggagaugaagagcgagaagcagguggagcagaagaucgccgagauccccaaggaggaggucaagcccuucaucaccgaguccaagccgagcguggagcagcggaagcaggacgacaagaagaucaaggcgugcguggaggaggucacgaccacccucgaggagaccaaguuccugacggagaaccugcuccuguacaucgacaucaacgggaaccugcaccccgacuccgccacccucgugagcgacaucgacaucaccuuccugaagaaggacgcccccuacaucgugggcgacgucgugcaggagggcgugcugaccgccgucgugauccccacgaagaaggccgggggcaccaccgagaugcucgcgaaggcccugcgcaaggugccgaccgacaacuacaucacgaccuaccccgggcagggccugaacggguacaccgucgaggaggccaagaccgugcucaagaagugcaaguccgccuucuacauccugcccagcaucaucuccaacgagaagcaggagauccugggcaccgugagcuggaaccuccgggagaugcuggcgcacgccgaggagacgcgcaagcugaugcccgucugcguggagaccaaggccaucguguccaccauccagcggaaguacaagggcaucaagauccaggagggggucguggacuacggcgcccgcuucuacuucuacaccagcaagacgaccguggccucccugaucaacacccucaacgaccugaacgagacccuggucacgaugccgcucggguacgugacccacggccugaaccuggaggaggcggcccgguacaugcgcagccucaaggugcccgccaccgucuccgugagcucccccgacgccgugaccgccuacaacggguaccugacgagcuccagcaagacccccgaggagcacuucaucgagaccaucucccuggcgggcagcuacaaggacuggagcuacuccggccagagcacccagcucgggaucgaguuccugaagcggggcgacaaguccgucuacuacacgagcaacccgaccaccuuccaccuggacggggaggugaucaccuucgacaaccucaagacgcugcugucccuccgcgaggugcggaccaucaaggucuucaccaccguggacaacaucaaccugcacacgcagguggucgacaugagcaugaccuacggccagcaguucggccccaccuaccuggacggggccgacgugaccaagaucaagccccacaacucccacgagggcaagacguucuacgugcucccgaacgacgacacccugcgcgucgaggccuucgaguacuaccacaccaccgaccccagcuuccuggggcgguacauguccgcccucaaccacacgaagaaguggaaguacccccaggugaacggccugaccagcaucaagugggccgacaacaacugcuaccuggcgaccgcccuccugacccugcagcagaucgagcucaaguucaaccccccggcccugcaggacgccuacuaccgcgcgcgggccggggaggccgccaacuucugcgcccugauccucgcguacugcaacaagacggugggcgagcugggcgacguccgcgagaccauguccuaccuguuccagcacgccaaccucgacagcugcaagcgggugcugaacgucgugugcaagaccugcgggcagcagcagaccacccugaagggcguggaggccgucauguacauggggacgcucuccuacgagcaguucaagaagggcgugcagauccccugcaccugcgggaagcaggccaccaaguaccuggugcagcaggagagccccuucgucaugauguccgcccccccggcgcaguacgagcugaagcacggcaccuucacgugcgccagcgaguacaccggcaacuaccagugcgggcacuacaagcacaucaccuccaaggagacccucuacugcaucgacggcgcccugcugacgaagagcagcgaguacaaggggcccaucaccgacguguucuacaaggagaacuccuacaccaccacgaucaagcccgugaccuacaagcucgacggcgucgugugcaccgagaucgaccccaagcuggacaacuacuacaagaaggacaacagcuacuucaccgagcagccgaucgaccuggugcccaaccagcccuaccccaacgccuccuucgacaacuucaaguucgucugcgacaacaucaaguucgccgacgaccucaaccagcugacgggguacaagaagccggcgagccgcgagcugaaggugaccuucuuccccgaccucaacggcgacguggucgccaucgacuacaagcacuacacccccuccuucaagaagggcgccaagcugcugcacaagcccaucguguggcacgugaacaacgccaccaacaaggcgacguacaagccgaacaccuggugcauccggugccucuggagcaccaagcccgucgagaccuccaacagcuucgacgugcugaaguccgaggacgcccaggggauggacaaccuggccugcgaggaccucaagcccgugagcgaggaggucguggagaaccccacgauccagaaggacgugcuggagugcaacgucaagaccaccgagguggugggcgacaucauccugaagccggucaacaacucccucaagaucaccgaggagguggggcacacggaccugauggccgccuacguggacaacagcucccugaccaucaagaagcccaacgagcucagccgcguccugggccugaagacccucgcgacccacgggcuggccgccgugaacuccgugcccugggacacgaucgccaacuacgccaagccguuccugaacaaggucgugagcaccaccaccaacaucgugacgcgcugccucaaccgggucugcaccaacuacaugcccuacuucuucacccugcugcuccagcugugcaccuucacccgcuccacgaacagccggaucaaggcguccaugcccaccaccaucgccaagaacaccgugaagagcgugggcaaguucugccuggaggccagcuucaacuaccucaagucccccaacuucagcaagcugaucaacaucaucaucugguuccugcuccuguccgucugccugggcagccucaucuacuccacggccgcccugggggugcugaugagcaaccucggcaugccguccuacugcaccggguaccgcgagggcuaccugaacagcaccaacgugaccaucgcgacguacugcaccggcuccauccccugcagcgucugccuguccgggcucgacagccuggacaccuaccccucccuggagaccauccagaucacgaucagcuccuucaagugggaccucaccgccuucggccugguggccgagugguuccuggccuacauccucuucacccgguucuucuacgugcuggggcuggccgcgaucaugcagcucuucuucagcuacuucgccguccacuucaucuccaacagcuggcugauguggcugaucaucaaccuggugcagauggcccccaucuccgccauggugcgcauguacaucuucuucgcgagcuucuacuacgucuggaagagcuacgugcacguggucgacggcugcaacuccagcaccugcaugaugugcuacaagcggaaccgcgccacgcggguggagugcaccaccaucgucaacggggugcgccgguccuucuacguguacgccaacggcggcaagggguucugcaagcuccacaacuggaacugcgucaacugcgacaccuucugcgccggcagcacguucaucuccgacgagguggcccgcgaccugagccugcaguucaagcggccgaucaaccccaccgaccaguccagcuacaucguggacuccgucaccgugaagaacgggagcauccaccucuacuucgacaaggcgggccagaagaccuacgagcgccacucccugagccacuucgugaaccuggacaaccuccgggccaacaacacgaaggggucccugcccaucaacgucaucguguucgacggcaagagcaagugcgaggaguccagcgccaaguccgccagcguguacuacucccagcugaugugccagcccauccuccugcuggaccaggcccucgucagcgacgugggcgacagcgcggagguggccgucaagauguucgacgccuacgugaacaccuucuccagcaccuucaacgugccgauggagaagcugaagacccuggucgccacggccgaggcggagcucgccaagaacgugucccuggacaacgugcugagcaccuucaucuccgccgcccgccagggguucgucgacagcgacguggagaccaaggacguggucgagugccucaagcugucccaccagagcgacaucgaggugaccggcgacuccugcaacaacuacaugcugacguacaacaagguggagaacaugaccccccgggaccucggggcgugcaucgacugcagcgcccgccacaucaacgcccaggucgccaagucccacaacaucgcccugaucuggaacgugaaggacuucaugagccuguccgagcagcuccggaagcagauccgcagcgcggccaagaagaacaaccugcccuucaagcugaccugcgccaccacgcgccagguggucaacguggugaccaccaagaucgcccucaagggcggguga

SEQ ID NO: 18182 - RNA, 5841 nt, Artificial Sequence
  SARS-CoV-2__MT477844.1__non-structural protein 3 (NSP3) CDS gc
auggcccccaccaaggugaccuucggcgacgacacggucaucgaggugcagggguacaagagcgugaacaucaccuucgagcuggacgagcgcaucgacaagguccucaacgagaagugcuccgccuacaccguggagcugggcaccgaggugaacgaguucgcgugcgucguggccgacgccgugaucaagacgcugcagccggucagcgagcuccugaccccccuggggaucgaccucgacgagugguccauggccaccuacuaccuguucgacgagagcggcgaguucaagcuggccucccacauguacugcagcuucuacccccccgacgaggacgaggaggagggggacugcgaggaggaggaguucgagccguccacccaguacgaguacggcacggaggacgacuaccagggcaagccccucgaguucggggcgaccagcgccgcccugcagcccgaggaggagcaggaggaggacuggcuggacgacgacucccagcagaccgugggccagcaggacgggagcgaggacaaccagaccacgaccauccagaccaucguggagguccagucccagcucgagauggagcugacccccguggugcagacgaucgaggucaacagcuucuccggcuaccugaagcucaccgacaacguguacaucaagaacgccgacaucguggaggaggcgaagaaggucaagccgaccgugguggucaacgccgccaacguguaccugaagcacgggggcggcguggccggggcccugaacaaggcgaccaacaacgccaugcaggucgagagcgacgacuacaucgccacgaacggcccccucaagguggggggcuccugcguccugagcggccacaaccuggccaagcacugccuccacgugguggggcccaacgucaacaagggcgaggacauccagcugcugaaguccgccuacgagaacuucaaccagcacgaggugcuccuggcgccccugcucagcgccgggaucuucggcgccgacccgauccacucccugcgggugugcgucgacaccgugcgcaccaacguguaccuggccgucuucgacaagaaccucuacgacaagcuggugagcagcuuccuggagaugaaguccgagaagcagguggagcagaagaucgccgagauccccaaggaggaggucaagcccuucaucaccgagagcaagcccuccguggagcagcggaagcaggacgacaagaagaucaaggcgugcguggaggaggucacgaccacccucgaggagaccaaguuccugacggagaaccugcuccuguacaucgacaucaacgggaaccugcacccggacagcgccacccucguguccgacaucgacaucaccuuccugaagaaggacgcccccuacaucgugggcgacgucgugcaggagggcgugcugaccgccgucgugauccccacgaagaaggccgggggcaccaccgagaugcucgcgaaggcccugcgcaaggugcccaccgacaacuacaucacgaccuacccggggcagggccugaacggguacaccgucgaggaggccaagaccgugcucaagaagugcaagagcgccuucuacauccugcccuccaucaucagcaacgagaagcaggagauccugggcaccguguccuggaaccuccgggagaugcuggcgcacgccgaggagacgcgcaagcugaugcccgucugcguggagaccaaggccaucgugagcaccauccagcggaaguacaagggcaucaagauccaggagggggucguggacuacggcgcccgcuucuacuucuacaccuccaagacgaccguggccagccugaucaacacccucaacgaccugaacgagacccuggucacgaugccccucggguacgugacccacggccugaaccuggaggaggcggcccgguacaugcgcucccucaaggugccggccaccgucagcguguccagccccgacgccgugaccgccuacaacggguaccugacguccagcuccaagacccccgaggagcacuucaucgagaccaucagccuggcgggcagcuacaaggacugguccuacagcggccaguccacccagcucgggaucgaguuccugaagcggggcgacaagagcgucuacuacacguccaaccccaccaccuuccaccuggacggggaggugaucaccuucgacaaccucaagacgcugcugagccuccgcgaggugcggaccaucaaggucuucaccaccguggacaacaucaaccugcacacgcagguggucgacauguccaugaccuacggccagcaguucggcccgaccuaccuggacggggccgacgugaccaagaucaagccccacaacagccacgagggcaagacguucuacgugcuccccaacgacgacacccugcgcgucgaggccuucgaguacuaccacaccaccgacccguccuuccuggggcgguacaugagcgcccucaaccacacgaagaaguggaaguacccccaggugaacggccugaccuccaucaagugggccgacaacaacugcuaccuggcgaccgcccuccugacccugcagcagaucgagcucaaguucaacccccccgcccugcaggacgccuacuaccgcgcgcgggccggggaggccgccaacuucugcgcccugauccucgcguacugcaacaagacggugggcgagcugggcgacguccgcgagaccaugagcuaccuguuccagcacgccaaccucgacuccugcaagcgggugcugaacgucgugugcaagaccugcgggcagcagcagaccacccugaagggcguggaggccgucauguacauggggacgcucagcuacgagcaguucaagaagggcgugcagaucccgugcaccugcgggaagcaggccaccaaguaccuggugcagcaggagucccccuucgucaugaugagcgccccccccgcgcaguacgagcugaagcacggcaccuucacgugcgccuccgaguacaccggcaacuaccagugcgggcacuacaagcacaucaccagcaaggagacccucuacugcaucgacggcgcccugcugacgaagagcuccgaguacaaggggccgaucaccgacguguucuacaaggagaacagcuacaccaccacgaucaagcccgugaccuacaagcucgacggcgucgugugcaccgagaucgaccccaagcuggacaacuacuacaagaaggacaacuccuacuucaccgagcagcccaucgaccuggugccgaaccagcccuaccccaacgccagcuucgacaacuucaaguucgucugcgacaacaucaaguucgccgacgaccucaaccagcugacgggguacaagaagcccgcgucccgcgagcugaaggugaccuucuucccggaccucaacggcgacguggucgccaucgacuacaagcacuacacccccagcuucaagaagggcgccaagcugcugcacaagcccaucguguggcacgugaacaacgccaccaacaaggcgacguacaagcccaacaccuggugcauccggugccucugguccaccaagccggucgagaccagcaacuccuucgacgugcugaagagcgaggacgcccaggggauggacaaccuggccugcgaggaccucaagcccguguccgaggaggucguggagaaccccacgauccagaaggacgugcuggagugcaacgucaagaccaccgagguggugggcgacaucauccugaagcccgccaacaacagccucaagaucaccgaggaggucgggcacacggaccugauggccgcguacguggacaacuccagccugaccaucaagaagccgaacgagcucucccgcgugcugggccugaagacccucgccacccacgggcuggccgccgucaacagcgugcccugggacacgaucgccaacuacgcgaagcccuuccugaacaagguggucuccaccaccaccaacaucgugacgcgcugccucaaccgggugugcaccaacuacaugccguacuucuucacccugcugcuccagcugugcaccuucacccgcagcacgaacucccggaucaaggccagcaugcccaccaccaucgccaagaacaccgucaagagcgugggcaaguucugccuggaggccuccuucaacuaccucaagagccccaacuucuccaagcugaucaacaucaucaucugguuccugcuccugagcgugugccugggcucccucaucuacagcacggccgcgcuggggguccugauguccaaccucggcaugcccagcuacugcaccggguaccgcgagggcuaccugaacuccaccaacgugaccaucgccacguacugcaccggcagcaucccgugcuccgugugccugagcgggcucgacucccuggacaccuaccccagccuggagaccauccagaucacgaucuccagcuucaagugggaccucaccgccuucggccuggucgccgagugguuccuggccuacauccucuucacccgguucuucuacgugcuggggcuggcggccaucaugcagcucuucuucuccuacuucgccgugcacuucaucagcaacuccuggcugauguggcugaucaucaaccugguccagauggcccccaucagcgcgauggugcgcauguacaucuucuucgccagcuucuacuacguguggaaguccuacguccacgugguggacggcugcaacagcuccaccugcaugaugugcuacaagcggaaccgcgccacgcgggucgagugcaccaccaucgugaacgggguccgccggagcuucuacguguacgccaacggcggcaagggguucugcaagcuccacaacuggaacugcgugaacugcgacaccuucugcgccggcuccacguucaucagcgacgaggucgcgcgcgaccugucccugcaguucaagcggcccaucaacccgaccgaccagagcuccuacaucguggacagcgugaccgucaagaacggguccauccaccucuacuucgacaaggccggccagaagaccuacgagcgccacagccugucccacuucgugaaccuggacaaccuccgggccaacaacacgaaggggagccugcccaucaacgugaucgucuucgacggcaaguccaagugcgaggagagcuccgccaagagcgccuccguguacuacagccagcugaugugccagcccauccuccugcuggaccaggcgcucgugagcgacgucggcgacuccgccgagguggccgugaagauguucgacgccuacgucaacaccuucagcuccaccuucaacgugcccauggagaagcugaagacccugguggccacggcggaggccgagcucgccaagaacgucagccuggacaacgugcuguccaccuucaucagcgccgcgcgccagggguucguggacuccgacgucgagaccaaggacgugguggagugccucaagcugagccaccaguccgacaucgaggucaccggcgacagcugcaacaacuacaugcugacguacaacaagguggagaacaugaccccgcgggaccucggggccugcaucgacugcuccgcccgccacaucaacgcccagguggccaagagccacaacaucgcgcugaucuggaacgucaaggacuucaugucccugagcgagcagcuccggaagcagauccgcuccgccgccaagaagaacaaccugcccuucaagcugaccugcgccaccacgcgccagguggugaacgucgugaccaccaagaucgcccucaagggcggguga

SEQ ID NO: 18183 - RNA, 5841 nt, Artificial Sequence
  SARS-CoV-2__MT482113.1__non-structural protein 3 (NSP3) CDS gc
auggcccccaccaaggugaccuucggcgacgacacggucaucgaggugcagggguacaagagcgugaacaucaccuucgagcuggacgagcgcaucgacaagguccucaacgagaagugcuccgccuacaccguggagcugggcaccgaggugaacgaguucgcgugcgucguggccgacgccgugaucaagacgcugcagccggucagcgagcuccugaccccccuggggaucgaccucgacgagugguccauggccaccuacuaccuguucgacgagagcggcgaguucaagcuggccucccacauguacugcagcuucuacccccccgacgaggacgaggaggagggggacugcgaggaggaggaguucgagccguccacccaguacgaguacggcacggaggacgacuaccagggcaagccccucgaguucggggcgaccagcgccgcccugcagcccgaggaggagcaggaggaggacuggcuggacgacgacucccagcagaccgugggccagcaggacgggagcgaggacaaccagaccacgaccauccagaccaucguggagguccagccccagcucgagauggagcugaccccgguggugcagacgaucgaggucaacuccuucagcggcuaccugaagcucaccgacaacguguacaucaagaacgccgacaucguggaggaggcgaagaaggucaagcccaccgugguggucaacgccgccaacguguaccugaagcacgggggcggcguggccggggcccugaacaaggcgaccaacaacgccaugcaggucgaguccgacgacuacaucgccacgaacggcccccucaagguggggggcagcugcguccuguccggccacaaccuggccaagcacugccuccacgugguggggcccaacgucaacaagggcgaggacauccagcugcugaagagcgccuacgagaacuucaaccagcacgaggugcuccuggcgccgcugcucuccgccgggaucuucggcgccgaccccauccacagccugcgggugugcgucgacaccgugcgcaccaacguguaccuggccgucuucgacaagaaccucuacgacaagcugguguccagcuuccuggagaugaagagcgagaagcagguggagcagaagaucgccgagauccccaaggaggaggucaagcccuucaucaccgaguccaagccgagcguggagcagcggaagcaggacgacaagaagaucaaggcgugcguggaggaggucacgaccacccucgaggagaccaaguuccugacggagaaccugcuccuguacaucgacaucaacgggaaccugcaccccgacuccgccacccucgugagcgacaucgacaucaccuuccugaagaaggacgcccccuacaucgugggcgacgucgugcaggagggcgugcugaccgccgucgugauccccacgaagaaggccgggggcaccaccgagaugcucgcgaaggcccugcgcaaggugccgaccgacaacuacaucacgaccuaccccgggcagggccugaacggguacaccgucgaggaggccaagaccgugcucaagaagugcaaguccgccuucuacauccugcccagcaucaucuccaacgagaagcaggagauccugggcaccgugagcuggaaccuccgggagaugcuggcgcacgccgaggagacgcgcaagcugaugcccgucugcguggagaccaaggccaucguguccaccauccagcggaaguacaagggcaucaagauccaggagggggucguggacuacggcgcccgcuucuacuucuacaccagcaagacgaccguggccucccugaucaacacccucaacgaccugaacgagacccuggucacgaugccgcucggguacgugacccacggccugaaccuggaggaggcggcccgguacaugcgcagccucaaggugcccgccaccgucuccgugagcucccccgacgccgugaccgccuacaacggguaccugacgagcuccagcaagacccccgaggagcacuucaucgagaccaucucccuggcgggcagcuacaaggacuggagcuacuccggccagagcacccagcucgggaucgaguuccugaagcggggcgacaaguccgucuacuacacgagcaacccgaccaccuuccaccuggacggggaggugaucaccuucgacaaccucaagacgcugcugucccuccgcgaggugcggaccaucaaggucuucaccaccguggacaacaucaaccugcacacgcagguggucgacaugagcaugaccuacggccagcaguucggccccaccuaccuggacggggccgacgugaccaagaucaagccccacaacucccacgagggcaagacguucuacgugcucccgaacgacgacacccugcgcgucgaggccuucgaguacuaccacaccaccgaccccagcuuccuggggcgguacauguccgcccucaaccacacgaagaaguggaaguacccccaggugaacggccugaccagcaucaagugggccgacaacaacugcuaccuggcgaccgcccuccugacccugcagcagaucgagcucaaguucucccccccggcccugcaggacgccuacuaccgcgcgcgggccggggaggccgccaacuucugcgcccugauccucgcguacugcaacaagacggugggcgagcugggcgacguccgcgagaccaugagcuaccuguuccagcacgccaaccucgacuccugcaagcgggugcugaacgucgugugcaagaccugcgggcagcagcagaccacccugaagggcguggaggccgucauguacauggggacgcucagcuacgagcaguucaagaagggcgugcagauccccugcaccugcgggaagcaggccaccaaguaccuggugcagcaggagucccccuucgucaugaugagcgcccccccggcgcaguacgagcugaagcacggcaccuucacgugcgccuccgaguacaccggcaacuaccagugcgggcacuacaagcacaucaccagcaaggagacccucuacugcaucgacggcgcccugcugacgaagagcuccgaguacaaggggcccaucaccgacguguucuacaaggagaacagcuacaccaccacgaucaagcccgugaccuacaagcucgacggcgucgugugcaccgagaucgaccccaagcuggacaacuacuacaagaaggacaacuccuacuucaccgagcagccgaucgaccuggugcccaaccagcccuaccccaacgccagcuucgacaacuucaaguucgucugcgacaacaucaaguucgccgacgaccucaaccagcugacgggguacaagaagccggcgucccgcgagcugaaggugaccuucuuccccgaccucaacggcgacguggucgccaucgacuacaagcacuacacccccagcuucaagaagggcgccaagcugcugcacaagcccaucguguggcacgugaacaacgccaccaacaaggcgacguacaagccgaacaccuggugcauccggugccucugguccaccaagcccgucgagaccagcaacuccuucgacgugcugaagagcgaggacgcccaggggauggacaaccuggccugcgaggaccucaagcccguguccgaggaggucguggagaaccccacgauccagaaggacgugcuggagugcaacgucaagaccaccgagguggugggcgacaucauccugaagccggccaacaacagccucaagaucaccgaggaggucgggcacacggaccugauggccgcguacguggacaacuccagccugaccaucaagaagcccaacgagcucucccgcgugcugggccugaagacccucgccacccacgggcuggccgccgucaacagcgugcccugggacacgaucgccaacuacgcgaagccguuccugaacaagguggucuccaccaccaccaacaucgugacgcgcugccucaaccgggugugcaccaacuacaugcccuacuucuucacccugcugcuccagcugugcaccuucacccgcagcacgaacucccggaucaaggccagcaugcccaccaccaucgccaagaacaccgucaagagcgugggcaaguucugccuggaggccuccuucaacuaccucaagagccccaacuucuccaagcugaucaacaucaucaucugguuccugcuccugagcgugugccugggcucccucaucuacagcacggccgcgcuggggguccugauguccaaccucggcaugccgagcuacugcaccggguaccgcgagggcuaccugaacuccaccaacgugaccaucgccacguacugcaccggcagcauccccugcuccgugugccugagcgggcucgacucccuggacaccuaccccagccuggagaccauccagaucacgaucuccagcuucaagugggaccucaccgccuucggccuggucgccgagugguuccuggccuacauccucuucacccgguucuucuacgugcuggggcuggcggccaucaugcagcucuucuucuccuacuucgccgugcacuucaucagcaacuccuggcugauguggcugaucaucaaccugguccagauggcccccaucagcgcgauggugcgcauguacaucuucuucgccagcuucuacuacguguggaaguccuacguccacgugguggacggcugcaacagcuccaccugcaugaugugcuacaagcggaaccgcgccacgcgggucgagugcaccaccaucgugaacgggguccgccggagcuucuacguguacgccaacggcggcaagggguucugcaagcuccacaacuggaacugcgugaacugcgacaccuucugcgccggcuccacguucaucagcgacgaggucgcgcgcgaccugucccugcaguucaagcggccgaucaaccccaccgaccagagcuccuacaucguggacagcgugaccgucaagaacggguccauccaccucuacuucgacaaggccggccagaagaccuacgagcgccacagccugucccacuucgugaaccuggacaaccuccgggccaacaacacgaaggggagccugcccaucaacgugaucgucuucgacggcaaguccaagugcgaggagagcuccgccaagagcgccuccguguacuacagccagcugaugugccagcccauccuccugcuggaccaggcgcucgugagcgacgucggcgacuccgccgagguggccgugaagauguucgacgccuacgucaacaccuucagcuccaccuucaacgugccgauggagaagcugaagacccugguggccacggcggaggccgagcucgccaagaacgucagccuggacaacgugcuguccaccuucaucagcgccgcgcgccagggguucguggacuccgacgucgagaccaaggacgugguggagugccucaagcugagccaccaguccgacaucgaggucaccggcgacagcugcaacaacuacaugcugacguacaacaagguggagaacaugaccccccgggaccucggggccugcaucgacugcuccgcccgccacaucaacgcccagguggccaagagccacaacaucgcgcugaucuggaacgucaaggacuucaugucccugagcgagcagcuccggaagcagauccgcuccgccgccaagaagaacaaccugcccuucaagcugaccugcgccaccacgcgccagguggugaacgucgugaccaccaagaucgcccucaagggcggguga

SEQ ID NO: 18184 - RNA, 5841 nt, Artificial Sequence
  SARS-CoV-2__MT482134.1__non-structural protein 3 (NSP3) CDS gc
auggcccccaccaaggugaccuucggcgacgacacggucaucgaggugcagggguacaagagcgugaacaucaccuucgagcuggacgagcgcaucgacaagguccucaacgagaagugcuccgccuacaccguggagcugggcaccgaggugaacgaguucgcgugcgucguggccgacgccgugaucaagacgcugcagccggucagcgagcuccugaccccccuggggaucgaccucgacgagugguccauggccaccuacuaccuguucgacgagagcggcgaguucaagcuggccucccacauguacugcagcuucuacccccccgacgaggacgaggaggagggggacugcgaggaggaggaguucgagccguccacccaguacgaguacggcacggaggacgacuaccagggcaagccccucgaguucggggcgaccagcgccgcccugcagcccgaggaggagcaggaggaggacuggcuggacgacgacucccagcagaccgugggccagcaggacgggagcgaggacaaccagaccacgaccauccagaccaucguggagguccagccccagcucgagauggagcugaccccgguggugcagacguccuucagcggcuaccugaagcucaccgacaacgucuacaucaagaacgccgacaucguggaggaggcgaagaaggugaagcccaccgucguggugaacgccgccaacgucuaccugaagcacgggggcggcguggccggggcccugaacaaggcgaccaacaacgccaugcagguggaguccgacgacuacaucgccacgaacggcccccucaaggucgggggcagcugcgugcuguccggccacaaccuggccaagcacugccuccacgucguggggcccaacgugaacaagggcgaggacauccagcugcugaagagcgccuacgagaacuucaaccagcacgagguccuccuggcgccgcugcucuccgccgggaucuucggcgccgaccccauccacagccugcgggugugcguggacaccguccgcaccaacguguaccuggccguguucgacaagaaccucuacgacaagcuggucuccagcuuccuggagaugaagagcgagaagcagguggagcagaagaucgccgagauccccaaggaggaggugaagcccuucaucaccgaguccaagccgagcgucgagcagcggaagcaggacgacaagaagaucaaggcgugcguggaggaggugacgaccacccucgaggagaccaaguuccugacggagaaccugcuccuguacaucgacaucaacgggaaccugcaccccgacuccgccacccucgucagcgacaucgacaucaccuuccugaagaaggacgcccccuacaucgugggcgacgugguccaggagggcgugcugaccgccguggucauccccacgaagaaggccgggggcaccaccgagaugcucgcgaaggcccugcgcaaggugccgaccgacaacuacaucacgaccuaccccgggcagggccugaacggguacaccguggaggaggccaagaccguccucaagaagugcaaguccgccuucuacauccugcccagcaucaucuccaacgagaagcaggagauccugggcaccgugagcuggaaccuccgggagaugcuggcgcacgccgaggagacgcgcaagcugaugcccgugugcgucgagaccaaggccaucguguccaccauccagcggaaguacaagggcaucaagauccaggaggggguggucgacuacggcgcccgcuucuacuucuacaccagcaagacgaccguggccucccugaucaacacccucaacgaccugaacgagacccuggugacgaugccgcucggguacgucacccacggccugaaccuggaggaggcggcccgguacaugcgcagccucaaggugcccgccaccguguccgucagcucccccgacgccgugaccgccuacaacggguaccugacgagcuccagcaagacccccgaggagcacuucaucgagaccaucucccuggcgggcagcuacaaggacuggagcuacuccggccagagcacccagcucgggaucgaguuccugaagcggggcgacaaguccguguacuacacgagcaacccgaccaccuuccaccuggacggggaggucaucaccuucgacaaccucaagacgcugcugucccuccgcgaggugcggaccaucaagguguucaccaccgucgacaacaucaaccugcacacgcaggugguggacaugagcaugaccuacggccagcaguucggccccaccuaccuggacggggccgacgucaccaagaucaagccccacaacucccacgagggcaagacguucuacgugcucccgaacgacgacacccugcgcguggaggccuucgaguacuaccacaccaccgaccccagcuuccuggggcgguacauguccgcccucaaccacacgaagaaguggaaguacccccaggucaacggccugaccagcaucaagugggccgacaacaacugcuaccuggcgaccgcccuccugacccugcagcagaucgagcucaaguucaaccccccggcccugcaggacgccuacuaccgcgcgcgggccggggaggccgccaacuucugcgcccugauccucgcguacugcaacaagacggugggcgagcugggcgacgugcgcgagaccauguccuaccuguuccagcacgccaaccucgacagcugcaagcggguccugaacguggucugcaagaccugcgggcagcagcagaccacccugaagggcguggaggccgugauguacauggggacgcucuccuacgagcaguucaagaagggcguccagauccccugcaccugcgggaagcaggccaccaaguaccuggugcagcaggagagccccuucgugaugauguccgcccccccggcgcaguacgagcugaagcacggcaccuucacgugcgccagcgaguacaccggcaacuaccagugcgggcacuacaagcacaucaccuccaaggagacccucuacugcaucgacggcgcccugcugacgaagagcagcgaguacaaggggcccaucaccgacgucuucuacaaggagaacuccuacaccaccacgaucaagcccgugaccuacaagcucgacggcguggucugcaccgagaucgaccccaagcuggacaacuacuacaagaaggacaacagcuacuucaccgagcagccgaucgaccuggugcccaaccagcccuaccccaacgccuccuucgacaacuucaaguucgugugcgacaacaucaaguucgccgacgaccucaaccagcugacgggguacaagaagccggcgagccgcgagcugaaggucaccuucuuccccgaccucaacggcgacgugguggccaucgacuacaagcacuacacccccuccuucaagaagggcgccaagcugcugcacaagcccaucgucuggcacgugaacaacgccaccaacaaggcgacguacaagccgaacaccuggugcauccggugccucuggagcaccaagcccguggagaccuccaacagcuucgacguccugaaguccgaggacgcccaggggauggacaaccuggccugcgaggaccucaagcccgugagcgaggagguggucgagaaccccacgauccagaaggacgugcuggagugcaacgugaagaccaccgaggucgugggcgacaucauccugaagccggccaacaacucccucaagaucaccgaggagguggggcacacggaccugauggccgcguacgucgacaacagcucccugaccaucaagaagcccaacgagcucagccgcgugcugggccugaagacccucgccacccacgggcuggccgccgugaacuccguccccugggacacgaucgccaacuacgcgaagccguuccugaacaagguggugagcaccaccaccaacaucgucacgcgcugccucaaccgggugugcaccaacuacaugcccuacuucuucacccugcugcuccagcugugcaccuucacccgcuccacgaacagccggaucaaggccuccaugcccaccaccaucgccaagaacaccgugaagagcgucggcaaguucugccuggaggccagcuucaacuaccucaagucccccaacuucagcaagcugaucaacaucaucaucugguuccugcuccuguccgugugccugggcagccucaucuacuccacggccgcgcugggggugcugaugagcaaccucggcaugccguccuacugcaccggguaccgcgagggcuaccugaacagcaccaacgucaccaucgccacguacugcaccggcuccauccccugcagcgugugccuguccgggcucgacagccuggacaccuaccccucccuggagaccauccagaucacgaucagcuccuucaagugggaccucaccgccuucggccugguggccgagugguuccuggccuacauccucuucacccgguucuucuacguccuggggcuggcggccaucaugcagcucuucuucagcuacuucgccgugcacuucaucuccaacagcuggcugauguggcugaucaucaaccuggugcagauggcccccaucuccgcgaugguccgcauguacaucuucuucgccagcuucuacuacguguggaagagcuacgugcacgucguggacggcugcaacuccagcaccugcaugaugugcuacaagcggaaccgcgccacgcggguggagugcaccaccaucgucaacggggugcgccgguccuucuacgucuacgccaacggcggcaagggguucugcaagcuccacaacuggaacugcgugaacugcgacaccuucugcgccggcagcacguucaucuccgacgagguggcgcgcgaccugagccugcaguucaagcggccgaucaaccccaccgaccaguccagcuacaucgucgacuccgugaccgugaagaacgggagcauccaccucuacuucgacaaggccggccagaagaccuacgagcgccacucccugagccacuucgucaaccuggacaaccuccgggccaacaacacgaaggggucccugcccaucaacgugaucguguucgacggcaagagcaagugcgaggaguccagcgccaaguccgccagcgucuacuacucccagcugaugugccagcccauccuccugcuggaccaggcgcucgugagcgacgugggcgacagcgccgaggucgccgugaagauguucgacgccuacgugaacaccuucuccagcaccuucaacgucccgauggagaagcugaagacccugguggccacggcggaggccgagcucgccaagaacgugucccuggacaacguccugagcaccuucaucuccgccgcgcgccagggguucguggacagcgacguggagaccaaggacgucguggagugccucaagcugucccaccagagcgacaucgaggugaccggcgacuccugcaacaacuacaugcugacguacaacaaggucgagaacaugaccccccgggaccucggggccugcaucgacugcagcgcccgccacaucaacgcccagguggccaagucccacaacaucgcgcugaucuggaacgugaaggacuucaugagccuguccgagcagcuccggaagcagauccgcagcgccgccaagaagaacaaccugcccuucaagcugaccugcgccaccacgcgccaggucgugaacguggucaccaccaagaucgcccucaagggcgggaagaucgugaacuga

SEQ ID NO: 18185 - RNA, 5841 nt, Artificial Sequence
  SARS-CoV-2__MT482141.1__non-structural protein 3 (NSP3) CDS gc
auggcccccaccaaggugaccuucggcgacgacacggucaucgaggugcagggguacaagagcgugaacaucaccuucgagcuggacgagcgcaucgacaagguccucaacgagaagugcuccgccuacaccguggagcugggcaccgaggugaacgaguucgcgugcgucguggccgacgccgugaucaagacgcugcagccggucagcgagcuccugaccccccuggggaucgaccucgacgagugguccauggccaccuacuaccuguucgacgagagcggcgaguucaagcuggccucccacauguacugcagcuucuacccccccgacgaggacgaggaggagggggacugcgaggaggaggaguucgagccguccacccaguacgaguacggcacggaggacgacuaccagggcaagccccucgaguucggggcgaccagcgccgcccugcagcccgaggaggagcaggaggaggacuggcuggacgacgacucccagcagaccgugggccagcaggacgggagcgaggacaaccagaccacgaccauccagaccaucguggagguccagccccagcucgagauggagcugaccccgguggugcagacgaucgaggucaacuccuucagcggcuaccugaagcucaccgacaacguguacaucaagaacgccgacaucguggaggaggcgaagaaggucaagcccaccgugguggucaacgccgccaacguguaccugaagcacgggggcggcguggccggggcccugaacaaggcgaccaacaacgccaugcaggucgaguccgacgacuacaucgccacgaacggcccccucaagguggggggcagcugcguccuguccggccacaaccuggccaagcacugccuccacgugguggggcccaacgucaacaagggcgaggacauccagcugcugaagagcgccuacgagaacuucaaccagcacgaggugcuccuggcgccgcugcucuccgccgggaucuucggcgccgaccccauccacagccugcgggugugcgucgacaccgugcgcaccaacguguaccuggccgucuucgacaagaaccucuacgacaagcugguguccagcuuccuggagaugaagagcgagaagcagguggagcagaagaucgccgagauccccaaggaggaggucaagcccuucaucaccgaguccaagccgagcguggagcagcggaagcaggacgacaagaagaucaaggcgugcguggaggaggucacgaccacccucgaggagaccaaguuccugacggagaaccugcuccuguacaucgacaucaacgggaaccugcaccccgacuccgccacccucgugagcgacaucgacaucaccuuccugaagaaggacgcccccuacaucgugggcgacgucgugcaggagggcgugcugaccgccgucgugauccccacgaagaaggccgggggcaccaccgagaugcucgcgaaggcccugcgcaaggugccgaccgacaacuacaucacgaccuaccccgggcagggccugaacggguacaccgucgaggaggccaagaccgugcucaagaagugcaaguccgccuucuacauccugcccagcaucaucuccaacgagaagcaggagauccugggcaccgugagcuggaaccuccgggagaugcuggcgcacgccgaggagacgcgcaagcugaugcccgucugcguggagaccaaggccaucguguccaccauccagcggaaguacaagggcaucaagauccaggagggggucguggacuacggcgcccgcuucuacuucuacaccagcaagacgaccguggccucccugaucaacaccuucaacgaccucaacgagacccuggucacgaugccgcugggguacgugacccacggccucaaccuggaggaggcggcccgguacaugcgcagccugaaggugcccgccaccgucuccgugagcucccccgacgccgugaccgccuacaacggguaccucacgagcuccagcaagacccccgaggagcacuucaucgagaccaucucccuggcgggcagcuacaaggacuggagcuacuccggccagagcacccagcuggggaucgaguuccucaagcggggcgacaaguccgucuacuacacgagcaacccgaccaccuuccaccuggacggggaggugaucaccuucgacaaccugaagacgcuccugucccugcgcgaggugcggaccaucaaggucuucaccaccguggacaacaucaaccuccacacgcagguggucgacaugagcaugaccuacggccagcaguucggccccaccuaccuggacggggccgacgugaccaagaucaagccccacaacucccacgagggcaagacguucuacgugcugccgaacgacgacacccuccgcgucgaggccuucgaguacuaccacaccaccgaccccagcuuccuggggcgguacauguccgcccugaaccacacgaagaaguggaaguacccccaggugaacggccucaccagcaucaagugggccgacaacaacugcuaccuggcgaccgcccugcucacccugcagcagaucgagcugaaguucaaccccccggcccuccaggacgccuacuaccgcgcgcgggccggggaggccgccaacuucugcgcccugauccuggcguacugcaacaagacggugggcgagcucggcgacguccgcgagaccauguccuaccuguuccagcacgccaaccuggacagcugcaagcgggugcucaacgucgugugcaagaccugcgggcagcagcagaccacccugaagggcguggaggccgucauguacauggggacgcuguccuacgagcaguucaagaagggcgugcagauccccugcaccugcgggaagcaggccaccaaguaccucgugcagcaggagagccccuucgucaugauguccgcccccccggcgcaguacgagcugaagcacggcaccuucacgugcgccagcgaguacaccggcaacuaccagugcgggcacuacaagcacaucaccuccaaggagacccuguacugcaucgacggcgcccuccugacgaagagcagcgaguacaaggggcccaucaccgacguguucuacaaggagaacuccuacaccaccacgaucaagcccgugaccuacaagcuggacggcgucgugugcaccgagaucgaccccaagcucgacaacuacuacaagaaggacaacagcuacuucaccgagcagccgaucgaccuggugcccaaccagcccuaccccaacgccuccuucgacaacuucaaguucgucugcgacaacaucaaguucgccgacgaccugaaccagcucacgggguacaagaagccggcgagccgcgagcugaaggugaccuucuuccccgaccugaacggcgacguggucgccaucgacuacaagcacuacacccccuccuucaagaagggcgccaagcuccugcacaagcccaucguguggcacgugaacaacgccaccaacaaggcgacguacaagccgaacaccuggugcauccggugccuguggagcaccaagcccgucgagaccuccaacagcuucgacgugcucaaguccgaggacgcccaggggauggacaaccuggccugcgaggaccugaagcccgugagcgaggaggucguggagaaccccacgauccagaaggacgugcucgagugcaacgucaagaccaccgagguggugggcgacaucauccugaagccggccaacaacucccugaagaucaccgaggaggucgggcacacggaccucauggccgcguacguggacaacagcucccugaccaucaagaagcccaacgagcugagccgcgugcucggccugaagacccuggccacccacgggcucgccgccgucaacuccgugcccugggacacgaucgccaacuacgcgaagccguuccugaacaagguggucagcaccaccaccaacaucgugacgcgcugccugaaccgggugugcaccaacuacaugcccuacuucuucacccuccugcugcagcucugcaccuucacccgcuccacgaacagccggaucaaggccuccaugcccaccaccaucgccaagaacaccgucaagagcgugggcaaguucugccuggaggccagcuucaacuaccugaagucccccaacuucagcaagcucaucaacaucaucaucugguuccugcugcucuccgugugccugggcagccugaucuacuccacggccgcgcucgggguccugaugagcaaccugggcaugccguccuacugcaccggguaccgcgagggcuaccucaacagcaccaacgugaccaucgccacguacugcaccggcuccauccccugcagcgugugccuguccgggcuggacagccucgacaccuaccccucccuggagaccauccagaucacgaucagcuccuucaagugggaccugaccgccuucggccucgucgccgagugguuccuggccuacauccuguucacccgguucuucuacgugcucgggcuggcggccaucaugcagcuguucuucagcuacuucgccgugcacuucaucuccaacagcuggcucauguggcugaucaucaaccugguccagauggcccccaucuccgcgauggugcgcauguacaucuucuucgccagcuucuacuacguguggaagagcuacguccacgugguggacggcugcaacuccagcaccugcaugaugugcuacaagcggaaccgcgccacgcgggucgagugcaccaccaucgugaacgggguccgccgguccuucuacguguacgccaacggcggcaagggguucugcaagcugcacaacuggaacugcgugaacugcgacaccuucugcgccggcagcacguucaucuccgacgaggucgcgcgcgaccucagccugcaguucaagcggccgaucaaccccaccgaccaguccagcuacaucguggacuccgugaccgucaagaacgggagcauccaccuguacuucgacaaggccggccagaagaccuacgagcgccacucccucagccacuucgugaaccuggacaaccugcgggccaacaacacgaaggggucccuccccaucaacgugaucgucuucgacggcaagagcaagugcgaggaguccagcgccaaguccgccagcguguacuacucccagcugaugugccagcccauccugcuccuggaccaggcgcuggugagcgacgucggcgacagcgccgagguggccgugaagauguucgacgccuacgucaacaccuucuccagcaccuucaacgugccgauggagaagcucaagacccugguggccacggcggaggccgagcuggccaagaacgucucccucgacaacgugcugagcaccuucaucuccgccgcgcgccagggguucguggacagcgacgucgagaccaaggacgugguggagugccugaagcucucccaccagagcgacaucgaggucaccggcgacuccugcaacaacuacaugcugacguacaacaagguggagaacaugaccccccgggaccugggggccugcaucgacugcagcgcccgccacaucaacgcccagguggccaagucccacaacaucgcgcucaucuggaacgucaaggacuucaugagccuguccgagcagcugcggaagcagauccgcagcgccgccaagaagaacaaccuccccuucaagcugaccugcgccaccacgcgccagguggugaacgucgugaccaccaagaucgcccugaagggcggguga

SEQ ID NO: 18186 - RNA, 5841 nt, Artificial Sequence
  SARS-CoV-2__MT482144.1__non-structural protein 3 (NSP3) CDS gc
auggcccccaccaaggugaccuucggcgacgacacggucaucgaggugcagggguacaagagcgugaacaucaccuucgagcuggacgagcgcaucgacaagguccucaacgagaagugcuccgccuacaccguggagcugggcaccgaggugaacgaguucgcgugcgucguggccgacgccgugaucaagacgcugcagccggucagcgagcuccugaccccccuggggaucgaccucgacgagugguccauggccaccuacuaccuguucgacgagagcggcgaguucaagcuggccucccacauguacugcagcuucuacccccccgacgaggacgaggaggagggggacugcgaggaggaggaguucgagccguccacccaguacgaguacggcacggaggacgacuaccagggcaagccccucgaguucggggcgaccagcgccgcccugcagcccgaggaggagcaggaggaggacuggcuggacgacgacucccagcagaccgugggccagcaggacgggagcgaggacaaccagaccacgaccauccagaccaucguggagguccagccccagcucgagauggagcugaccccgguggugcagacgaucgaggucaacuccuucagcggcuaccugaagcucaccgacaacguguacaucaagaacgccgacaucguggaggaggcgaagaaggucaagcccaccgugguggucaacgccgccaacguguaccugaagcacgggggcggcguggccggggcccugaacaaggcgaccaacaacgccaugcaggucgaguccgacgacuacaucgccacgaacggcccccucaagguggggggcagcugcguccuguccggccacaaccuggccaagcacugccuccacgugguggggcccaacgucaacaagggcgaggacauccagcugcugaagagcgccuacgagaacuucaaccagcacgaggugcuccuggcgccgcugcucuccgccgggaucuucggcgccgaccccauccacagccugcgggugugcgucgacaccgugcgcaccaacguguaccuggccgucuucgacaagaaccucuacgacaagcugguguccagcuuccuggagaugaagagcgagaagcagguggagcagaagaucgccgagauccccaaggaggaggucaagcccuucaucaccgaguccaagccgagcguggagcagcggaagcaggacgacaagaagaucaaggcgugcguggaggaggucacgaccacccucgaggagaccaaguuccugacggagaaccugcuccuguacaucgacaucaacgggaaccugcaccccgacuccgccacccucgugagcgacaucgacaucaccuuccugaagaaggacgcccccuacaucgugggcgacgucgugcaggagggcgugcugaccgccgucgugauccccacgaagaaggccgggggcaccaccgagaugcucgcgaaggcccugcgcaaggugccgaccgacaacuacaucacgaccuaccccgggcagggccugaacggguacaccgucgaggaggccaagaccgugcucaagaagugcaaguccgccuucuacauccugcccagcaucaucuccaacgagaagcaggagauccugggcaccgugagcuggaaccuccgggagaugcuggcgcacgccgaggagacgcgcaagcugaugcccgucugcguggagaccaaggccaucguguccaccauccagcggaaguacaagggcaucaagauccaggagggggucguggacuacggcgcccgcuucuacuucuacaccagcaagacgaccguggccucccugaucaacacccucaacgaccugaacgagacccuggucacgaugccgcucggguacgugacccacggccugaaccuggaggaggcggcccgguacaugcgcagccucaaggugcccgccaccgucuccgugagcucccccgacgccgugaccgccuacaacggguaccugacgagcuccagcaagacccccgaggagcacuucaucgagaccaucucccuggcgggcagcuacaaggacuggagcuacuccggccagagcacccagcucgggaucgaguuccugaagcggggcgacaaguccgucuacuacacgagcaacccgaccaccuuccaccuggacggggaggugaucaccuucgacaaccucaagacgcugcugucccuccgcgaggugcggaccaucaaggucuucaccaccguggacaacaucaaccugcacacgcagguggucgacaugagcaugaccuacggccagcaguucggccccaccuaccuggacggggccgacgugaccaagaucaagccccacaacucccacgagggcaagacguucuacgugcucccgaacgacgacacccugcgcgucgaggccuucgaguacuaccacaccaccgaccccagcuuccuggggcgguacauguccgcccucaaccacacgaagaaguggaaguacccccaggugaacggccugaccagcaucaagugggccgacaacaacugcuaccuggcgaccgcccuccugacccugcagcagaucgagcucaaguucaaccccccggcccugcaggacgccuacuaccgcgcgcgggccggggaggccgccaacuucugcgcccugauccucgcguacugcaacaagacggugggcgagcugggcgacguccgcgagaccauguccuaccuguuccagcacgccaaccucgacagcugcaagcgggugcugaacgucgugugcaagaccugcgggcagcagcagaccacccugaagggcguggaggccgucauguacauggggacgcucuccuacgagcaguucaagaagggcgugcagauccccugcaccugcgggaagcaggccaccaaguaccuggugcagcaggagagccccuucgucaugauguccgcccccccggcgcaguacgagcugaagcacggcaccuucacgugcgccagcgaguacaccggcaacuaccagugcgggcacuacaagcacaucaccuccaaggagacccucuacugcaucgacggcgcccugcugacgaagagcagcgaguacaaggggcccaucaccgacguguucuacaaggagaacuccuacaccaccacgaucaagcccgugaccuacaagcucgacggcgucgugugcaccgagaucgaccccaagcuggacaacuacuacaagaaggacaacagcuacuucaccgagcagccgaucgaccuggugcccaaccagcccuaccucaacgccuccuucgacaacuucaaguucgucugcgacaacaucaaguucgccgacgaccugaaccagcugacgggguacaagaagcccgcgagccgcgagcucaaggugaccuucuucccggaccugaacggcgacguggucgccaucgacuacaagcacuacacccccuccuucaagaagggcgccaagcugcuccacaagcccaucguguggcacgugaacaacgccaccaacaaggcgacguacaagcccaacaccuggugcauccggugccuguggagcaccaagccggucgagaccuccaacagcuucgacgugcugaaguccgaggacgcccaggggauggacaaccucgccugcgaggaccugaagcccgugagcgaggaggucguggagaaccccacgauccagaaggacgugcuggagugcaacgucaagaccaccgagguggugggcgacaucauccucaagcccgccaacaacucccugaagaucaccgaggaggucgggcacacggaccugauggccgcguacguggacaacagcucccucaccaucaagaagccgaacgagcugagccgcgugcugggccucaagacccuggccacccacgggcuggccgccgucaacuccgugcccugggacacgaucgccaacuacgcgaagcccuuccucaacaagguggucagcaccaccaccaacaucgugacgcgcugccugaaccgggugugcaccaacuacaugccguacuucuucacccugcuccugcagcugugcaccuucacccgcuccacgaacagccggaucaaggccuccaugcccaccaccaucgccaagaacaccgucaagagcgugggcaaguucugccucgaggccagcuucaacuaccugaagucccccaacuucagcaagcugaucaacaucaucaucugguuccuccugcuguccgugugccucggcagccugaucuacuccacggccgcgcuggggguccucaugagcaaccugggcaugcccuccuacugcaccggguaccgcgagggcuaccugaacagcaccaacgugaccaucgccacguacugcaccggcuccaucccgugcagcgugugccucuccgggcuggacagccuggacaccuaccccucccucgagaccauccagaucacgaucagcuccuucaagugggaccugaccgccuucggccuggucgccgagugguuccucgccuacauccuguucacccgguucuucuacgugcuggggcucgcggccaucaugcagcuguucuucagcuacuucgccgugcacuucaucuccaacagcuggcugauguggcugaucaucaaccucguccagauggcccccaucuccgcgauggugcgcauguacaucuucuucgccagcuucuacuacguguggaagagcuacguccacgugguggacggcugcaacuccagcaccugcaugaugugcuacaagcggaaccgcgccacgcgggucgagugcaccaccaucgugaacgggguccgccgguccuucuacguguacgccaacggcggcaagggguucugcaagcugcacaacuggaacugcgugaacugcgacaccuucugcgccggcagcacguucaucuccgacgaggucgcgcgcgaccugagccuccaguucaagcggcccaucaacccgaccgaccaguccagcuacaucguggacuccgugaucgucaagaacgggagcauccaccuguacuucgacaaggccggccagaagaccuacgagcgccacucccugagccacuucgugaaccucgacaaccugcgggccaacaacaccaaggggucccugcccaucaacgugaucgucuucgacggcaagagcaagugcgaggaguccagcgccaaguccgccagcguguacuacucccagcucaugugccagcccauccugcugcucgaccaggcgcuggugagcgacgucggcgacagcgccgagguggccgugaagauguucgacgccuacgucaacacguucuccagcaccuucaacgugcccauggagaagcugaagacccucguggccaccgcggaggccgagcuggccaagaacgucucccuggacaacgugcucagcacguucaucuccgccgcgcgccagggguucguggacagcgacgucgagaccaaggacgugguggagugccugaagcugucccaccagagcgacaucgaggucaccggcgacuccugcaacaacuacaugcucaccuacaacaagguggagaacaugacgccgcgggaccugggggccugcaucgacugcagcgcccgccacaucaacgcccagguggccaagucccacaacaucgcgcugaucuggaacgucaaggacuucaugagccucuccgagcagcugcggaagcagauccgcagcgccgccaagaagaacaaccugcccuucaagcucaccugcgccaccacccgccagguggugaacgucgugacgaccaagaucgcccugaagggcggguga

SEQ ID NO: 18187 - RNA, 5841 nt, Artificial Sequence
  SARS-CoV-2__MT358638.1__non-structural protein 3 (NSP3) CDS gc
auggcccccaccaaggugaccuucggcgacgacacggucaucgaggugcagggguacaagagcgugaacaucaccuucgagcuggacgagcgcaucgacaagguccucaacgagaagugcuccgccuacaccguggagcugggcaccgaggugaacgaguucgcgugcgucguggccgacgccgugaucaagacgcugcagccggucagcgagcuccugaccccccuggggaucgaccucgacgagugguccauggccaccuacuaccuguucgacgagagcggcgaguucaagcuggccucccacauguacugcagcuucuacccccccgacgaggacgaggaggagggggacugcgaggaggaggaguucgagccguccacccaguacgaguacggcacggaggacgacuaccagggcaagccccucgaguucggggcgaccagcgccgcccugcagcccgaggaggagcaggaggaggacuggcuggacgacgacucccagcagaccgugggccagcaggacgggagcgaggacaaccagaccacgaccauccagaccaucguggagguccagccccagcucgagauggagcugaccccgguggugcagacgaucgaggucaacuccuucagcggcuaccugaagcucaccgacaacguguacaucaagaacgccgacaucguggaggaggcgaagaaggucaagcccaccgugguggucaacgccgccaacguguaccugaagcacgggggcggcguggccggggcccugaacaaggcgaccaacaacgccaugcaguucgaguccgacgacuacaucgccacgaacggcccccucaaggucgggggcagcugcgugcuguccggccacaaccuggccaagcacugccuccacgucguggggcccaacgugaacaagggcgaggacauccagcugcugaagagcgccuacgagaacuucaaccagcacgagguccuccuggcgccgcugcucuccgccgggaucuucggcgccgaccccauccacagccugcgggugugcguggacaccguccgcaccaacguguaccuggccguguucgacaagaaccucuacgacaagcuggucuccagcuuccuggagaugaagagcgagaagcagguggagcagaagaucgccgagauccccaaggaggaggugaagcccuucaucaccgaguccaagccgagcgucgagcagcggaagcaggacgacaagaagaucaaggcgugcguggaggaggugacgaccacccucgaggagaccaaguuccugacggagaaccugcuccuguacaucgacaucaacgggaaccugcaccccgacuccgccacccucgucagcgacaucgacaucaccuuccugaagaaggacgcccccuacaucgugggcgacgugguccaggagggcgugcugaccgccguggucauccccacgaagaaggccgggggcaccaccgagaugcucgcgaaggcccugcgcaaggugccgaccgacaacuacaucacgaccuaccccgggcagggccugaacggguacaccguggaggaggccaagaccguccucaagaagugcaaguccgccuucuacauccugcccagcaucaucuccaacgagaagcaggagauccugggcaccgugagcuggaaccuccgggagaugcuggcgcacgccgaggagacgcgcaagcugaugcccgugugcgucgagaccaaggccaucguguccaccauccagcggaaguacaagggcaucaagauccaggaggggguggucgacuacggcgcccgcuucuacuucuacaccagcaagacgaccguggccucccugaucaacacccucaacgaccugaacgagacccuggugacgaugccgcucggguacgucacccacggccugaaccuggaggaggcggcccgguacaugcgcagccucaaggugcccgccaccguguccgucagcucccccgacgccgugaccgccuacaacggguaccugacgagcuccagcaagacccccgaggagcacuucaucgagaccaucucccuggcgggcagcuacaaggacuggagcuacuccggccagagcacccagcucgggaucgaguuccugaagcggggcgacaaguccguguacuacacgagcaacccgaccaccuuccaccuggacggggaggucaucaccuucgacaaccucaagacgcugcugucccuccgcgaggugcggaccaucaagguguucaccaccgucgacaacaucaaccugcacacgcaggugguggacaugagcaugaccuacggccagcaguucggccccaccuaccuggacggggccgacgucaccaagaucaagccccacaacucccacgagggcaagacguucuacgugcucccgaacgacgacacccugcgcguggaggccuucgaguacuaccacaccaccgaccccagcuuccuggggcgguacauguccgcccucaaccacacgaagaaguggaaguacccccaggucaacggccugaccagcaucaagugggccgacaacaacugcuaccuggcgaccgcccuccugacccugcagcagaucgagcucaaguucaaccccccggcccugcaggacgccuacuaccgcgcgcgggccggggaggccgccaacuucugcgcccugauccucgcguacugcaacaagacggugggcgagcugggcgacgugcgcgagaccauguccuaccuguuccagcacgccaaccucgacagcugcaagcggguccugaacguggucugcaagaccugcgggcagcagcagaccacccugaagggcguggaggccgugauguacauggggacgcucuccuacgagcaguucaagaagggcguccagauccccugcaccugcgggaagcaggccaccaaguaccuggugcagcaggagagccccuucgugaugauguccgcccccccggcgcaguacgagcugaagcacggcaccuucacgugcgccagcgaguacaccggcaacuaccagugcgggcacuacaagcacaucaccuccaaggagacccucuacugcaucgacggcgcccugcugacgaagagcagcgaguacaaggggcccaucaccgacgucuucuacaaggagaacuccuacaccaccacgaucaagcccgugaccuacaagcucgacggcguggucugcaccgagaucgaccccaagcuggacaacuacuacaagaaggacaacagcuacuucaccgagcagccgaucgaccuggugcccaaccagcccuaccccaacgccuccuucgacaacuucaaguucgugugcgacaacaucaaguucgccgacgaccucaaccagcugacgggguacaagaagccggcgagccgcgagcugaaggucaccuucuuccccgaccucaacggcgacgugguggccaucgacuacaagcacuacacccccuccuucaagaagggcgccaagcugcugcacaagcccaucgucuggcacgugaacaacgccaccaacaaggcgacguacaagccgaacaccuggugcauccggugccucuggagcaccaagcccguggagaccuccaacagcuucgacguccugaaguccgaggacgcccaggggauggacaaccuggccugcgaggaccucaagcccgugagcgaggagguggucgagaaccccacgauccagaaggacgugcuggagugcaacgugaagaccaccgaggucgugggcgacaucauccugaagccggccaacaacucccucaagaucaccgaggagguggggcacacggaccugauggccgcguacgucgacaacagcucccugaccaucaagaagcccaacgagcucagccgcgugcugggccugaagacccucgccacccacgggcuggccgccgugaacuccguccccugggacacgaucgccaacuacgcgaagccguuccugaacaagguggugagcaccaccaccaacaucgucacgcgcugccucaaccgggugugcaccaacuacaugcccuacuucuucacccugcugcuccagcugugcaccuucacccgcuccacgaacagccggaucaaggccuccaugcccaccaccaucgccaagaacaccgugaagagcgucggcaaguucugccuggaggccagcuucaacuaccucaagucccccaacuucagcaagcugaucaacaucaucaucugguuccugcuccuguccgugugccugggcagccucaucuacuccacggccgcgcugggggugcugaugagcaaccucggcaugccguccuacugcaccggguaccgcgagggcuaccugaacagcaccaacgucaccaucgccacguacugcaccggcuccauccccugcagcgugugccuguccgggcucgacagccuggacaccuaccccucccuggagaccauccagaucacgaucagcuccuucaagugggaccucaccgccuucggccugguggccgagugguuccuggccuacauccucuucacccgguucuucuacguccuggggcuggcggccaucaugcagcucuucuucagcuacuucgccgugcacuucaucuccaacagcuggcugauguggcugaucaucaaccuggugcagauggcccccaucuccgcgaugguccgcauguacaucuucuucgccagcuucuacuacguguggaagagcuacgugcacgucguggacggcugcaacuccagcaccugcaugaugugcuacaagcggaaccgcgccacgcggguggagugcaccaccaucgucaacggggugcgccgguccuucuacgucuacgccaacggcggcaagggguucugcaagcuccacaacuggaacugcgugaacugcgacaccuucugcgccggcagcacguucaucuccgacgagguggcgcgcgaccugagccugcaguucaagcggccgaucaaccccaccgaccaguccagcuacaucgucgacuccgugaccgugaagaacgggagcauccaccucuacuucgacaaggccggccagaagaccuacgagcgccacucccugagccacuucgucaaccuggacaaccuccgggccaacaacacgaaggggucccugcccaucaacgugaucguguucgacggcaagagcaagugcgaggaguccagcgccaaguccgccagcgucuacuacucccagcugaugugccagcccauccuccugcuggaccaggcgcucgugagcgacgugggcgacagcgccgaggucgccgugaagauguucgacgccuacgugaacaccuucuccagcaccuucaacgucccgauggagaagcugaagacccugguggccacggcggaggccgagcucgccaagaacgugucccuggacaacguccugagcaccuucaucuccgccgcgcgccagggguucguggacagcgacguggagaccaaggacgucguggagugccucaagcugucccaccagagcgacaucgaggugaccggcgacuccugcaacaacuacaugcugacguacaacaaggucgagaacaugaccccccgggaccucggggccugcaucgacugcagcgcccgccacaucaacgcccagguggccaagucccacaacaucgcgcugaucuggaacgugaaggacuucaugagccuguccgagcagcuccggaagcagauccgcagcgccgccaagaagaacaaccugcccuucaagcugaccugcgccaccacgcgccaggucgugaacguggucaccaccaagaucgcccucaagggcggguga

SEQ ID NO: 18188 - RNA, 5841 nt, Artificial Sequence
  SARS-CoV-2__MT358640.1__non-structural protein 3 (NSP3) CDS gc
auggcccccaccaaggugaccuucggcgacgacacggucaucgaggugcagggguacaagagcgugaacaucaccuucgagcuggacgagcgcaucgacaagguccucaacgagaagugcuccgccuacaccguggagcugggcaccgaggugaacgaguucgcgugcgucguggccgacgccgugaucaagacgcugcagccggucagcgagcuccugaccccccuggggaucgaccucgacgagugguccauggccaccuacuaccuguucgacgagagcggcgaguucaagcuggccucccacauguacugcagcuucuacccccccgacgaggacgaggaggagggggacugcgaggaggaggaguucgagccguccacccaguacgaguacggcacggaggacgacuaccagggcaagccccucgaguucggggcgaccagcgccgcccugcagcccgaggaggagcaggaggaggacuggcuggacgacgacucccagcagaccgugggccagcaggacgggagcgaggacaaccagaccacgaccauccagaccaucguggagguccagccccagcucgagauggagcugaccccgguggugcagacgaucgaggucaacuccuucagcggcuaccugaagcucaccgacaacguguacaucaagaacgccgacaucguggaggaggcgaagaaggucaagcccaccgugguggucaacgccgccaacguguaccugaagcacgggggcggcguggccggggcccugaacaaggcgaccaacaacgccaugcaggucgaguccgacgacuacaucgccacgaacggcccccucaagguggggggcagcugcguccuguccggccacaaccuggccaagcacugccuccacgugguggggcccaacgucaacaagggcgaggacauccagcugcugaagagcgccuacgagaacuucaaccagcacgaggugcuccuggcgccgcugcucuccgccgggaucuucggcgccgaccccauccacagccugcgggugugcgucgacaccgugcgcaccaacguguaccuggccgucuucgacaagaaccucuacgacaagcugguguccagcuuccuggagaugaagagcgagaagcagguggagcagaagaucgccgagauccccaaggaggaggucaagcccuucaucaccgaguccaagccgagcguggagcagcggaagcaggacgacaagaagaucaaggcgugcguggaggaggucacgaccacccucgaggagaccaaguuccugacggagaaccugcuccuguacaucgacaucaacgggaaccugcaccccgacuccgccacccucgugagcgacaucgacaucaccuuccugaagaaggacgcccccuacaucgugggcgacgucgugcaggagggcgugcugaccgccgucgugauccccacgaagaaggccgggggcaccaccgagaugcucgcgaaggcccugcgcaaggugccgaccgacaacuacaucacgaccuaccccgggcagggccugaacggguacaccgucgaggaggccaagaccgugcucaagaagugcaaguccgccuucuacauccugcccagcaucaucuccaacgagaagcaggagauccugggcaccgugagcuggaaccuccgggagaugcuggcgcacgccgaggagacgcgcaagcugaugcccgucugcguggagaccaaggccaucguguccaccauccagcggaaguacaagggcaucaagauccaggagggggucguggacuacggcgcccgcuucuacuucuacaccagcaagacgaccguggccucccugaucaacacccucaacgaccugaacgagacccuggucacgaugccgcucggguacgugacccacggccugaaccuggaggaggcggcccgguacaugcgcagccucaaggugcccgccaccgucuccgugagcucccccgacgccgugaccgccuacaacggguaccugacgagcuccagcaagacccccgaggagcacuucaucgagaccaucucccuggcgggcagcuacaaggacuggagcuacuccggccagagcacccagcucgggaucgaguuccugaagcggggcgacaaguccgucuacuacacgagcaacccgaccaccuuccaccuggacggggaggugaucaccuucgacaaccucaagacgcugcugucccuccgcgaggugcggaccaucaaggucuucaccaccguggacaacaucaaccugcacacgcagguggucgacaugagcaugaccuacggccagcaguucggccccaccuaccuggacggggccgacgugaccaagaucaagccccacaacucccacgagggcaagacguucuacgugcucccgaacgacgacacccugcgcgucgaggccuucgaguacuaccacaccaccgaccccagcuuccuggggcgguacauguccgcccucaaccacacgaagaaguggaaguacccccaggugaacggccugaccagcaucaagugggccgacaacaacugcuaccuggcgaccgcccuccugacccugcagcagaucgagcucaaguucaaccccccggcccugcaggacgccuacuaccgcgcgcgggccggggaggccgccaacuucugcgcccugauccucgcguacugcaacaagacggugggcgagcugggcgacguccgcgagaccauguccuaccuguuccagcacgccaaccucgacagcugcaagcgggugcugaacgucgugugcaagaccugcgggcagcagcagaccacccugaagggcguggaggccgucauguacauggggacgcucuccuacgagcaguucaagaagggcgugcagauccccugcaccugcgggaagcaggccaccaaguaccuggugcagcaggagagccccuucgucaugauguccgcccccccggcgcaguacgagcugaagcacggcaccuucacgugcgccagcgaguacaccggcaacuaccagugcgggcacuacaagcacaucaccuccaaggagacccucuacugcaucgacggcgcccugcugacgaagagcagcgaguacaaggggcccaucaccgacguguucuacaaggagaacuccuacaccaccacgaucaagcccgugaccuacaagcucgacggcgucgugugcaccgagaucgaccccaagcuggacaacuacuacaagaaggacaacagcuacuucaccgagcagccgaucgaccuggugcccaaccagcccuaccccaacgccuccuucgacaacuucaaguucgucugcgacaacaucaaguucgccgacgaccucaaccagcugacgggguacaagaagccggcgagccgcgagcugaaggugaccuucuuccccgaccucaacggcgacguggucgccaucgacuacaagcacuacacccccuccuucaagaagggcgccaagcugcugcaccggcccaucguguggcacgugaacaacgccaccaacaaggcgacguacaagccgaacaccuggugcauccgcugccucuggagcaccaagcccgucgagaccuccaacagcuucgacgugcugaaguccgaggacgcccaggggauggacaaccuggccugcgaggaccucaagcccgugagcgaggaggucguggagaaccccacgauccagaaggacgugcuggagugcaacgucaagaccaccgagguggugggcgacaucauccugaagccggccaacaacucccucaagaucaccgaggaggucgggcacacggaccugauggccgcguacguggacaacagcucccugaccaucaagaagcccaacgagcucagccgcgugcugggccugaagacccucgccacccacgggcuggccgccgucaacuccgugcccugggacacgaucgccaacuacgcgaagccguuccugaacaagguggucagcaccaccaccaacaucgugacgcggugccucaaccgcgugugcaccaacuacaugcccuacuucuucacccugcugcuccagcugugcaccuucacccgguccacgaacagccgcaucaaggccuccaugcccaccaccaucgccaagaacaccgucaagagcgugggcaaguucugccuggaggccagcuucaacuaccucaagucccccaacuucagcaagcugaucaacaucaucaucugguuccugcuccuguccgugugccugggcagccucaucuacuccacggccgcgcuggggguccugaugagcaaccucggcaugccguccuacugcaccggguaccgggagggcuaccugaacagcaccaacgugaccaucgccacguacugcaccggcuccauccccugcagcgugugccuguccgggcucgacagccuggacaccuaccccucccuggagaccauccagaucacgaucagcuccuucaagugggaccucaccgccuucggccuggucgccgagugguuccuggccuacauccucuucacccgcuucuucuacgugcuggggcuggcggccaucaugcagcucuucuucagcuacuucgccgugcacuucaucuccaacagcuggcugauguggcugaucaucaaccugguccagauggcccccaucuccgcgauggugcggauguacaucuucuucgccagcuucuacuacguguggaagagcuacguccacgugguggacggcugcaacuccagcaccugcaugaugugcuacaagcgcaaccgggccacgcgcgucgagugcaccaccaucgugaacgggguccggcgcuccuucuacguguacgccaacggcggcaagggguucugcaagcuccacaacuggaacugcgugaacugcgacaccuucugcgccggcagcacguucaucuccgacgaggucgcgcgggaccugagccugcaguucaagcgcccgaucaaccccaccgaccaguccagcuacaucguggacuccgugaccgucaagaacgggagcauccaccucuacuucgacaaggccggccagaagaccuacgagcggcacucccugagccacuucgugaaccuggacaaccuccgcgccaacaacacgaaggggucccugcccaucaacgugaucgucuucgacggcaagagcaagugcgaggaguccagcgccaaguccgccagcguguacuacucccagcugaugugccagcccauccuccugcuggaccaggcgcucgugagcgacgucggcgacagcgccgagguggccgugaagauguucgacgccuacgucaacaccuucuccagcaccuucaacgugccgauggagaagcugaagacccugguggccacggcggaggccgagcucgccaagaacgucucccuggacaacgugcugagcaccuucaucuccgccgcgcggcagggguucguggacagcgacgucgagaccaaggacgugguggagugccucaagcugucccaccagagcgacaucgaggucaccggcgacuccugcaacaacuacaugcugacguacaacaagguggagaacaugaccccccgcgaccucggggccugcaucgacugcagcgcccggcacaucaacgcccagguggccaagucccacaacaucgcgcugaucuggaacgucaaggacuucaugagccuguccgagcagcuccgcaagcagauccgcagcgccgccaagaagaacaaccugcccuucaagcugaccugcgccaccacgcggcagguggugaacgucgugaccaccaagaucgcccucaagggcggguga

SEQ ID NO: 18189 - RNA, 5841 nt, Artificial Sequence
  SARS-CoV-2__MT467247.1__non-structural protein 3 (NSP3) CDS gc
auggcccccaccaaggugaccuucggcgacgacacggucaucgaggugcagggguacaagagcgugaacaucaccuucgagcuggacgagcgcaucgacaagguccucaacgagaagugcuccgccuacaccguggagcugggcaccgaggugaacgaguucgcgugcgucguggccgacgccgugaucaagacgcugcagccggucagcgagcuccugaccccccuggggaucgaccucgacgagugguccauggccaccuacuaccuguucgacgagagcggcgaguucaagcuggccucccacauguacugcagcuucuacccccccgacgaggacgaggaggagggggacugcgaggaggaggaguucgagccguccacccaguacgaguacggcacggaggacgacuaccagggcaagccccucgaguucggggcgaccagcgccgcccugcagcccgaggaggagcaggaggaggacuggcuggacgacgacucccagcagaccgugggccagcaggacgggagcgaggacaaccagaccacgaccauccagaccaucguggagguccagccccagcucgagauggagcugaccccgguggugcagacgaucgaggucaacuccuucagcggcuaccugaagcucaccgacaacguguacaucaagaacgccgacaucguggaggaggcgaagaaggucaagcccaccgugguggucaacgccgccaacguguaccugaagcacgggggcggcguggccggggcccugaacaaggcgaccaacaacgccaugcaggucgaguccgacgacuacaucgccacgaacggcccccucaagguggggggcagcugcguccuguccggccacaaccuggccaagcacugccuccacgugguggggcccaacgucaacaagggcgaggacauccagcugcugaagagcgccuacgagaacuucaaccagcacgaggugcuccuggcgccgcugcucuccgccgggaucuucggcgccgacagcauccacucccugcgggugugcgucgacaccgugcgcaccaacguguaccuggccgucuucgacaagaaccucuacgacaagcuggugagcagcuuccuggagaugaaguccgagaagcagguggagcagaagaucgccgagauccccaaggaggaggucaagcccuucaucaccgagagcaagcccuccguggagcagcggaagcaggacgacaagaagaucaaggcgugcguggaggaggucacgaccacccucgaggagaccaaguuccugacggagaaccugcuccuguacaucgacaucaacgggaaccugcacccggacagcgccacccucguguccgacaucgacaucaccuuccugaagaaggacgcccccuacaucgugggcgacgucgugcaggagggcgugcugaccgccgucgugauccccacgaagaaggccgggggcaccaccgagaugcucgcgaaggcccugcgcaaggugcccaccgacaacuacaucacgaccuacccggggcagggccugaacggguacaccgucgaggaggccaagaccgugcucaagaagugcaagagcgccuucuacauccugcccuccaucaucagcaacgagaagcaggagauccugggcaccguguccuggaaccuccgggagaugcuggcgcacgccgaggagacgcgcaagcugaugcccgucugcguggagaccaaggccaucgugagcaccauccagcggaaguacaagggcaucaagauccaggagggggucguggacuacggcgcccgcuucuacuucuacaccuccaagacgaccguggccagccugaucaacacccucaacgaccugaacgagacccuggucacgaugccccucggguacgugacccacggccugaaccuggaggaggcggcccgguacaugcgcucccucaaggugccggccaccgucagcguguccagccccgacgccgugaccgccuacaacggguaccugacguccagcuccaagacccccgaggagcacuucaucgagaccaucagccuggcgggcagcuacaaggacugguccuacagcggccaguccacccagcucgggaucgaguuccugaagcggggcgacaagaucgucuacuacacgagcaaccccaccaccuuccaccuggacggggaggugaucaccuucgacaaccucaagacgcugcugucccuccgcgaggugcggaccaucaaggucuucaccaccguggacaacaucaaccugcacacgcagguggucgacaugagcaugaccuacggccagcaguucggcccgaccuaccuggacggggccgacgugaccaagaucaagccccacaacucccacgagggcaagacguucuacgugcuccccaacgacgacacccugcgcgucgaggccuucgaguacuaccacaccaccgacccgagcuuccuggggcgguacauguccgcccucaaccacacgaagaaguggaaguacccccaggugaacggccugaccagcaucaagugggccgacaacaacugcuaccuggcgaccgcccuccugacccugcagcagaucgagcucaaguucaacccccccgcccugcaggacgccuacuaccgcgcgcgggccggggaggccgccaacuucugcgcccugauccucgcguacugcaacaagacggugggcgagcugggcgacguccgcgagaccauguccuaccuguuccagcacgccaaccucgacagcugcaagcgggugcugaacgucgugugcaagaccugcgggcagcagcagaccacccugaagggcguggaggccgucauguacauggggacgcucuccuacgagcaguucaagaagggcgugcagaucccgugcaccugcgggaagcaggccaccaaguaccuggugcagcaggagagccccuucgucaugauguccgccccccccgcgcaguacgagcugaagcacggcaccuucacgugcgccagcgaguacaccggcaacuaccagugcgggcacuacaagcacaucaccuccaaggagacccucuacugcaucgacggcgcccugcugacgaagagcagcgaguacaaggggccgaucaccgacguguucuacaaggagaacuccuacaccaccacgaucaagcccgugaccuacaagcucgacggcgucgugugcaccgagaucgaccccaagcuggacaacuacuacaagaaggacaacagcuacuucaccgagcagcccaucgaccuggugccgaaccagcccuaccccaacgccuccuucgacaacuucaaguucgucugcgacaacaucaaguucgccgacgaccucaaccagcugacgggguacaagaagcccgcgagccgcgagcugaaggugaccuucuucccggaccucaacggcgacguggucgccaucgacuacaagcacuacacccccuccuucaagaagggcgccaagcugcugcacaagcccaucguguggcacgugaacaacgccaccaacaaggcgacguacaagcccaacaccuggugcauccggugccucuggagcaccaagccggucgagaccuccaacagcuucgacgugcugaaguccgaggacgcccaggggauggacaaccuggccugcgaggaccucaagcccgugagcgaggaggucguggagaaccccacgauccagaaggacgugcuggagugcaacgucaagaccaccgagguggugggcgacaucauccugaagcccgccaacaacucccucaagaucaccgaggaggucgggcacacggaccugauggccgcguacguggacaacagcucccugaccaucaagaagccgaacgagcucagccgcgugcugggccugaagacccucgccacccacgggcuggccgccgucaacuccgugcccugggacacgaucgccaacuacgcgaagcccuuccugaacaagguggucagcaccaccaccaacaucgugacgcgcugccucaaccgggugugcaccaacuacaugccguacuucuucacccugcugcuccagcugugcaccuucacccgcuccacgaacagccggaucaaggccuccaugcccaccaccaucgccaagaacaccgucaagagcgugggcaaguucugccuggaggccagcuucaacuaccucaagucccccaacuucagcaagcugaucaacaucaucaucugguuccugcuccuguccgugugccugggcagccucaucuacuccacggccgcgcuggggguccugaugagcaaccucggcaugcccuccuacugcaccggguaccgcgagggcuaccugaacagcaccaacgugaccaucgccacguacugcaccggcuccaucccgugcagcgugugccuguccgggcucgacagccuggacaccuaccccucccuggagaccauccagaucacgaucagcuccuucaagugggaccucaccgccuucggccuggucgccgagugguuccuggccuacauccucuucacccgguucuucuacgugcuggggcuggcggccaucaugcagcucuucuucagcuacuucgccgugcacuucaucuccaacagcuggcugauguggcugaucaucaaccugguccagauggcccccaucuccgcgauggugcgcauguacaucuucuucgccagcuucuacuacguguggaagagcuacguccacgugguggacggcugcaacuccagcaccugcaugaugugcuacaagcggaaccgcgccacgcgggucgagugcaccaccaucgugaacgggguccgccgguccuucuacguguacgccaacggcggcaagggguucugcaagcuccacaacuggaacugcgugaacugcgacaccuucugcgccggcagcacguucaucuccgacgaggucgcgcgcgaccugagccugcaguucaagcggcccaucaacccgaccgaccaguccagcuacaucguggacuccgugaccgucaagaacgggagcauccaccucuacuucgacaaggccggccagaagaccuacgagcgccacucccugagccacuucgugaaccuggacaaccuccgggccaacaacacgaaggggucccugcccaucaacgugaucgucuucgacggcaagagcaagugcgaggaguccagcgccaaguccgccagcguguacuacucccagcugaugugccagcccauccuccugcuggaccaggcgcucgugagcgacgucggcgacagcgccgagguggccgugaagauguucgacgccuacgucaacaccuucuccagcaccuucaacgugcccauggagaagcugaagacccugguggccacggcggaggccgagcucgccaagaacgucucccuggacaacgugcugagcaccuucaucuccgccgcgcgccagggguucguggacagcgacgucgagaccaaggacgugguggagugccucaagcugucccaccagagcgacaucgaggucaccggcgacuccugcaacaacuacaugcugacguacaacaagguggagaacaugaccccgcgggaccucggggccugcaucgacugcagcgcccgccacaucaacgcccagguggccaagucccacaacaucgcgcugaucuggaacgucaaggacuucaugagccuguccgagcagcuccggaagcagauccgcagcgccgccaagaagaacaaccugcccuucaagcugaccugcgccaccacgcgccagguggugaacgucgugaccaccaagaucgcccucaagggcggguga

SEQ ID NO: 18190 - RNA, 5841 nt, Artificial Sequence
  SARS-CoV-2__MT470104.1__non-structural protein 3 (NSP3) CDS gc
auggcccccaccaaggugaccuucggcgacgacacggucaucgaggugcagggguacaagagcgugaacaucaccuucgagcuggacgagcgcaucgacaagguccucaacgagaagugcuccgccuacaccguggagcugggcaccgaggugaacgaguucgcgugcgucguggccgacgccgugaucaagacgcugcagccggucagcgagcuccugaccccccuggggaucgaccucgacgagugguccauggccaccuacuaccuguucgacgagagcggcgaguucaagcuggccucccacauguacugcagcuucuacccccccgacgaggacgaggaggagggggacugcgaggaggaggaguucgagccguccacccaguacgaguacggcacggaggacgacuaccagggcaagccccucgaguucggggcgaccagcgccgcccugcagcccgaggaggagcaggaggaggacuggcuggacgacgacucccagcagaccgugggccagcaggacgggagcgaggacaaccagaccacgaccauccagaccaucguggagguccagccccagcucgagauggagcugaccccgguggugcagacgaucgaggucaacuccuucagcggcuaccugaagcucaccgacaacguguacaucaagaacgccgacaucguggaggaggcgaagaaggucaagcccaccgugguggucaacgccgccaacguguaccugaagcacgggggcggcguggccggggcccugaacaaggcgaccaacaacgccaugcaggucgaguccgacgacuacaucgccacgaacggcccccucaagguggggggcagcugcguccuguccggccacaaccuggccaagcacugccuccacgugguggggcccaacgucaacaagggcgaggacauccagcugcugaagagcgccuacgagaacuucaaccagcacgaggugcuccuggcgccgcugcucuccgccgggaucuucggcgccgaccccauccacagccugcgggugugcgucgacaccgugcgcaccaacguguaccuggccgucuucgacaagaaccucuacgacaagcugguguccagcuuccuggagaugaagagcgagaagcagguggagcagaagaucgccgagauccccaaggaggaggucaagcccuucaucaccgaguccaagccgagcguggagcagcggaagcaggacgacaagaagaucaaggcgugcguggaggaggucacgaccacccucgaggagaccaaguuccugacggagaaccugcuccuguacaucgacaucaacgggaaccugcaccccgacuccgccacccucgugagcgacaucgacaucaccuuccugaagaaggacgcccccuacaucgugggcgacgucgugcaggagggcgugcugaccgccgucgugauccccacgaagaaggccgggggcaccaccgagaugcucgcgaaggcccugcgcaaggugccgaccgacaacuacaucacgaccuaccccgggcagggccugaacggguacaccgucgaggaggccaagaccgugcucaagaagugcaaguccgccuucuacauccugcccagcaucaucuccaacgagaagcaggagauccugggcaccgugagcuggaaccuccgggagaugcuggcgcacgccgaggagacgcgcaagcugaugcccgucugcguggagaccaaggccaucguguccaccauccagcggaaguacaagggcaucaagauccaggagggggucguggacuacggcgcccgcuucuacuucuacaccagcaagacgaccguggccucccugaucaacacccucaacgaccugaacgagacccuggucacgaugccgcucggguacgugacccacggccugaaccuggaggaggcggcccgguacaugcgcagccucaaggugcccgccaccgucuccgugagcucccccgacgccgugaccgccuacaacggguaccugacgagcuccagcaagacccccgaggagcacuucaucgagaccaucucccuggcgggcagcuacaaggacuggagcuacuccggccagagcacccagcucgggaucgaguuccugaagcggggcgacaaguccgucuacuacacgagcaacccgaccaccuuccaccuggacggggaggugaucaccuucgacaaccucaagacgcugcugucccuccgcgaggugcggaccaucaaggucuucaccaccguggacaacaucaaccugcacacgcagguggucgacaugagcaugaccuacggccagcaguucggccccaccuaccuggacggggccgacgugaccaagaucaagccccacaacucccacgagggcaagacguucuacgugcucccgaacgacgacacccugcgcgucgaggccuucgaguacuaccacaccaccgaccccagcuuccuggggcgguacauguccgcccucaaccacacgaagaaguggaaguacccccaggugaacggccugaccagcaucaagugggccgacaacaacugcuaccuggcgaccgcccuccugacccugcagcagaucgagcucaaguucaaccccccggcccugcaggacgccuacuaccgcgcgcgggccggggaggccgccaacuucugcgcccugauccucgcguacugcaacaagacggugggcgagcugggcgacguccgcgagaccauguccuaccuguuccagcacgccaaccucgacagcugcaagcgggugcugaacgucgugugcaagaccugcgggcagcagcagaccacccugaagggcguggaggccgucauguacauggggacgcucuccuacgagcaguucaagaagggcgugcagauccccugcaccugcgggaagcaggccaccaaguaccuggugcagcaggagagccccuucgucaugauguccgcccccccggcgcaguacgagcugaagcacggcaccuucacgugcgccagcgaguacaccggcaacuaccagugcgggcacuacaagcacaucaccuccaaggagacccucuacugcaucgacggcgcccugcugacgaagagcagcgaguacaaggggcccaucaccgacguguucuacaaggagaacuccuacaccaccacgaucaagcccgugaccuacaagcucgacggcgucgugugcaccgagaucgaccccaagcuggacaacuacuacaagaaggacaacagcuacuucaccgagcagccgaucgaccuggugcccaaccagcccuaccccaacgccuccuucgacaacuucaaguucgucugcgacaacaucaaguucgccgacgaccucaaccagcugacgggguacaagaagccggcgagccgcgagcugaaggugaccuucuuccccgaccucaacggcgacguggucgccaucgacuacaagcacuacacccccuccuucaagaagggcgccaagcugcugcacaagcccaucguguggcacgugaacaacgccaccaacaaggcgacguacaagccgaacaccuggugcauccggugccucuggagcaccaagcccgucgagaccuccaacagcuucgacgugcugaaguccgaggacgcccaggggauggacaaccuggccugcgaggaccucaagcccgugagcgaggaggucguggagaaccccacgauccagaaggacgugcuggagugcaacgucaagaccaccgagguggugggcgacaucauccugaagccggccaacaacucccucaagaucaccgaggaggucgggcacacggaccugauggccgcguacguggacaacagcucccugaccaucaagaagcccaacgagcucagccgcgugcugggccugaagacccucgccacccacgggcuggccgccgucaacuccgugcccugggacacgaucgccaacuacgcgaagccguuccugaacaagguggucagcaccaccaccaacaucgugacgcgcugccucaaccgggugugcaccaacuacaugcccuacuucuucacccugcugcuccagcugugcaccuucacccgcuccacgaacagccggaucaaggccuccaugcccaccaccaucgccaagaacaccgucaagagcgugggcaaguucugccuggaggccagcuucaacuaccucaagucccccaacuucagcaagcugaucaacaucaucaucugguuccugcuccuguccgugugccugggcagccucaucuacuccacggccgcgcuggggguccugaugagcaaccucggcaugccguccuacugcaccggguaccgcgagggcuaccugaacagcaccaacgugaccaucgccacguacugcaccggcuccauccccugcagcgugugccuguccgggcucgacagccuggacaccuaccccucccuggagaccauccagaucacgaucagcuccuucaagugggaccucaccgccuucggccuggucgccgagugguuccuggccuacauccucuucacccgguucuucuacgugcuggggcuggcggccaucaugcagcucuucuucagcuacuucgccguguacuucaucuccaacagcuggcugauguggcugaucaucaaccugguccagauggcccccaucuccgcgauggugcgcauguacaucuucuucgccagcuucuacuacguguggaagagcuacguccacgugguggacggcugcuccagcuccaccugcaugaugugcuacaagcggaaccgcgccacgcgggucgagugcaccaccaucgugaacgggguccgccggagcuucuacguguacgccaacggcggcaagggguucugcaagcuccacaacuggaacugcgugaacugcgacaccuucugcgccggcuccacguucaucagcgacgaggucgcgcgcgaccugucccugcaguucaagcggccgaucaaccccaccgaccagagcuccuacaucguggacagcgugaccgucaagaacggguccauccaccucuacuucgacaaggccggccagaagaccuacgagcgccacagccugucccacuucgugaaccuggacaaccuccgggccaacaacacgaaggggagccugcccaucaacgugaucgucuucgacggcaaguccaagugcgaggagagcuccgccaagagcgccuccguguacuacagccagcugaugugccagcccauccuccugcuggaccaggcgcucgugagcgacgucggcgacuccgccgagguggccgugaagauguucgacgccuacgucaacaccuucagcuccaccuucaacgugccgauggagaagcugaagacccugguggccacggcggaggccgagcucgccaagaacgucagccuggacaacgugcuguccaccuucaucagcgccgcgcgccagggguucguggacuccgacgucgagaccaaggacgugguggagugccucaagcugagccaccaguccgacaucgaggucaccggcgacagcugcaacaacuacaugcugacguacaacaagguggagaacaugaccccccgggaccucggggccugcaucgacugcuccgcccgccacaucaacgcccagguggccaagagccacaacaucgcgcugaucuggaacgucaaggacuucaugucccugagcgagcagcuccggaagcagauccgcuccgccgccaagaagaacaaccugcccuucaagcugaccugcgccaccacgcgccagguggugaacgucgugaccaccaagaucgcccucaagggcggguga

SEQ ID NO: 18191 - RNA, 5841 nt, Artificial Sequence
  SARS-CoV-2__MT470114.1__non-structural protein 3 (NSP3) CDS gc
auggcccccaccaaggugaccuucggcgacgacacggucaucgaggugcagggguacaagagcgugaacaucaccuucgagcuggacgagcgcaucgacaagguccucaacgagaagugcuccgccuacaccguggagcugggcaccgaggugaacgaguucgcgugcgucguggccgacgccgugaucaagacgcugcagccggucagcgagcuccugaccccccuggggaucgaccucgacgagugguccauggccaccuacuaccuguucgacgagagcggcgaguucaagcuggccucccacauguacugcagcuucuacccccccgacgaggacgaggaggagggggacugcgaggaggaggaguucgagccguccacccaguacgaguacggcacggaggacgacuaccagggcaagccccucgaguucggggcgaccagcgccgcccugcagcccgaggaggagcaggaggaggacuggcuggacgacgacucccagcagaccgugggccagcaggacgggagcgaggacaaccagaccacgaccauccagaccaucguggagguccagccccagcucgagauggagcugaccccgguggugcagacgaucgaggucaacuccuucagcggcuaccugaagcucaccgacaacguguacaucaagaacgccgacaucguggaggaggcgaagaaggucaagccccccgugguggucaacgccgccaacguguaccugaagcacgggggcggcguggccggggcccugaacaaggcgaccaacaacgccaugcaggucgaguccgacgacuacaucgccaccaacggcccccucaagguggggggcagcugcguccuguccggccacaaccuggccaagcacugccuccacgugguggggccgaacgucaacaagggcgaggacauccagcugcugaagagcgccuacgagaacuucaaccagcacgaggugcuccuggcgccccugcucuccgccgggaucuucggcgccgaccccauccacagccugcgggugugcgucgacacggugcgcaccaacguguaccuggccgucuucgacaagaaccucuacgacaagcugguguccagcuuccuggagaugaagagcgagaagcagguggagcagaagaucgccgagauccccaaggaggaggucaagccguucaucaccgaguccaagcccagcguggagcagcggaagcaggacgacaagaagaucaaggcgugcguggaggaggucaccacgacccucgaggagaccaaguuccugaccgagaaccugcuccuguacaucgacaucaacgggaaccugcaccccgacuccgccacgcucgugagcgacaucgacaucaccuuccugaagaaggacgcccccuacaucgugggcgacgucgugcaggagggcgugcugaccgccgucgugaucccgaccaagaaggccgggggcacgaccgagaugcucgcgaaggcccugcgcaaggugcccaccgacaacuacaucaccacguaccccgggcagggccugaacggguacaccgucgaggaggccaagaccgugcucaagaagugcaaguccgccuucuacauccugcccagcaucaucuccaacgagaagcaggagauccugggcaccgugagcuggaaccuccgggagaugcuggcgcacgccgaggagacccgcaagcugaugccggucugcguggagacgaaggccaucguguccaccauccagcggaaguacaagggcaucaagauccaggagggggucguggacuacggcgcccgcuucuacuucuacaccagcaagaccacgguggccucccugaucaacacccucaacgaccugaacgagacccuggucaccaugccccucggguacgugacgcacggccugaaccuggaggaggcggcccgguacaugcgcagccucaaggugcccgccaccgucuccgugagcucccccgacgccgugaccgccuacaacggguaccugaccagcuccagcaagacgccggaggagcacuucaucgagaccaucucccuggcgggcagcuacaaggacuggagcuacuccggccagagcacccagcucgggaucgaguuccugaagcggggcgacaaguccgucuacuacaccagcaaccccacgaccuuccaccuggacggggaggugaucaccuucgacaaccucaagacccugcugucccuccgcgaggugcggacgaucaaggucuucaccaccguggacaacaucaaccugcacacccagguggucgacaugagcaugacguacggccagcaguucggccccaccuaccuggacggggccgacgugaccaagaucaagccgcacaacucccacgagggcaagaccuucuacgugcuccccaacgacgacacgcugcgcgucgaggccuucgaguacuaccacaccaccgaccccagcuuccuggggcgguacauguccgcccucaaccacaccaagaaguggaaguacccccaggugaacggccugacgagcaucaagugggccgacaacaacugcuaccuggcgaccgcccuccugacccugcagcagaucgagcucaaguucaacccgcccgcccugcaggacgccuacuaccgcgcgcgggccggggaggccgccaacuucugcgcccugauccucgcguacugcaacaagaccgugggcgagcugggcgacguccgcgagacgauguccuaccuguuccagcacgccaaccucgacagcugcaagcgggugcugaacgucgugugcaagaccugcgggcagcagcagaccacccugaagggcguggaggccgucauguacauggggacccucuccuacgagcaguucaagaagggcgugcagauccccugcacgugcgggaagcaggccaccaaguaccuggugcagcaggagagccccuucgucaugauguccgccccgcccgcgcaguacgagcugaagcacggcaccuucaccugcgccagcgaguacacgggcaacuaccagugcgggcacuacaagcacaucaccuccaaggagacccucuacugcaucgacggcgcccugcugaccaagagcagcgaguacaaggggcccaucacggacguguucuacaaggagaacuccuacaccaccaccaucaagcccgugacguacaagcucgacggcgucgugugcaccgagaucgacccgaagcuggacaacuacuacaagaaggacaacagcuacuucaccgagcagcccaucgaccuggugcccaaccagcccuacccgaacgccuccuucgacaacuucaaguucgucugcgacaacaucaaguucgccgacgaccucaaccagcugaccggguacaagaagcccgcgagccgcgagcugaaggugacguucuuccccgaccucaacggcgacguggucgccaucgacuacaagcacuacacccccuccuucaagaagggcgccaagcugcugcacaagccgaucguguggcacgugaacaacgccaccaacaaggcgaccuacaagcccaacacguggugcauccggugccucuggagcaccaagcccgucgagaccuccaacagcuucgacgugcugaaguccgaggacgcccaggggauggacaaccuggccugcgaggaccucaagcccgugagcgaggaggucguggagaacccgaccauccagaaggacgugcuggagugcaacgucaagacgaccgagguggugggcgacaucauccugaagcccgccaacaacucccucaagaucaccgaggaggucgggcacaccgaccugauggccgcguacguggacaacagcucccugacgaucaagaagcccaacgagcucagccgcgugcugggccugaagacccucgccacccacgggcuggccgccgucaacuccgugccgugggacaccaucgccaacuacgcgaagcccuuccugaacaagguggucagcacgaccaccaacaucgugacccgcugccucaaccgggugugcacgaacuacaugcccuacuucuucacccugcugcuccagcugugcaccuucacccgcuccaccaacagccggaucaaggccuccaugcccacgaccaucgccaagaacaccgucaagagcgugggcaaguucugccuggaggccagcuucaacuaccucaaguccccgaacuucagcaagcugaucaacaucaucaucugguuccugcuccuguccgugugccugggcagccucaucuacuccaccgccgcgcuggggguccugaugagcaaccucggcaugcccuccuacugcacgggguaccgcgagggcuaccugaacagcaccaacgugaccaucgccaccuacugcacgggcuccauccccugcagcgugugccuguccgggcucgacagccuggacaccuaccccucccuggagaccauccagaucaccaucagcuccuucaagugggaccucacggccuucggccuggucgccgagugguuccuggccuacauccucuucacccgguucuucuacgugcuggggcuggcggccaucaugcagcucuucuucagcuacuucgccgugcacuucaucuccaacagcuggcugauguggcugaucaucaaccugguccagauggccccgaucuccgcgauggugcgcauguacaucuucuucgccagcuucuacuacguguggaagagcuacguccacgugguggacggcugcaacuccagcaccugcaugaugugcuacaagcggaaccgcgccacccgggucgagugcacgaccaucgugaacgggguccgccgguccuucuacguguacgccaacggcggcaagggguucugcaagcuccacaacuggaacugcgugaacugcgacaccuucugcgccggcagcaccuucaucuccgacgaggucgcgcgcgaccugagccugcaguucaagcggcccaucaaccccacggaccaguccagcuacaucguggacuccgugaccgucaagaacgggagcauccaccucuacuucgacaaggccggccagaagaccuacgagcgccacucccugagccacuucgugaaccuggacaaccuccgggccaacaacaccaaggggucccugcccaucaacgugaucgucuucgacggcaagagcaagugcgaggaguccagcgccaaguccgccagcguguacuacucccagcugaugugccagccgauccuccugcuggaccaggcgcucgugagcgacgucggcgacagcgccgagguggccgugaagauguucgacgccuacgucaacacguucuccagcaccuucaacgugcccauggagaagcugaagacccugguggccaccgcggaggccgagcucgccaagaacgucucccuggacaacgugcugagcacguucaucuccgccgcgcgccagggguucguggacagcgacgucgagaccaaggacgugguggagugccucaagcugucccaccagagcgacaucgaggucaccggcgacuccugcaacaacuacaugcugaccuacaacaagguggagaacaugacgccccgggaccucggggccugcaucgacugcagcgcccgccacaucaacgcccagguggccaagucccacaacaucgcgcugaucuggaacgucaaggacuucaugagccuguccgagcagcuccggaagcagauccgcagcgccgccaagaagaacaaccugcccuucaagcugaccugcgccaccacccgccagguggugaacgucgugacgaccaagaucgcccucaagggcggguga

SEQ ID NO: 18192 - RNA, 5841 nt, Artificial Sequence
  SARS-CoV-2__MT470125.1__non-structural protein 3 (NSP3) CDS gc
auggcccccaccaaggugaccuucggcgacgacacggucaucgaggugcagggguacaagagcgugaacaucaccuucgagcuggacgagcgcaucgacaagguccucaacgagaagugcuccgccuacaccguggagcugggcaccgaggugaacgaguucgcgugcgucguggccgacgccgugaucaagacgcugcagccggucagcgagcuccugaccccccuggggaucgaccucgacgagugguccauggccaccuacuaccuguucgacgagagcggcgaguucaagcuggccucccacauguacugcagcuucuacccccccgacgaggacgaggaggagggggacugcgaggaggaggaguucgagccguccacccaguacgaguacggcacggaggacgacuaccagggcaagccccucgaguucggggcgaccagcgccgcccugcagcccgaggaggagcaggaggaggacuggcuggacgacgacucccagcagaccgugggccagcaggacgggagcgaggacaaccagaccacgaccauccagaccaucguggagguccagccccagcucgagauggagcugaccccgguggugcagacgaucgaggucaacuccuucagcggcuaccugaagcucaccgacaacguguacaucaagaacgccgacaucguggaggaggcgaagaaggucaagcccaccgugguggucaacgccgccaacguguaccugaagcacgggggcggcguggccggggcccugaacaaggcgaccaacaacgccaugcaggucgaguccgacgacuacaucgccacgaacggcccccucaagguggggggcagcugcguccuguccggccacaaccuggccaagcacugccuccacgugguggggcccaacgucaacaagggcgaggacauccagcugcugaagagcgccuacgagaacuucaaccagcacgaggugcuccuggcgccgcugcucuccgccgggaucuucggcgccgaccccauccacagccugcgggugugcgucgacaccgugcgcaccaacguguaccuggccgucuucgacaagaaccucuacgacaagcugguguccagcuuccuggagaugaagagcgagaagcagguggagcagaagaucgccgagauccccaaggaggaggucaagcccuucaucaccgaguccaagccgagcguggagcagcggaagcaggacgacaagaagaucaaggcgugcguggaggaggucacgaccacccucgaggagaccaaguuccugacggagaaccugcuccuguacaucgacaucaacgggaaccugcaccccgacuccgccacccucgugagcgacaucgacaucaccuuccugaagaaggacgcccccuacaucgugggcgacgucgugcaggagggcgugcugaccgccgucgugauccccacgaagaaggccgggggcaccaccgagaugcucgcgaaggcccugcgcaaggugccgaccgacaacuacaucacgaccuaccccgggcagggccugaacggguacaccgucgaggaggccaagaccgugcucaagaagugcaaguccgccuucuacauccugcccagcaucaucuccaacgagaagcaggagauccugggcaccgugagcuggaaccuccgggagaugcuggcgcacgccgaggagacgcgcaagcugaugcccgucugcguggagaccaaggccaucguguccaccauccagcggaaguacaagggcaucaagauccaggagggggucguggacuacggcgcccgcuucuacuucuacaccagcaagacgaccguggccucccugaucaacacccucaacgaccugaacgagacccuggucacgaugccgcucggguacgugacccacggccugaaccuggaggaggcggcccgguacaugcgcagccucaaggugcccgccaccgucuccgugagcucccccgacgccgugaccgccuacaacggguaccugacgagcuccagcaagacccccgaggagcacuucaucgagaccaucucccuggcgggcagcuacaaggacuggagcuacuccggccagagcacccagcucgggaucgaguuccugaagcggggcgacaaguccgucuacuacacgagcaacccgaccaccuuccaccuggacggggaggugaucaccuucgacaaccucaagacgcugcugucccuccgcgaggugcggaccaucaaggucuucaccaccguggacaacaucaaccugcacacgcagguggucgacaugagcaugaccuacggccagcaguucggccccaccuaccuggacggggccgacgugaccaagaucaagccccacaacucccacgagggcaagacguucuacgugcucccgaacgacgacacccugcgcgucgaggccuucgaguacuaccacaccaccgaccccagcuuccuggggcgguacauguccgcccucaaccacacgaagaaguggaaguacccccaggugaacggccugaccagcaucaagugggccgacaacaacugcuaccuggcgaccgcccuccugacccugcagcagaucgagcucaaguucaaccccccggcccugcaggacgccuacuaccgcgcgcgggccggggaggccgccaacuucugcgcccugauccucgcguacugcaacaagacggugggcgagcugggcgacguccgcgagaccauguccuaccuguuccagcacgccaaccucgacagcugcaagcgggugcugaacgucgugugcaagaccugcgggcagcagcagaccacccugaagggcguggaggccgucauguacauggggacgcucuccuacgagcaguucaagaagggcgugcagauccccugcaccugcgggaagcaggccaccaaguaccuggugcagcaggagagccccuucgucaugauguccgcccccccggcgcaguacgagcugaagcacggcaccuucacgugcgccagcgaguacaccggcaacuaccagugcgggcacuacaagcacaucaccuccaaggagacccucuacugcaucgacggcgcccugcugacgaagagcagcgaguacaaggggcccaucaccgacguguucuacaaggagaacuccuacaccaccacgaucaagcccgugaccuacaagcucgacggcgucgugugcaccgagaucgaccccaagcuggacaacuacuacaagaaggacaacagcuacuucaccgagcagccgaucgaccuggugcccaaccagcccuaccccaacgccuccuucgacaacuucaaguucgucugcgacaacaucaaguucgccgacgaccucaaccagcugacgggguacaagaagccggcgagccgcgagcugaaggugaccuucuuccccgaccucaacggcgacguggucgccaucgacuacaagcacuacacccccuccuucaagaagggcgccaagcugcugcacaagcccaucguguggcacgugaacaacgccaccaacaaggcgacguacaagccgaacaccuggugcauccggugccucuggagcaccaagcccgucgagaccuccaacagcuucgacgugcugaaguccgaggacgcccaggggauggacaaccuggccugcgaggaccucaagcccgugagcgaggaggucguggagaaccccacgauccagaaggacgugcuggagugcaacgucaagaccaccgagguggugggcgacaucauccugaagccggccaacaacucccucaagaucaccgaggaggucgggcacacggaccugauggccgcguacguggacaacagcucccugaccaucaagaagcccaacgagcucagccgcgugcugggccugaagacccucgccacccacgggcuggccgccgucaacuccgugcccugggacacgaucgccaacuacgcgaagccguuccugaacaagguggucagcaccaccaccaacaucgugacgcgcugccucaaccgggugugcaccaacuacaugcccuacuucuucacccugcugcuccagcugugcaccuucacccgcuccacgaacagccggaucaaggccuccaugcccaccaccaucgccaagaacaccgucaagagcgugggcaaguucugccuggaggccagcuucaacuaccucaagucccccaacuucagcaagcugaucaacaucaucaucugguuccugcuccuguccgugugccugggcagccucaucuacuccacggccgcgcuggggguccugaugagcaaccucggcaugccguccuacugcaccggguaccgcgagggcuaccugaacagcaccaacgugaccaucgccacguacugcaccggcuccauccccugcagcgugugccuguccgggcucgacagccuggacaccuaccccucccuggagaccauccagaucacgaucagcuccuucaagugggaccucaccgccuucggccuggucgccgagugguuccuggccuacauccucuucacccgguucuucuacgugcuggggcuggcggccaucaugcagcucuucuucagcuacuucgccgugcacuucaucuccaacagcuggcugauguggcugaucaucaaccugguccagauggcccccaucuccgcgauggugcgcauguacaucuucuucgccagcuucuacuacguguggaagagcuacguccacgugguggacggcugcaacuccagcaccugcaugaugugcuacaagcggaaccgcgccacgcgggucgagugcaccaccaucgugaacgggguccgccgguccuucuacguguacgccaacggcggcaagggguucugcaagcuccacaacuggaacugcgugaacugcgacaccuucugcgccggcagcacguucaucuccgacgaggucgcgcgcgaccugagccugcaguucaagcggccgaucaaccccaccgaccaguccagcuacaucguggacuccgugaccgucaagaacgggagcauccaccucuacuucgacaaggccggccagaagaccuacgagcgccacucccugagccacuucgugaaccuggacaaccuccgggccaacaacacgaaggggucccugcccaucaacgugaucgucuucgacggcaagagcaagugcgaggaguccagcgccaaguccgccagcguguacuacucccagcugaugugccagcccauccuccugcuggaccaggcgcucgugagcgacgccggcgacagcgccgaggucgccgugaagauguucgacgccuacgugaacaccuucuccagcaccuucaacgucccgauggagaagcugaagacccugguggcgacggccgaggccgagcucgccaagaacgugucccuggacaacguccugagcaccuucaucuccgcggcccgccagggguucguggacagcgacguggagaccaaggacgucguggagugccucaagcugucccaccagagcgacaucgaggugaccggcgacuccugcaacaacuacaugcugacguacaacaaggucgagaacaugaccccccgggaccucggggccugcaucgacugcagcgcccgccacaucaacgcccagguggcgaagucccacaacaucgcccugaucuggaacgugaaggacuucaugagccuguccgagcagcuccggaagcagauccgcagcgccgccaagaagaacaaccugcccuucaagcugaccugcgccaccacgcgccaggucgugaacguggucaccaccaagaucgcgcucaagggcggguga

SEQ ID NO: 18193 - RNA, 5841 nt, Artificial Sequence
  SARS-CoV-2__MT470127.1__non-structural protein 3 (NSP3) CDS gc
auggcccccaccaaggugaccuucggcgacgacacggucaucgaggugcagggguacaagagcgugaacaucaccuucgagcuggacgagcgcaucgacaagguccucaacgagaagugcuccgccuacaccguggagcugggcaccgaggugaacgaguucgcgugcgucguggccgacgccgugaucaagacgcugcagccggucagcgagcuccugaccccccuggggaucgaccucgacgagugguccauggccaccuacuaccuguucgacgagagcggcgaguucaagcuggccucccacauguacugcagcuucuacccccccgacgaggacgaggaggagggggacugcgaggaggaggaguucgagccguccacccaguacgaguacggcacggaggacgacuaccagggcaagccccucgaguucggggcgaccagcgccgcccugcagcccgaggaggagcaggaggaggacuggcuggacgacgacucccagcagaccgugggccagcaggacgggagcgaggacaaccagaccacgaccauccagaccaucguggagguccagccccagcucgagauggagcugaccccgguggugcagacgaucgaggucaacuccuucagcggcuaccugaagcucaccgacaacguguacaucaagaacgccgacaucguggaggaggcgaagaaggucaagcccaccgugguggucaacgccgccaacguguaccugaagcacgggggcggcguggccggggcccugaacaaggcgaccaacaacgccaugcaggucgaguccgacgacuacaucgccacgaacggcccccucaagguggggggcagcugcguccuguccggccacaaccuggccaagcacugccuccacgugguggggcccaacgucaacaagggcgaggacauccagcugcugaagagcgccuacgagaacuucaaccagcacgaggugcuccuggcgccgcugcucuccgccgggaucuucggcgccgaccccauccacagccugcgggugugcgucgacaccgugcgcaccaacguguaccuggccgucuucgacaagaaccucuacgacaagcugguguccagcuuccuggagaugaagagcgagaagcagguggagcagaagaucgccgagauccccaaggaggaggucaagcccuucaucaccgaguccaagccgagcguggagcagcggaagcaggacgacaagaagaucaaggcgugcguggaggaggucacgaccacccucgaggagaccaaguuccugacggagaaccugcuccuguacaucgacaucaacgggaaccugcaccccgacuccgccacccucgugagcgacaucgacaucaccuuccugaagaaggacgcccccuacaucgugggcgacgucgugcaggagggcgugcugaccgccgucgugauccccacgaagaaggccgggggcaccaccgagaugcucgcgaaggcccugcgcaaggugccgaccgacaacuacaucacgaccuaccccgggcagggccugaacggguacaccgucgaggaggccaagaccgugcucaagaagugcaaguccgccuucuacauccugcccagcaucaucuccaacgagaagcaggagauccugggcaccgugagcuggaaccuccgggagaugcuggcgcacgccgaggagacgcgcaagcugaugcccgucugcguggagaccaaggccaucguguccaccauccagcggaaguacaagggcaucaagauccaggagggggucguggacuacggcgcccgcuucuacuucuacaccagcaagacgaccguggccucccugaucaacacccucaacgaccugaacgagacccuggucacgaugccgcucggguacgugacccacggccugaaccuggaggaggcggcccgguacaugcgcagccucaaggugcccgccaccgucuccgugagcucccccgacgccgugaccgccuacaacggguaccugacgagcuccagcaagacccccgaggagcacuucaucgagaccaucucccuggcgggcagcuacaaggacuggagcuacuccggccagagcacccagcucgggaucgaguuccugaagcggggcgacaaguccgucuacuacacgagcaacccgaccaccuuccaccuggacggggaggugaucaccuucgacaaccucaagacgcugcugucccuccgcgaggugcggaccaucaaggucuucaccaccguggacaacaucaaccugcacacgcagguggucgacaugagcaugaccuacggccagcaguucggccccaccuaccuggacggggccgacgugaccaagaucaagccccacaacucccacgagggcaagacguucuacgugcucccgaacgacgacacccugcgcgucgaggccuucgaguacuaccacaccaccgaccccagcuuccuggggcgguacauguccgcccucaaccacacgaagaaguggaaguacccccaggugaacggccugaccagcaucaagugggccgacaacaacugcuaccuggcgaccgcccuccugacccugcagcagaucgagcucaaguucaaccccccggcccugcaggacgccuacuaccgcgcgcgggccggggaggccgccaacuucugcgcccugauccucgcguacugcaacaagacggugggcgagcugggcgacguccgcgagaccauguccuaccuguuccagcacgccaaccucgacagcugcaagcgggugcugaacgucgugugcaagaccugcgggcagcagcagaccacccugaagggcguggaggccgucauguacauggggacgcucuccuacgagcaguucaagaagggcgugcagauccccugcaccugcgggaagcaggccaccaaguaccuggugcagcaggagagccccuucgucaugauguccgcccccccggcgcaguacgagcugaagcacggcaccuucacgugcgccagcgaguacaccggcaacuaccagugcgggcacuacaagcacaucaccuccaaggagacccucuacugcaucgacggcgcccugcugacgaagagcagcgaguacaaggggcccaucaccgacguguucuacaaggagaacuccuacaccaccacgaucaagcccgugaccuacaagcucgacggcgucgugugcaccgagaucgaccccaagcuggacaacuacuacaagaaggacaacagcuacuucaccgagcagccgaucgaccuggugcccaagcagcccuaccccaacgccuccuucgacaacuucaaguucgucugcgacaacaucaaguucgccgacgaccucaaccagcugacgggguacaagaagccggcgagccgcgagcugaaggugaccuucuuccccgaccucaacggcgacguggucgccaucgacuacaagcacuacacccccuccuucaagaagggcgccaagcugcugcacaagcccaucguguggcacgugaacaacgccaccaacaaggcgacguacaagccgaacaccuggugcauccggugccucuggagcaccaagcccgucgagaccuccaacagcuucgacgugcugaaguccgaggacgcccaggggauggacaaccuggccugcgaggaccucaagcccgugagcgaggaggucguggagaaccccacgauccagaaggacgugcuggagugcaacgucaagaccaccgagguggugggcgacaucauccugaagccggccaacaacucccucaagaucaccgaggaggucgggcacacggaccugauggccgcguacguggacaacagcucccugaccaucaagaagcccaacgagcucagccgcgugcugggccugaagacccucgccacccacgggcuggccgccgucaacuccgugcccugggacacgaucgccaacuacgcgaagccguuccugaacaagguggucagcaccaccaccaacaucgugacgcgcugccucaaccgggugugcaccaacuacaugcccuacuucuucacccugcugcuccagcugugcaccuucacccgcuccacgaacagccggaucaaggccuccaugcccaccaccaucgccaagaacaccgucaagagcgugggcaaguucugccuggaggccagcuucaacuaccucaagucccccaacuucagcaagcugaucaacaucaucaucugguuccugcuccuguccgugugccugggcagccucaucuacuccacggccgcgcuggggguccugaugagcaaccucggcaugccguccuacugcaccggguaccgcgagggcuaccugaacagcaccaacgugaccaucgccacguacugcaccggcuccauccccugcagcgugugccuguccgggcucgacagccuggacaccuaccccucccuggagaccauccagaucacgaucagcuccuucaagugggaccucaccgccuucggccuggucgccgagugguuccuggccuacauccucuucacccgguucuucuacgugcuggggcuggcggccaucaugcagcucuucuucagcuacuucgccgugcacuucaucuccaacagcuggcugauguggcugaucaucaaccugguccagauggcccccaucuccgcgauggugcgcauguacaucuucuucgccagcuucuacuacguguggaagagcuacguccacgugguggacggcugcaacuccagcaccugcaugaugugcuacaagcggaaccgcgccacgcgggucgagugcaccaccaucgugaacgggguccgccgguccuucuacguguacgccaacggcggcaagggguucugcaagcuccacaacuggaacugcgugaacugcgacaccuucugcgccggcagcacguucaucuccgacgaggucgcgcgcgaccugagccugcaguucaagcggccgaucaaccccaccgaccaguccagcuacaucguggacuccgugaccgucaagaacgggagcauccaccucuacuucgacaaggccggccagaagaccuacgagcgccacucccugagccacuucgugaaccuggacaaccuccgggccaacaacacgaaggggucccugcccaucaacgugaucgucuucgacggcaagagcaagugcgaggaguccagcgccaaguccgccagcguguacuacucccagcugaugugccagcccauccuccugcuggaccaggcgcucgugagcgacgucggcgacagcgccgagguggccgugaagauguucgacgccuacgucaacaccuucuccagcaccuucaacgugccgauggagaagcugaagacccugguggccacggcggaggccgagcucgccaagaacgucucccuggacaacgugcugagcaccuucaucuccgccgcgcgccagggguucguggacagcgacgucgagaccaaggacgugguggagugccucaagcugucccaccagagcgacaucgaggucaccggcgacuccugcaacaacuacaugcugacguacaacaagguggagaacaugaccccccgggaccucggggccugcaucgacugcagcgcccgccacaucaacgcccagguggccaagucccacaacaucgcgcugaucuggaacgucaaggacuucaugagccuguccgagcagcuccggaagcagauccgcagcgccgccaagaagaacaaccugcccuucaagcugaccugcgccaccacgcgccagguggugaacgucgugaccaccaagaucgcccucaagggcggguga

SEQ ID NO: 18194 - RNA, 5841 nt, Artificial Sequence
  SARS-CoV-2__MT470134.1__non-structural protein 3 (NSP3) CDS gc
auggcccccaccaaggugaccuucggcgacgacacggucaucgaggugcagggguacaagagcgugaacaucaccuucgagcuggacgagcgcaucgacaagguccucaacgagaagugcuccgccuacaccguggagcugggcaccgaggugaacgaguucgcgugcgucguggccgacgccgugaucaagacgcugcagccggucagcgagcuccugaccccccuggggaucgaccucgacgagugguccauggccaccuacuaccuguucgacgagagcggcgaguucaagcuggccucccacauguacugcagcuucuacccccccgacgaggacgaggaggagggggacugcgaggaggaggaguucgagccguccacccaguacgaguacggcacggaggacgacuaccagggcaagccccucgaguucggggcgaccagcgccgcccugcagcccgaggaggagcaggaggaggacuggcuggacgacgacucccagcagaccgugggccagcaggacgggagcgaggacaaccagaccacgaccauccagaccaucguggagguccagccccagcucgagauggagcugaccccgguggugcagacgaucgaggucaacuccuucagcggcuaccugaagcucaccgacaacguguacaucaagaacgccgacaucguggaggaggcgaagaaggucaagcccaccgugguggucaacgccgccaacguguaccugaagcacgggggcggcguggccggggcccugaacaaggcgaccaacaacgccaugcaggucgaguccgacgacuacaucgccacgaacggcccccucaagguggggggcagcugcguccuguccggccacaaccuggccaagcacugccuccacgugguggggcccaacgucaacaagggcgaggacauccagcugcugaagagcgccuacgagaacuucaaccagcacgaggugcuccuggcgccgcugcucuccgccgggaucuucggcgccgaccccauccacagccugcgggugugcgucgacaccgugcgcaccaacguguaccuggccgucuucgacaagaaccucuacgacaagcugguguccagcuuccuggagaugaagagcgagaagcagguggagcagaagaucgccgagauccccaaggaggaggucaagcccuucaucaccgaguccaagccgagcguggagcagcggaagcaggacgacaagaagaucaaggcgugcguggaggaggucacgaccacccucgaggagaccaaguuccugacggagaaccugcuccuguacaucgacaucaacgggaaccugcaccccgacuccgccacccucgugagcgacaucgacaucaccuuccugaagaaggacgcccccuacaucgugggcgacgucgugcaggagggcgugcugaccgccgucgugauccccacgaagaaggccgggggcaccaccgagaugcucgcgaaggcccugcgcaaggugccgaccgacaacuacaucacgaccuaccccgggcagggccugaacggguacaccgucgaggaggccaagaccgugcucaagaagugcaaguccgccuucuacauccugcccagcaucaucuccaacgagaagcaggagauccugggcaccgugagcuggaaccuccgggagaugcuggcgcacgccgaggagacgcgcaagcugaugcccgucugcguggagaccaaggccaucguguccaccauccagcggaaguacaagggcaucaagauccaggagggggucguggacuacggcgcccgcuucuacuucuacaccagcaagacgaccguggccucccugaucaacacccucaacgaccugaacgagacccuggucacgaugccgcucggguacgugacccacggccugaaccuggaggaggcggcccgguacaugcgcagccucaaggugcccgccaccgucuccgugagcucccccgacgccgugaccgccuacaacggguaccugacgagcuccagcaagacccccgaggagcacuucaucgagaccaucucccuggcgggcagcuacaaggacuggagcuacuccggccagagcacccagcucgggaucgaguuccugaagcggggcgacaaguccgucuacuacacgagcaacccgaccaccuuccaccuggacggggaggugaucaccuucgacaaccucaagacgcugcugucccuccgcgaggugcggaccaucaaggucuucaccaccguggacaacaucaaccugcacacgcagguggucgacaugagcaugaccuacggccagcaguucggccccaccuaccuggacggggccgacgugaccaagaucaagccccacaacucccacgagggcaagacguucuacgugcucccgaacgacgacacccugcgcgucgaggccuucgaguacuaccacaccaccgaccccagcuuccuggggcgguacauguccgcccucaaccacacgaagaaguggaaguacccccaggugaacggccugaccagcaucaagugggccgacaacaacugcuaccuggcgaccgcccuccugacccugcagcagaucgagcucaaguucaaccccccggcccugcaggacgccuacuaccgcgcgcgggccggggaggccgccaacuucugcgcccugauccucgcguacugcaacaagacggugggcgagcugggcgacguccgcgagaccauguccuaccuguuccagcacgccaaccucgacagcugcaagcgggugcugaacgucgugugcaagaccugcgggcagcagcagaccacccugaagggcguggaggccgucauguacauggggacgcucuccuacgagcaguucaagaagggcgugcagauccccugcaccugcgggaagcaggccaccaaguaccuggugcagcaggagagccccuucgucaugauguccgcccccccggcgcaguacgagcugaagcacggcaccuucacgugcgccagcgaguacaccggcaacuaccagugcgggcacuacaagcacaucaccuccaaggagacccucuacugcaucgacggcgcccugcugacgaagagcagcgaguacaaggggcccaucaccgacguguucuacaaggagaacuccuacaccaccacgaucaagcccgugaccuacaagcucgacggcgucgugugcaccgagaucgaccccaagcuggacaacuacuacaagaaggacaacagcuacuucaccgagcagccgaucgaccuggugcccaaccagcccuaccccaacgccuccuucgacaacuucaaguucgucugcgacaacaucaaguucgccgacgaccucaaccagcugacgggguacaagaagccggcgagccgcgagcugaaggugaccuucuuccccgaccucaacggcgacguggucgccaucgacuacaagcacuacacccccuccuucaagaagggcgccaagcugcugcacaagcccaucguguggcacgugaacaacgccaccaacaaggcgacguacaagccgaacaccuggugcauccggugccucuggagcaccaagcccgucgagaccuccaacagcuucgacgugcugaaguccgaggacgcccaggggauggacaaccuggccugcgaggaccucaagcccgugagcgaggaggucguggagaaccccacgauccagaaggacgugcuggagugcaacgucaagaccaccgagguggugggcgacaucauccugaagccggccaacaacucccucaagaucaccgaggaggucgggcacacggaccugauggccgcguacguggacaacagcucccugaccaucaagaagcccaacgagcucagccgcgugcugggccugaagacccucgccacccacgggcuggccgccgucaacuccgugcccugggacacgaucgccaacuacgcgaagccguuccugaacaagguggucagcaccaccaccaacaucgugacgcgcugccucaaccgggugugcaccaacuacaugcccuacuucuucacccugcugcuccagcugugcaccuucacccgcuccacgaacagccggaucaaggccuccaugcccaccaccaucgccaagaacaccgucaagagcgugggcaaguucugccuggaggccagcuucaacuaccucaagucccccaacuucagcaagcugaucaacaucaucaucugguuccugcuccugaucgugugccugggcucccucaucuacagcacggccgcgcuggggguccugauguccaaccucggcaugccgagcuacugcaccggguaccgcgagggcuaccugaacuccaccaacgugaccaucgccacguacugcaccggcagcauccccugcuccgugugccugagcgggcucgacucccuggacaccuaccccagccuggagaccauccagaucacgaucuccagcuucaagugggaccucaccgccuucggccuggucgccgagugguuccuggccuacauccucuucacccgguucuucuacgugcuggggcuggcggccaucaugcagcucuucuucuccuacuucgccgugcacuucaucagcaacuccuggcugauguggcugaucaucaaccugguccagauggcccccaucagcgcgauggugcgcauguacaucuucuucgccuccuucuacuacguguggaagagcuacguccacgugguggacggcugcaacagcuccaccugcaugaugugcuacaagcggaaccgcgccacgcgggucgagugcaccaccaucgugaacgggguccgccggagcuucuacguguacgccaacggcggcaagggguucugcaagcuccacaacuggaacugcgugaacugcgacaccuucugcgccggcuccacguucaucagcgacgaggucgcgcgcgaccugucccugcaguucaagcggccgaucaaccccaccgaccagagcuccuacaucguggacagcgugaccgucaagaacggguccauccaccucuacuucgacaaggccggccagaagaccuacgagcgccacagccugucccacuucgugaaccuggacaaccuccgggccaacaacacgaaggggagccugcccaucaacgugaucgucuucgacggcaaguccaagugcgaggagagcuccgccaagagcgccuccguguacuacagccagcugaugugccagcccauccuccugcuggaccaggcgcucguguccgacgucggcgacagcgccgagguggccgugaagauguucgacgccuacgucaacaccuucagcuccaccuucaacgugccgauggagaagcugaagacccugguggccacggcggaggccgagcucgccaagaacgucagccuggacaacgugcuguccaccuucaucagcgccgcgcgccagggguucguggacuccgacgucgagaccaaggacgugguggagugccucaagcugagccaccaguccgacaucgaggucaccggcgacagcugcaacaacuacaugcugacguacaacaagguggagaacaugaccccccgggaccucggggccugcaucgacugcuccgcccgccacaucaacgcccagguggccaagagccacaacaucgcgcugaucuggaacgucaaggacuucaugucccugagcgagcagcuccggaagcagauccgcuccgccgccaagaagaacaaccugcccuucaagcugaccugcgccaccacgcgccagguggugaacgucgugaccaccaagaucgcccucaagggcggguga

SEQ ID NO: 18195 - RNA, 5841 nt, Artificial Sequence
  SARS-CoV-2__MT459840.1__non-structural protein 3 (NSP3) CDS gc
auggcccccaccaaggugaccuucggcgacgacacggucaucgaggugcagggguacaagagcgugaacaucaccuucgagcuggacgagcgcaucgacaagguccucaacgagaagugcuccgccuacaccguggagcugggcaccgaggugaacgaguucgcgugcgucguggccgacgccgugaucaagacgcugcagccggucagcgagcuccugaccccccuggggaucgaccucgacgagugguccauggccaccuacuaccuguucgacgagagcggcgaguucaagcuggccucccacauguacugcagcuucuacccccccgacgaggacgaggaggagggggacugcgaggaggaggaguucgagccguccacccaguacgaguacggcacggaggacgacuaccagggcaagccccucgaguucggggcgaccagcgccgcccugcagcccgaggaggagcaggaggaggacuggcuggacgacgacucccagcagaccgugggccagcaggacgggagcgaggacaaccagaccacgaccauccagaccaucguggagguccagccccagcucgagauggagcugaccccgguggugcagacgaucgaggucaacuccuucagcggcuaccugaagcucaccgacaacguguacaucaagaacgccgacaucguggaggaggcgaagaaggucaagcccaccgugguggucaacgccgccaacguguaccugaagcacgggggcggcguggccggggcccugaacaaggcgaccaacaacgccaugcaggucgaguccgacgacuacaucgccacgaacggcccccucaagguggggggcagcugcguccuguccggccacaaccuggccaagcacugccuccacgugguggggcccaacgucaacaagggcgaggacauccagcugcugaagagcgccuacgagaacuucaaccagcacgaggugcuccuggcgccgcugcucuccgccgggaucuucggcgccgaccccauccacagccugcgggugugcgucgacaccgugcgcaccaacguguaccuggccgucuucgacaagaaccucuacgacaagcugguguccagcuuccuggagaugaagagcgagaagcagguggagcagaagaucgccgagauccccaaggaggaggucaagcccuucaucaccgaguccaagccgagcguggagcagcggaagcaggacgacaagaagaucaaggcgugcguggaggaggucacgaccacccucgaggagaccaaguuccugacggagaaccugcuccuguacaucgacaucaacgggaaccugcaccccgacuccgccacccucgugagcgacaucgacaucaccuuccugaagaaggacgcccccuacaucgugggcgacgucgugcaggagggcgugcugaccgccgucgugauccccacgaagaaggccgggggcaccaccgagaugcucgcgaaggcccugcgcaaggugccgaccgacaacuacaucacgaccuaccccgggcagggccugaacggguacaccgucgaggaggccaagaccgugcucaagaagugcaaguccgccuucuacauccugcccagcaucaucuccaacgagaagcaggagauccugggcaccgugagcuggaaccuccgggagaugcuggcgcacgccgaggagacgcgcaagcugaugcccgucugcguggagaccaaggccaucguguccaccauccagcggaaguacaagggcaucaagauccaggagggggucguggacuacggcgcccgcuucuacuucuacaccagcaagacgaccguggccucccugaucaacacccucaacgaccugaacgagacccuggucacgaugccgcucggguacgugacccacggccugaaccuggaggaggcggcccgguacaugcgcagccucaaggugcccgccaccgucuccgugagcucccccgacgccgugaccgccuacaacggguaccugacgagcuccagcaagacccccgaggagcacuucaucgagaccaucucccuggcgggcagcuacaaggacuggagcuacuccggccagagcacccagcucgggaucgaguuccugaagcggggcgacaaguccgucuacuacacgagcaacccgaccaccuuccaccuggacggggaggugaucaccuucgacaaccucaagacgcugcugucccuccgcgaggugcggaccaucaaggucuucaccaccguggacaacaucaaccugcacacgcagguggucgacaugagcaugaccuacggccagcaguucggccccaccuaccuggacggggccgacgugaccaagaucaagccccacaacucccacgagggcaagacguucuacgugcucccgaacgacgacacccugcgcgucgaggccuucgaguacuaccacaccaccgaccccagcuuccuggggcgguacauguccgcccucaaccacacgaagaacuggaaguacccccaggugaacggccugaccagcaucaagugggccgacaacaacugcuaccuggcgaccgcccuccugacccugcagcagaucgagcucaaguucaaccccccggcccugcaggacgccuacuaccgcgcgcgggccggggaggccgccaacuucugcgcccugauccucgcguacugcaacaagacggugggcgagcugggcgacguccgcgagaccauguccuaccuguuccagcacgccaaccucgacagcugcaagcgggugcugaacgucgugugcaagaccugcgggcagcagcagaccacccugaagggcguggaggccgucauguacauggggacgcucuccuacgagcaguucaagaagggcgugcagauccccugcaccugcgggaagcaggccaccaaguaccuggugcagcaggagagccccuucgucaugauguccgcccccccggcgcaguacgagcugaagcacggcaccuucacgugcgccagcgaguacaccggcaacuaccagugcgggcacuacaagcacaucaccuccaaggagacccucuacugcaucgacggcgcccugcugacgaagagcagcgaguacaaggggcccaucaccgacguguucuacaaggagaacuccuacaccaccacgaucaagcccgugaccuacaagcucgacggcgucgugugcaccgagaucgaccccaagcuggacaacuacuacaagaaggacaacagcuacuucaccgagcagccgaucgaccuggugcccaaccagcccuaccccaacgccuccuucgacaacuucaaguucgucugcgacaacaucaaguucgccgacgaccucaaccagcugacgggguacaagaagccggcgagccgcgagcugaaggugaccuucuuccccgaccucaacggcgacguggucgccaucgacuacaagcacuacacccccuccuucaagaagggcgccaagcugcugcacaagcccaucguguggcacgugaacaacgccaccaacaaggcgacguacaagccgaacaccuggugcauccggugccucuggagcaccaagcccgucgagaccuccaacagcuucgacgugcugaaguccgaggacgcccaggggauggacaaccuggccugcgaggaccucaagcccgugagcgaggaggucguggagaaccccacgauccagaaggacgugcuggagugcaacgucaagaccaccgagguggugggcgacaucauccugaagccggccaacaacucccucaagaucaccgaggaggucgggcacacggaccugauggccgcguacguggacaacagcucccugaccaucaagaagcccaacgagcucagccgcgugcugggccugaagacccucgccacccacgggcuggccgccgucaacuccgugcccugggacacgaucgccaacuacgcgaagccguuccugaacaagguggucagcaccaccaccaacaucgugacgcgcugccucaaccgggugugcaccaacuacaugcccuacuucuucacccugcugcuccagcugugcaccuucacccgcuccacgaacagccggaucaaggccuccaugcccaccaccaucgccaagaacaccgucaagagcgugggcaaguucugccuggaggccagcuucaacuaccucaagucccccaacuucagcaagcugaucaacaucaucaucugguuccugcuccuguccgugugccugggcagccucaucuacuccacggccgcgcuggggguccugaugagcaaccucggcaugccguccuacugcaccggguaccgcgagggcuaccugaacagcaccaacgugaccaucgccacguacugcaccggcuccauccccugcagcgugugccuguccgggcucgacagccuggacaccuaccccucccuggagaccauccagaucacgaucagcuccuucaagugggaccucaccgccuucggccuggucgccgagugguuccuggccuacauccucuucacccgguucuucuacgugcuggggcuggcggccaucaugcagcucuucuucagcuacuucgccgugcacuucaucuccaacagcuggcugauguggcugaucaucaaccugguccagauggcccccaucuccgcgauggugcgcauguacaucuucuucgccagcuucuacuacguguggaagagcuacguccacgugguggacggcugcaacuccagcaccugcaugaugugcuacaagcggaaccgcgccacgcgggucgagugcaccaccaucgugaacgggguccgccgguccuucuacguguacgccaacggcggcaagggguucugcaagcuccacaacuggaacugcgugaacugcgacaccuucugcgccggcagcacguucaucuccgacgaggucgcgcgcgaccugagccugcaguucaagcggccgaucaaccccaccgaccaguccagcuacaucguggacuccgugaccgucaagaacgggagcauccaccucuacuucgacaaggccggccagaagaccuacgagcgccacucccugagccacuucgugaaccuggacaaccuccgggccaacaacacgaaggggucccugcccaucaacgugaucgucuucgacggcaagagcaagugcgaggaguccagcgccaaguccgccagcguguacuacucccagcugaugugccagcccauccuccugcuggaccaggcgcucgugagcgacgucggcgacagcgccgagguggccgugaagauguucgacgccuacgucaacaccuucuccagcaccuucaacgugccgauggagaagcugaagacccugguggccacggcggaggccgagcucgccaagaacgucucccuggacaacgugcugagcaccuucaucuccgccgcgcgccagggguucguggacagcgacgucgagaccaaggacgugguggagugccucaagcugucccaccagagcgacaucgaggucaccggcgacuccugcaacaacuacaugcugacguacaacaagguggagaacaugaccccccgggaccucggggccugcaucgacugcagcgcccgccacaucaacgcccagguggccaagucccacaacaucgcgcugaucuggaacgucaaggacuucaugagccuguccgagcagcuccggaagcagauccgcagcgccgccaagaagaacaaccugcccuucaagcugaccugcgccaccacgcgccagguggugaacgucgugaccaccaagaucgcccucaagggcggguga

SEQ ID NO: 18196 - RNA, 5841 nt, Artificial Sequence
  SARS-CoV-2__MT459849.1__non-structural protein 3 (NSP3) CDS gc
auggcccccaccaaggugaccuucggcgacgacacggucaucgaggugcagggguacaagagcgugaacaucaccuucgagcuggacgagcgcaucgacaagguccucaacgagaagugcuccgccuacaccguggagcugggcaccgaggugaacgaguucgcgugcgucguggccgacgccgugaucaagacgcugcagccggucagcgagcuccugaccccccuggggaucgaccucgacgagugguccauggccaccuacuaccuguucgacgagagcggcgaguucaagcuggccucccacauguacugcagcuucuacccccccgacgaggacgaggaggagggggacugcgaggaggaggaguucgagccguccacccaguacgaguacggcacggaggacgacuaccagggcaagccccucgaguucggggcgaccagcgccgcccugcagcccgaggaggagcaggaggaggacuggcuggacgacgacucccagcagaccgugggccagcaggacgggagcgaggacaaccagaccacgaccauccagaccaucguggagguccagccccagcucgagauggagcugaccccgguggugcagacgaucgaggucaacuccuucagcggcuaccugaagcucaccgacaacguguacaucaagaacgccgacaucguggaggaggcgaagaaggucaagcccaccgugguggucaacgccgccaacguguaccugaagcacgggggcggcguggccggggcccugaacaaggcgaccaacaacgccaugcaggucgaguccgacgacuacaucgccacgaacggcccccucaagguggggggcagcugcguccuguccggccacaaccuggccaagcacugccuccacgugguggggcccaacgucaacaagggcgaggacauccagcugcugaagagcgccuacgagaacuucaaccagcacgaggugcuccuggcgccgcugcucuccgccgggaucuucggcgccgaccccauccacagccugcgggugugcgucgacaccgugcgcaccaacguguaccuggccgucuucgacaagaaccucuacgacaagcugguguccagcuuccuggagaugaagagcgagaagcagguggagcagaagaucgccgagauccccaaggaggaggucaagcccuucaucaccgaguccaagccgagcguggagcagcggaagcaggacgacaagaagaucaaggcgugcguggaggaggucacgaccacccucgaggagaccaaguuccugacggagaaccugcuccuguacaucgacaucaacgggaaccugcaccccgacuccgccacccucgugagcgacaucgacaucaccuuccugaagaaggacgcccccuacaucgugggcgacgucgugcaggagggcgugcugaccgccgucgugauccccacgaagaaggccgggggcaccaccgagaugcucgcgaaggcccugcgcaaggugccgaccgacaacuacaucacgaccuaccccgggcagggccugaacggguacaccgucgaggaggccaagaccgugcucaagaagugcaaguccgccuucuacauccugcccagcaucaucuccaacgagaagcaggagauccugggcaccgugagcuggaaccuccgggagaugcuggcgcacgccgaggagacgcgcaagcugaugcccgucugcguggagaccaaggccaucguguccaccauccagcggaaguacaagggcaucaagauccaggagggggucguggacuacggcgcccgcuucuacuucuacaccagcaagacgaccguggccucccugaucaacacccucaacgaccugaacgagacccuggucacgaugccgcucggguacgugacccacggccugaaccuggaggaggcggcccgguacaugcgcagccucaaggugcccgccaccgucuccgugagcucccccgacgccgugaccgccuacaacggguaccugacgagcuccagcaagacccccgaggagcacuucaucgagaccaucucccuggcgggcagcuacaaggacuggagcuacuccggccagagcacccagcucgggaucgaguuccugaagcggggcgacaaguccgucuacuacacgagcaacccgaccaccuuccaccuggacggggaggugaucaccuucgacaaccucaagacgcugcugucccuccgcgaggugcggaccaucaaggucuucaccaccguggacaacaucaaccugcacacgcagguggucgacaugagcaugaccuacggccagcaguucggccccaccuaccuggacggggccgacgugaccaagaucaagccccacaacucccacgagggcaagacguucuacgugcucccgaacgacgacacccugcgcgucgaggccuucgaguacuaccacaccaccgaccccagcuuccuggggcgguacauguccgcccucaaccacacgaagaaguggaaguacccccaggugaacggccugaccagcaucaagugggccgacaacaacugcuaccuggcgaccgcccuccugacccugcagcagaucgagcucaaguucaaccccccggcccugcaggacgccuacuaccgcgcgcgggccggggaggccgccaacuucugcgcccugauccucgcguacugcaacaagacggugggcgagcugggcgacguccgcgagaccauguccuaccuguuccagcacgccaaccucgacagcugcaagcgggugcugaacgucgugugcaagaccugcgggcagcagcagaccacccugaagggcguggaggccgucauguacauggggacgcucuccuacgagcaguucaagaagggcgugcagauccccugcaccugcgggaagcaggccaccaaguaccuggugcagcaggagagccccuucgucaugauguccgcccccccggcgcaguacgagcugaagcacggcaccuucacgugcgccagcgaguacaccggcaacuaccagugcgggcacuacaagcacaucaccuccaaggagacccucuacugcaucgacggcgcccugcugacgaagagcagcgaguacaaggggcccaucaccgacguguucuacaaggagaacuccuacaccaccacgaucaagcccgugaccuacaagcucgacggcgucgugugcaccgagaucgaccccaagcuggacaacuacuacaagaaggacaacagcuacuucaccgagcagccgaucgaccuggugcccaaccagcccuaccccaacgccuccuucgacaacuucaaguucgucugcgacaacaucaaguucgccgacgaccucaaccagcugacgggguacaagaagccggcgagccgcgagcugaaggugaccuucuuccccgaccucaacggcgacguggucgccaucgacuacaagcacuacacccccuccuucaagaagggcgccaagcugcugcacaagcccaucguguggcacgugaacaacgccaccaacaaggcgacguacaagccgaacaccuggugcauccggugccucuggagccgcaagcccgucgagaccuccaacagcuucgacgugcugaaguccgaggacgcccaggggauggacaaccuggccugcgaggaccucaagcccgugagcgaggaggucguggagaaccccaccauccagaaggacgugcuggagugcaacgucaagacgaccgagguggugggcgacaucauccugaagccggccaacaacucccucaagaucaccgaggaggucgggcacaccgaccugauggccgcguacguggacaacagcucccugacgaucaagaagcccaacgagcucagccgcgugcugggccugaagacccucgccacccacgggcuggccgccgucaacuccgugcccugggacaccaucgccaacuacgcgaagccguuccugaacaagguggucagcacgaccaccaacaucgugacccggugccucaaccgcgugugcacgaacuacaugcccuacuucuucacccugcugcuccagcugugcaccuucacccgguccaccaacagccgcaucaaggccuccaugcccacgaccaucgccaagaacaccgucaagagcgugggcaaguucugccuggaggccagcuucaacuaccucaagucccccaacuucagcaagcugaucaacaucaucaucugguuccugcuccuguccgugugccugggcagccucaucuacuccaccgccgcgcuggggguccugaugagcaaccucggcaugccguccuacugcacgggguaccgggagggcuaccugaacagcaccaacgugaccaucgccaccuacugcacgggcuccauccccugcagcgugugccuguccgggcucgacagccuggacaccuaccccucccuggagaccauccagaucaccaucagcuccuucaagugggaccucacggccuucggccuggucgccgagugguuccuggccuacauccucuucacccgcuucuucuacgugcuggggcuggcggccaucaugcagcucuucuucagcuacuucgccgugcacuucaucuccaacagcuggcugauguggcugaucaucaaccugguccagauggcccccaucuccgcgauggugcggauguacaucuucuucgccagcuucuacuacguguggaagagcuacguccacgugguggacggcugcaacuccagcaccugcaugaugugcuacaagcgcaaccgggccacccgcgucgagugcacgaccaucgugaacgggguccggcgcuccuucuacguguacgccaacggcggcaagggguucugcaagcuccacaacuggaacugcgugaacugcgacaccuucugcgccggcagcaccuucaucuccgacgaggucgcgcgggaccugagccugcaguucaagcgcccgaucaaccccacggaccaguccagcuacaucguggacuccgugaccgucaagaacgggagcauccaccucuacuucgacaaggccggccagaagaccuacgagcggcacucccugagccacuucgugaaccuggacaaccuccgcgccaacaacaccaaggggucccugcccaucaacgugaucgucuucgacggcaagagcaagugcgaggaguccagcgccaaguccgccagcguguacuacucccagcugaugugccagcccauccuccugcuggaccaggcgcucgugagcgacgucggcgacagcgccgagguggccgugaagauguucgacgccuacgucaacacguucuccagcaccuucaacgugccgauggagaagcugaagacccugguggccaccgcggaggccgagcucgccaagaacgucucccuggacaacgugcugagcacguucaucuccgccgcgcggcagggguucguggacagcgacgucgagaccaaggacgugguggagugccucaagcugucccaccagagcgacaucgaggucaccggcgacuccugcaacaacuacaugcugaccuacaacaagguggagaacaugacgccccgcgaccucggggccugcaucgacugcagcgcccggcacaucaacgcccagguggccaagucccacaacaucgcgcugaucuggaacgucaaggacuucaugagccuguccgagcagcuccgcaagcagauccgcagcgccgccaagaagaacaaccugcccuucaagcugaccugcgccaccacccggcagguggugaacgucgugacgaccaagaucgcccucaagggcggguga

SEQ ID NO: 18197 - RNA, 5841 nt, Artificial Sequence
  SARS-CoV-2__MT459923.1__non-structural protein 3 (NSP3) CDS gc
auggcccccaccaaggugaccuucggcgacgacacggucaucgaggugcagggguacaagagcgugaacaucaccuucgagcuggacgagcgcaucgacaagguccucaacgagaagugcuccgccuacaccguggagcugggcaccgaggugaacgaguucgcgugcgucguggccgacgccgugaucaagacgcugcagccggucagcgagcuccugaccccccuggggaucgaccucgacgagugguccauggccaccuacuaccuguucgacgagagcggcgaguucaagcuggccucccacauguacugcagcuucuacccccccgacgaggacgaggaggagggggacugcgaggaggaggaguucgagccguccacccaguacgaguacggcacggaggacgacuaccagggcaagccccucgaguucggggcgaccagcgccgcccugcagcccgaggaggagcaggaggaggacuggcuggacgacgacucccagcagaccgugggccagcaggacgggagcgaggacaaccagaccacgaccauccagaccaucguggagguccagccccagcucgagauggagcugaccccgguggugcagacgaucgaggucaacuccuucagcggcuaccugaagcucaccgacaacguguacaucaagaacgccgacaucguggaggaggcgaagaaggucaagcccaccgugguggucaacgccgccaacguguaccugaagcacgggggcggcguggccggggcccugaacaaggcgaccaacaacgccaugcaggucgaguccgacgacuacaucgccacgaacggcccccucaagguggggggcagcugcguccuguccggccacaaccuggccaagcacugccuccacgugguggggcccaacgucaacaagggcgaggacauccagcugcugaagagcgccuacgagaacuucaaccagcacgaggugcuccuggcgccgcugcucuccgccgggaucuucggcgccgaccccauccacagccugcgggugugcgucgacaccgugcgcaccaacguguaccuggccgucuucgacaagaaccucuacgacaagcugguguccagcuuccuggagaugaagagcgagaagcagguggagcagaagaucgccgagauccccaaggaggaggucaagcccuucaucaccgaguccaagccgagcguggagcagcggaagcaggacgacaagaagaucaaggcgugcguggaggaggucacgaccacccucgaggagaccaaguuccugacggagaaccugcuccuguacaucgacaucaacgggaaccugcaccccgacuccgccacccucgugagcgacaucgacaucaccuuccugaagaaggacgcccccuacaucgugggcgacgucgugcaggagggcgugcugaccgccgucgugauccccacgaagaaggccgggggcaccaccgagaugcucgcgaaggcccugcgcaaggugccgaccgacaacuacaucacgaccuaccccgggcagggccugaacggguacaccgucgaggaggccaagaccgugcucaagaagugcaaguccgccuucuacauccugcccagcaucaucuccaacgagaagcaggagauccugggcaccgugagcuggaaccuccgggagaugcuggcgcacgccgaggagacgcgcaagcugaugcccgucugcguggagaccaaggccaucguguccaccauccagcggaaguacaagggcaucaagauccaggagggggucguggacuacggcgcccgcuucuacuucuacaccagcaagacgaccguggccucccugaucaacacccucaacgaccugaacgagacccuggucacgaugccgcucggguacgugacccacggccugaaccuggaggaggcggcccgguacaugcgcagccucaaggugcccgccaccgucuccgugagcucccccgacgccgugaccgccuacaacggguaccugacgagcuccagcaagacccccgaggagcacuucaucgagaccaucucccuggcgggcagcuacaaggacuggagcuacuccggccagagcacccagcucgggaucgaguuccugaagcggggcgacaaguccgucuacuacacgagcaacccgaccaccuuccaccuggacggggaggugaucaccuucgacaaccucaagacgcugcugucccuccgcgaggugcggaccaucaaggucuucaccaccguggacaacaucaaccugcacacgcagguggucgacaugagcaugaccuacggccagcaguucggccccaccuaccuggacggggccgacgugaccaagaucaagccccacaacucccacgagggcaagacguucuacgugcucccgaacgacgacacccugcgcgucgaggccuucgaguacuaccacaccaccgaccccagcuuccuggggcgguacauguccgcccucaaccacacgaagaaguggaaguacccccaggugaacggccugaccagcaucaagugggccgacaacaacugcuaccuggcgaccgcccuccugacccugcagcagaucgagcucaaguucaaccccccggcccugcaggacgccuacuaccgcgcgcgggccggggaggccgccaacuucugcgcccugauccucgcguacugcaacaagacggugggcgagcugggcgacguccgcgagaccauguccuaccuguuccagcacgccaaccucgacagcugcaagcgggugcugaacgucgugugcaagaccugcgggcagcagcagaccacccugaagggcguggaggccgucauguacauggggacgcucuccuacgagcaguucaagaagggcgugcagauccccugcaccugcgggaagcaggccaccaaguaccuggugcagcaggagagccccuucgucaugauguccgcccccccggcgcaguacgagcugaagcacggcaccuucacgugcgccagcgaguacaccggcaacuaccagugcgggcacuacaagcacaucaccuccaaggagacccucuacugcaucgacggcgcccugcugacgaagagcagcggguacaagggccccaucaccgacguguucuacaaggagaacuccuacaccaccacgaucaagcccgugaccuacaagcucgacggggucgugugcaccgagaucgaccccaagcuggacaacuacuacaagaaggacaacagcuacuucaccgagcagccgaucgaccuggugcccaaccagcccuaccccaacgccuccuucgacaacuucaaguucgucugcgacaacaucaaguucgccgacgaccucaaccagcugacgggcuacaagaagccggcgagccgcgagcugaaggugaccuucuuccccgaccucaacggcgacguggucgccaucgacuacaagcacuacacccccuccuucaagaagggggccaagcugcugcacaagcccaucguguggcacgugaacaacgccaccaacaaggcgacguacaagccgaacaccuggugcauccggugccucuggagcaccaagcccgucgagaccuccaacagcuucgacgugcugaaguccgaggacgcccagggcauggacaaccuggccugcgaggaccucaagcccgugagcgaggaggucguggagaaccccacgauccagaaggacgugcuggagugcaacgucaagaccaccgagguggugggggacaucauccugaagccggccaacaacucccucaagaucaccgaggaggucggccacacggaccugauggccgcguacguggacaacagcucccugaccaucaagaagcccaacgagcucagccgcgugcuggggcugaagacccucgccacccacggccuggccgccgucaacuccgugcccugggacacgaucgccaacuacgcgaagccguuccugaacaagguggucagcaccaccaccaacaucgugacgcgcugccucaaccgggugugcaccaacuacaugcccuacuucuucacccugcugcuccagcugugcaccuucacccgcuccacgaacagccggaucaaggccuccaugcccaccaccaucgccaagaacaccgucaagagcgugggcaaguucugccuggaggccagcuucaacuaccucaagucccccaacuucagcaagcugaucaacaucaucaucugguuccugcuccuguccgugugccuggggagccucaucuacuccacggccgcgcugggcguccugaugagcaaccucgggaugccguccuacugcaccggcuaccgcgagggcuaccugaacagcaccaacgugaccaucgccacguacugcaccggguccauccccugcagcgugugccuguccggccucgacagccuggacaccuaccccucccuggagaccauccagaucacgaucagcuccuucaagugggaccucaccgccuucgggcuggucgccgagugguuccuggccuacauccucuucacccgguucuucuacgugcugggccuggcggccaucaugcagcucuucuucagcuacuucgccgugcacuucaucuccaacagcuggcugauguggcugaucaucaaccugguccagauggcccccaucuccgcgauggugcgcauguacaucuucuucgccagcuucuacuacguguggaagagcuacguccacgugguggacgggugcaacuccagcaccugcaugaugugcuacaagcggaaccgcgccacgcgggucgagugcaccaccaucgugaacggcguccgccgguccuucuacguguacgccaacggcgggaagggcuucugcaagcuccacaacuggaacugcgugaacugcgacaccuucugcgccgggagcacguucaucuccgacgaggucgcgcgcgaccugagccugcaguucaagcggccgaucaaccccaccgaccaguccagcuacaucguggacuccgugaccgucaagaacggcagcauccaccucuacuucgacaaggccgggcagaagaccuacgagcgccacucccugagccacuucgugaaccuggacaaccuccgggccaacaacacgaagggcucccugcccaucaacgugaucgucuucgacggcaagagcaagugcgaggaguccagcgccaaguccgccagcguguacuacucccagcugaugugccagcccauccuccugcuggaccaggcgcucgugagcgacgucggggacagcgccgagguggccgugaagauguucgacgccuacgucaacaccuucuccagcaccuucaacgugccgauggagaagcugaagacccugguggccacggcgggcgccgagcucgccaagaacgucucccuggacaacgugcugagcaccuucaucuccgccgcgcgccagggguucguggacagcgacgucgagaccaaggacgugguggagugccucaagcugucccaccagagcgacaucgaggucaccggcgacuccugcaacaacuacaugcugacguacaacaagguggagaacaugaccccccgggaccucggggccugcaucgacugcagcgcccgccacaucaacgcccagguggccaagucccacaacaucgcgcugaucuggaacgucaaggacuucaugagccuguccgagcagcuccggaagcagauccgcagcgccgccaagaagaacaaccugcccuucaagcugaccugcgccaccacgcgccagguggugaacgucgugaccaccaagaucgcccucaagggcggcuga

SEQ ID NO: 18198 - RNA, 5841 nt, Artificial Sequence
  SARS-CoV-2__MT461613.1__non-structural protein 3 (NSP3) CDS gc
auggcccccaccaaggugaccuucggcgacgacacggucaucgaggugcagggguacaagagcgugaacaucaccuucgagcuggacgagcgcaucgacaagguccucaacgagaagugcuccgccuacaccguggagcugggcaccgaggugaacgaguucgcgugcgucguggccgacgccgugaucaagacgcugcagccggucagcgagcuccugaccccccuggggaucgaccucgacgagugguccauggccaccuacuaccuguucgacgagagcggcgaguucaagcuggccucccacauguacugcagcuucuacccccccgacgaggacgaggaggagggggacugcgaggaggaggaguucgagccguccacccaguacgaguacggcacggaggacgacuaccagggcaagccccucgaguucggggcgaccagcgccgcccugcagcccgaggaggagcaggaggaggacuggcuggacgacgacucccagcagaccgugggccagcaggacgggagcgaggacaaccagaccacgaccauccagaccaucguggagguccagccccagcucgagauggagcugaccccgguggugcagacgaucgaggucaacuccuucagcggcuaccugaagcucaccgacaacguguacaucaagaacgccgacaucguggaggaggcgaagaaggucaagcccaccgugguggucaacgccgccaacguguaccugaagcacgggggcggcguggccggggcccugaacaaggcgaccaacaacgccaugcaggucgaguccgacgacuacaucgccacgaacggcccccuccggguggggggcagcugcguccuguccggccacaaccuggccaagcacugccuccacgugguggggcccaacgucaacaagggcgaggacauccagcugcugaagagcgccuacgagaacuucaaccagcacgaggugcuccuggcgccgcugcucuccgccgggaucuucggcgccgaccccauccacagccugcgcgugugcgucgacaccgugcggaccaacguguaccuggccgucuucgacaagaaccucuacgacaagcugguguccagcuuccuggagaugaagagcgagaagcagguggagcagaagaucgccgagauccccaaggaggaggucaagcccuucaucaccgaguccaagccgagcguggagcagcgcaagcaggacgacaagaagaucaaggcgugcguggaggaggucacgaccacccucgaggagaccaaguuccugacggagaaccugcuccuguacaucgacaucaacgggaaccugcaccccgacuccgccacccucgugagcgacaucgacaucaccuuccugaagaaggacgcccccuacaucgugggcgacgucgugcaggagggcgugcugaccgccgucgugauccccacgaagaaggccgggggcaccaccgagaugcucgcgaaggcccugcggaaggugccgaccgacaacuacaucacgaccuaccccgggcagggccugaacggguacaccgucgaggaggccaagaccgugcucaagaagugcaaguccgccuucuacauccugcccagcaucaucuccaacgagaagcaggagauccugggcaccgugagcuggaaccuccgcgagaugcuggcgcacgccgaggagacgcggaagcugaugcccgucugcguggagaccaaggccaucguguccaccauccagcgcaaguacaagggcaucaagauccaggagggggucguggacuacggcgcccgguucuacuucuacaccagcaagacgaccguggccucccugaucaacacccucaacgaccugaacgagacccuggucacgaugccgcucggguacgugacccacggccugaaccuggaggaggcggcccgcuacaugcggagccucaaggugcccgccaccgucuccgugagcucccccgacgccgugaccgccuacaacggguaccugacgagcuccagcaagacccccgaggagcacuucaucgagaccaucucccuggcgggcagcuacaaggacuggagcuacuccggccagagcacccagcucgggaucgaguuccugaagcgcggcgacaaguccgucuacuacacgagcaacccgaccaccuuccaccuggacggggaggugaucaccuucgacaaccucaagacgcugcugucccuccgggaggugcgcaccaucaaggucuucaccaccguggacaacaucaaccugcacacgcagguggucgacaugagcaugaccuacggccagcaguucggccccaccuaccuggacggggccgacgugaccaagaucaagccccacaacucccacgagggcaagacguucuacgugcucccgaacgacgacacccugcgggucgaggccuucgaguacuaccacaccaccgaccccagcuuccuggggcgcuacauguccgcccucaaccacacgaagaaguggaaguacccccaggugaacggccugaccagcaucaagugggccgacaacaacugcuaccuggcgaccgcccuccugacccugcagcagaucgagcucaaguucaaccccccggcccugcaggacgccuacuaccgggcgcgcgccggggaggccgccaacuucugcgcccugauccucgcguacugcaacaagacggugggcgagcugggcgacguccgggagaccauguccuaccuguuccagcacgccaaccucgacagcugcaagcgcgugcugaacgucgugugcaagaccugcgggcagcagcagaccacccugaagggcguggaggccgucauguacauggggacgcucuccuacgagcaguucaagaagggcgugcagauccccugcaccugcgggaagcaggccaccaaguaccuggugcagcaggagagccccuucgucaugauguccgcccccccggcgcaguacgagcugaagcacggcaccuucacgugcgccagcgaguacaccggcaacuaccagugcgggcacuacaagcacaucaccuccaaggagacccucuacugcaucgacggcgcccugcugacgaagagcagcgaguacaaggggcccaucaccgacguguucuacaaggagaacuccuacaccaccacgaucaagcccgugaccuacaagcucgacggcgucgugugcaccgagaucgaccccaagcuggacaacuacuacaagaaggacaacagcuacuucaccgagcagccgaucgaccuggugcccaaccagcccuaccccaacgccuccuucgacaacuucaaguucgucugcgacaacaucaaguucgccgacgaccucaaccagcugacgggguacaagaagccggcgagccgggagcugaaggugaccuucuuccccgaccucaacggcgacguggucgccaucgacuacaagcacuacacccccuccuucaagaagggcgccaagcugcugcacaagcccaucguguggcacgugaacaacgccaccaacaaggcgacguacaagccgaacaccuggugcauccgcugccucuggagcaccaagcccgucgagaccuccaacagcuucgacgugcugaaguccgaggacgcccaggggauggacaaccuggccugcgaggaccucaagcccgugagcgaggaggucguggagaaccccacgauccagaaggacgugcuggagugcaacgucaagaccaccgagguggugggcgacaucauccugaagccggccaacaacucccucaagaucaccgaggaggucgggcacacggaccugauggccgcguacguggacaacagcucccugaccaucaagaagcccaacgagcucagccgcgugcugggccugaagacccucgccacccacgggcuggccgccgucaacuccgugcccugggacacgaucgccaacuacgcgcggccguuccugaacaagguggucagcaccaccaccaacaucgugacgcgcugccucaaccgggugugcaccaacuacaugcccuacuucuucacccugcugcuccagcugugcaccuucacccgcuccacgaacagccggaucaaggccuccaugcccaccaccaucgccaagaacaccgucaagagcgugggcaaguucugccuggaggccagcuucaacuaccucaagucccccaacuucagcaagcugaucaacaucaucaucugguuccugcuccuguccgugugccugggcagccucaucuacuccacggccgcgcuggggguccugaugagcaaccucggcaugccguccuacugcaccggguaccgcgagggcuaccugaacagcaccaacgugaccaucgccacguacugcaccggcuccauccccugcagcgugugccuguccgggcucgacagccuggacaccuaccccucccuggagaccauccagaucacgaucagcuccuucaagugggaccucaccgccuucggccuggucgccgagugguuccuggccuacauccucuucacccgguucuucuacgugcuggggcuggcggccaucaugcagcucuucuucagcuacuucgccgugcacuucaucuccaacagcuggcugauguggcugaucaucaaccugguccagauggcccccaucuccgcgauggugcgcauguacaucuucuucgccagcuucuacuacguguggaagagcuacguccacgugguggacggcugcaacuccagcaccugcaugaugugcuacaagcggaaccgcgccacgcgggucgagugcaccaccaucgugaacgggguccgccgguccuucuacguguacgccaacggcggcaagggguucugcaagcuccacaacuggaacugcgugaacugcgacaccuucugcgccggcagcacguucaucuccgacgaggucgcgcgcgaccugagccugcaguucaagcggccgaucaaccccaccgaccaguccagcuacaucguggacuccgugaccgucaagaacgggagcauccaccucuacuucgacaaggccggccagaagaccuacgagcgccacucccugagccacuucgugaaccuggacaaccuccgggccaacaacacgaaggggucccugcccaucaacgugaucgucuucgacggcaagagcaagugcgaggaguccagcgccaaguccgccagcguguacuacucccagcugaugugccagcccauccuccugcuggaccaggcgcucgugagcgacgucggcgacagcgccgagguggccgugaagauguucgacgccuacgucaacaccuucuccagcaccuucaacgugccgauggagaagcugaagacccugguggccacggcggaggccgagcucgccaagaacgucucccuggacaacgugcugagcaccuucaucuccgccgcgcgccagggguucguggacagcgacgucgagaccaaggacgugguggagugccucaagcugucccaccagagcgacaucgaggucaccggcgacuccugcaacaacuacaugcugacguacaacaagguggagaacaugaccccccgggaccucggggccugcaucgacugcagcgcccgccacaucaacgcccagguggccaagucccacaacaucgcgcugaucuggaacgucaaggacuucaugagccuguccgagcagcuccgcaagcagauccggagcgccgccaagaagaacaaccugcccuucaagcugaccugcgccaccacgcgccagguggugaacgucgugaccaccaagaucgcccucaagggcggguga

SEQ ID NO: 18199 - RNA, 5841 nt, Artificial Sequence
  SARS-CoV-2__MT461614.1__non-structural protein 3 (NSP3) CDS gc
auggcccccaccaaggugaccuucggcgacgacacggucaucgaggugcagggguacaagagcgugaacaucaccuucgagcuggacgagcgcaucgacaagguccucaacgagaagugcuccgccuacaccguggagcugggcaccgaggugaacgaguucgcgugcgucguggccgacgccgugaucaagacgcugcagccggucagcgagcuccugaccccccuggggaucgaccucgacgagugguccauggccaccuacuaccuguucgacgagagcggcgaguucaagcuggccucccacauguacugcagcuucuacccccccgacgaggacgaggaggagggggacugcgaggaggaggaguucgagccguccacccaguacgaguacggcacggaggacgacuaccagggcaagccccucgaguucggggcgaccagcgccgcccugcagcccgaggaggagcaggaggaggacuggcuggacgacgacucccagcagaccgugggccagcaggacgggagcgaggacaaccagaccacgaccauccagaccaucguggagguccagccccagcucgagauggagcugaccccgguggugcagacgaucgaggucaacuccuucagcggcuaccugaagcucaccgacaacguguacaucaagaacgccgacaucguggaggaggcgaagaaggucaagcccaccgugguggucaacgccgccaacguguaccugaagcacgggggcggcguggccggggcccugaacaaggcgaccaacaacgccaugcaggucgaguccgacgacuacaucgccacgaacggcccccucaagguggggggcagcugcguccuguccggccacaaccuggccaagcacugccuccacgugguggggcccaacgucaacaagggcgaggacauccagcugcugaagagcgccuacgagaacuucaaccagcacgaggugcuccuggcgccgcugcucuccgccgggaucuucggcgccgaccccauccacagccugcgggugugcgucgacaccgugcgcaccaacguguaccuggccgucuucgacaagaaccucuacgacaagcugguguccagcuuccuggagaugaagagcgagaagcagguggagcagaagaucgccgagauccccaaggaggaggucaagcccuucaucaccgaguccaagccgagcguggagcagcggaagcaggacgacaagaagaucaaggcgugcguggaggaggucacgaccacccucgaggagaccaaguuccugacggagaaccugcuccuguacaucgacaucaacgggaaccugcaccccgacuccgccacccucgugagcgacaucgacaucaccuuccugaagaaggacgcccccuacaucgugggcgacgucgugcaggagggcgugcugaccgccgucgugauccccacgaagaaggccgggggcaccaccgagaugcucgcgaaggcccugcgcaaggugccgaccgacaacuacaucacgaccuaccccgggcagggccugaacggguacaccgucgaggaggccaagaccgugcucaagaagugcaaguccgccuucuacauccugcccagcaucaucuccaacgagaagcaggagauccugggcaccgugagcuggaaccuccgggagaugcuggcgcacgccgaggagacgcgcaagcugaugcccgucugcguggagaccaaggccaucguguccaccauccagcggaaguacaagggcaucaagauccaggagggggucguggacuacggcgcccgcuucuacuucuacaccagcaagacgaccguggccucccugaucaacacccucaacgaccugaacgagacccuggucacgaugccgcucggguacgugacccacggccugaaccuggaggaggcggcccgguacaugcgcagccucaaggugcccgccaccgucuccgugagcucccccgacgccgugaccgccuacaacggguaccugacgagcuccagcaagacccccgaggagcacuucaucgagaccaucucccuggcgggcagcuacaaggacuggagcuacuccggccagagcacccagcucgggaucgaguuccugaagcggggcgacaaguccgucuacuacacgagcaacccgaccaccuuccaccuggacggggaggugaucaccuucgacaaccucaagacgcugcugucccuccgcgaggugcggaccaucaaggucuucaccaccguggacaacaucaaccugcacacgcagguggucgacaugagcaugaccuacggccagcaguucggccccaccuaccuggacggggccgacgugaccaagaucaagccccacaacucccacgagggcaagacguucuacgugcucccgaacgacgacacccugcgcgucgaggccuucgaguacuaccacaccaccgaccccagcuuccuggggcgguacauguccgcccucaaccacacgaagaaguggaaguacccccaggugaacggccugaccagcaucaagugggccgacaacaacugcuaccuggcgaccgcccuccugacccugcagcagaucgagcucaaguucaaccccccggcccugcaggacgccuacuaccgcgcgcgggccggggaggccgccaacuucugcgcccugauccucgcguacugcaacaagacggugggcgagcugggcgacguccgcgagaccauguccuaccuguuccagcacgccaaccucgacagcugcaagcgggugcugaacgucgugugcaagaccugcgggcagcagcagaccacccugaagggcguggaggccgucauguacauggggacgcucuccuacgagcaguucaagaagggcgugcagauccccugcaccugcgggaagcaggccaccaaguaccuggugcagcaggagagccccuucgucaugauguccgcccccccggcgcaguacgagcugaagcacggcaccuucacgugcgccagcgaguacaccggcaacuaccagugcgggcacuacaagcacaucaccuccaaggagacccucuacugcaucgacggcgcccugcugacgaagagcagcgaguacaaggggcccaucaccgacguguucuacaaggagaacuccuacaccaccacgaucaagcccgugaccuacaagcucgacggcgucgugugcaccgagaucgaccccaagcuggacaacuacuacaagaaggacaacagcuacuucaccgagcagccgaucgaccuggugcccaaccagcccuaccccaacgccuccuucgacaacuucaaguucgucugcgacaacaucaaguucgccgacgaccucaaccagcugacgggguacaagaagccggcgagccgcgagcugaaggugaccuucuuccccgaccucaacggcgacguggucgccaucgacuacaagcacuacacccccuccuucaagaagggcgccaagcugcugcacaagcccaucguguggcacgugaacaacgccaccaacaaggcgacguacaagccgaacaccuggugcauccggugccucuggagcaccaagcccgucgagaccuccaacagcuucgacgugcugaaguccgaggacgcccaggggauggacaaccuggccugcgaggaccucaagcccgugagcgaggaggucguggagaaccccacgauccagaaggacgugcuggagugcaacgucaagaccaccgagguggugggcgacaucauccugaagccggccaacaacucccucaagaucaccgaggaggucgggcacacggaccugauggccgcguacguggacaacagcucccugaccaucaagaagcccaacgagcucagccgcgugcugggccugaagacccucgccacccacgggcuggccgccgucaacuccgugcccugggacacgaucgccaacuacgcgaagccguuccugaacaagguggucagcaccaccaccaacaucgugacgcgcugccucaaccgggugugcaccaacuacaugcccuacuucuucacccugcugcuccagcugugcaccuucacccgcuccacgaacagccggaucaaggccuccaugcccaccaccaucgccaagaacaccgucaagagcgugggcaaguucugccuggaggccagcuucaacuaccucaagucccccaacuucagcaagcugaucaacaucaucaucugguuccugcuccuguccgugugccugggcagccucaucuacuccacggccgcgcuggggguccugaugagcaaccucggcaugccguccuacugcaccggguaccgcgagggcuaccugaacagcaccaacgugaccaucgccacguacugcaccggcuccauccccugcagcgugugccuguccgggcucgacagccuggacaccuaccccucccuggagaccauccagaucacgaucagcuccuucaagugggaccucaccgccuucggccuggucgccgagugguuccuggccuacauccucuucacccgguucuucuacgugcuggggcuggcggccaucaugcagcucuucuucagcuacuucgccgugcacuucaucuccaacagcuggcugauguggcugaucaucaaccugguccagauggcccccaucuccgcgauggugcgcauguacaucuucuucgccagcuucuacuacguguggaagagcuacguccacgugguggacggcugcaacuccagcaccugcaugaugugcuacaagcggaaccgcgccacgcgggucgagugcaccaccaucgugaacgggguccgccgguccuucuacguguacgccaacggcggcaagggguucugcaagcuccacaacuggaacugcgugaacugcgacaccuucugcgccggcagcacguucaucuccgacgaggucgcgcgcgaccugagccugcaguucaagcggccgaucaaccccaccgaccaguccuacuacaucguggacagcgugaccgucaagaacggguccauccaccucuacuucgacaaggccggccagaagaccuacgagcgccacagccugucccacuucgugaaccuggacaaccuccgggccaacaacacgaaggggagccugcccaucaacgugaucgucuucgacggcaaguccaagugcgaggagagcuccgccaagagcgccuccguguacuacagccagcugaugugccagcccauccuccugcuggaccaggcgcucguguccgacgucggcgacagcgccgagguggccgugaagauguucgacgccuacgucaacaccuucagcuccaccuucaacgugccgauggagaagcugaagacccugguggccacggcggaggccgagcucgccaagaacgucagccuggacaacgugcuguccaccuucaucagcgccgcgcgccagggguucguggacuccgacgucgagaccaaggacgugguggagugccucaagcugagccaccaguccgacaucgaggucaccggcgacagcugcaacaacuacaugcugacguacaacaagguggagaacaugaccccccgggaccucggggccugcaucgacugcuccgcccgccacaucaacgcccagguggccaagagccacaacaucgcgcugaucuggaacgucaaggacuucaugucccugagcgagcagcuccggaagcagauccgcuccgccgccaagaagaacaaccugcccuucaagcugaccugcgccaccacgcgccagguggugaacgucgugaccaccaagaucgcccucaagggcggguga

SEQ ID NO: 18200 - RNA, 5841 nt, Artificial Sequence
  SARS-CoV-2__MT461625.1__non-structural protein 3 (NSP3) CDS gc
auggcccccaccaaggugaccuucggcgacgacacggucaucgaggugcagggguacaagagcgugaacaucaccuucgagcuggacgagcgcaucgacaagguccucaacgagaagugcuccgccuacaccguggagcugggcaccgaggugaacgaguucgcgugcgucguggccgacgccgugaucaagacgcugcagccggucagcgagcuccugaccccccuggggaucgaccucgacgagugguccauggccaccuacuaccuguucgacgagagcggcgaguucaagcuggccucccacauguacugcagcuucuacccccccgacgaggacgaggaggagggggacugcgaggaggaggaguucgagccguccacccaguacgaguacggcacggaggacgacuaccagggcaagccccucgaguucggggcgaccagcgccgcccugcagcccgaggaggagcaggaggaggacuggcuggacgacgacucccagcagaccgugggccagcaggacgggagcgaggacaaccagaccacgaccauccagaccaucguggagguccagccccagcucgagauggagcugaccccgguggugcagacgaucgaggucaacuccuucagcggcuaccugaagcucaccgacaacguguacaucaagaacgccgacaucguggaggaggcgaagaaggucaagcccaccgugguggucaacgccgccaacguguaccugaagcacgggggcggcguggccggggcccugaacaaggcgaccaacaacgccaugcaggucgaguccgacgacuacaucgccacgaacggcccccucaagguggggggcagcugcguccuguccggccacaaccuggccaagcacugccuccacgugguggggcccaacgucaacaagggcgaggacauccagcugcugaagagcgccuacgagaacuucaaccagcacgaggugcuccuggcgccgcugcucuccgccgggaucuucggcgccgaccccauccacagccugcgggugugcgucgacaccgugcgcaccaacguguaccuggccgucuucgacaagaaccucuacgacaagcugguguccagcuuccuggagaugaagagcgagaagcagguggagcagaagaucgccgagauccccaaggaggaggucaagcccuucaucaccgaguccaagccgagcguggagcagcggaagcaggacgacaagaagaucaaggcgugcguggaggaggucacgaccacccucgaggagaccaaguuccugacggagaaccugcuccuguacaucgacaucaacgggaaccugcaccccgacuccgccacccucgugagcgacaucgacaucaccuuccugaagaaggacgcccccuacaucgugggcgacgucgugcaggagggcgugcugaccgccgucgugauccccacgaagaaggccgggggcaccaccgagaugcucgcgaaggcccugcgcaaggugccgaccgacaacuacaucacgaccuaccccgggcagggccugaacggguacaccgucgaggaggccaagaccgugcucaagaagugcaaguccgccuucuacauccugcccagcaucaucuccaacgagaagcaggagauccugggcaccgugagcuggaaccuccgggagaugcuggcgcacgccgaggagacgcgcaagcugaugcccgucugcguggagaccaaggccaucguguccaccauccagcggaaguacaagggcaucaagauccaggagggggucguggacuacggcgcccgcuucuacuucuacaccagcaagacgaccguggccucccugaucaacacccucaacgaccugaacgagacccuggucacgaugccgcucggguacgugacccacggccugaaccuggaggaggcggcccgguacaugcgcagccucaaggugcccgccaccgucuccgugagcucccccgacgccgugaccgccuacaacggguaccugacgagcuccagcaagacccccgaggagcacuucaucgagaccaucucccuggcgggcagcuacaaggacuggagcuacuccggccagagcacccagcucgggaucgaguuccugaagcggggcgacaaguccgucuacuacacgagcaacccgaccaccuuccaccuggacggggaggugaucaccuucgacaaccucaagacgcugcugucccuccgcgaggugcggaccaucaaggucuucaccaccguggacaacaucaaccugcacacgcagguggucgacaugagcaugaccuacggccagcaguucggccccaccuaccuggacggggccgacgugaccaagaucaagccccacaacucccacgagggcaagacguucuacgugcucccgaacgacgacacccugcgcgucgaggccuucgaguacuaccacaccaccgaccccagcuuccuggggcgguacauguccgcccucaaccacacgaagaaguggaaguacccccaggugaacggccugaccagcaucaagugggccgacaacaacugcuaccuggcgaccgcccuccugacccugcagcagaucgagcucaaguucaaccccccggcccugcaggacgccuacuaccgcgcgcgggccggggaggccgccaacuucugcgcccugauccucgcguacugcaacaagacggugggcgagcugggcgacguccgcgagaccauguccuaccuguuccagcacgccaaccucgacagcugcaagcgggugcugaacgucgugugcaagaccugcgggcagcagcagaccacccugaagggcguggaggccgucauguacauggggacgcucuccuacgagcaguucaagaagggcgugcagauccccugcaccugcgggaagcaggccaccaaguaccuggugcagcaggagagccccuucgucaugauguccgcccccccggcgcaguacgagcugaagcacggcaccuucacgugcgccagcgaguacaccggcaacuaccagugcgggcacuacaagcacaucaccuccaaggagacccucuacugcaucgacggcgcccugcugacgaagagcagcgaguacaaggggcccaucaccgacguguucuacaaggagaacuccuacaccaccacgaucaagcccgugaccuacaagcucgacggcgucgugugcaccgagaucgaccccaagcuggacaacuacuacaagaaggacaacagcuacuucaccgagcagccgaucgaccuggugcccaaccagcccuaccccaacgccuccuucgacaacuucaaguucgucugcgacaacaucaaguucgccgacgaccucaaccagcugacgggguacaagaagccggcgagccgcgagcugaaggugaccuucuuccccgaccucaacggcgacguggucgccaucgacuacaagcacuacacccuguccuucaagaagggcgccaagcugcuccacaagcccaucguguggcacgugaacaacgccaccaacaaggcgacguacaagcccaacaccuggugcauccggugccuguggagcaccaagccggucgagaccuccaacagcuucgacgugcugaaguccgaggacgcccaggggauggacaaccucgccugcgaggaccugaagcccgugagcgaggaggucguggagaaccccacgauccagaaggacgugcuggagugcaacgucaagaccaccgagguggugggcgacaucauccucaagcccgccaacaacucccugaagaucaccgaggaggucgggcacacggaccugauggccgcguacguggacaacagcucccucaccaucaagaagccgaacgagcugagccgcgugcugggccucaagacccuggccacccacgggcuggccgccgucaacuccgugcccugggacacgaucgccaacuacgcgaagcccuuccucaacaagguggucagcaccaccaccaacaucgugacgcgcugccugaaccgggugugcaccaacuacaugccguacuucuucacccugcuccugcagcugugcaccuucacccgcuccacgaacagccggaucaaggccuccaugcccaccaccaucgccaagaacaccgucaagagcgugggcaaguucugccucgaggccagcuucaacuaccugaagucccccaacuucagcaagcugaucaacaucaucaucugguuccuccugcuguccgugugccucggcagccugaucuacuccacggccgcgcuggggguccucaugagcaaccugggcaugcccuccuacugcaccggguaccgcgagggcuaccugaacagcaccaacgugaccaucgccacguacugcaccggcuccaucccgugcagcgugugccucuccgggcuggacagccuggacaccuaccccucccucgagaccauccagaucacgaucagcuccuucaagugggaccugaccgccuucggccuggucgccgagugguuccucgccuacauccuguucacccgguucuucuacgugcuggggcucgcggccaucaugcagcuguucuucagcuacuucgccgugcacuucaucuccaacagcuggcugauguggcugaucaucaaccucguccagauggcccccaucuccgcgauggugcgcauguacaucuucuucgccagcuucuacuacguguggaagagcuacguccacgugguggacggcugcaacuccagcaccugcaugaugugcuacaagcggaaccgcgccacgcgggucgagugcaccaccaucgugaacgggguccgccgguccuucuacguguacgccaacggcggcaagggguucugcaagcugcacaacuggaacugcgugaacugcgacaccuucugcgccggcagcacguucaucuccgacgaggucgcgcgcgaccugagccuccaguucaagcggcccaucaacccgaccgaccaguccagcuacaucguggacuccgugaccgucaagaacgggagcauccaccuguacuucgacaaggccggccagaagaccuacgagcgccacucccugagccacuucgugaaccucgacaaccugcgggccaacaacacgaaggggucccugcccaucaacgugaucgucuucgacggcaagagcaagugcgaggaguccagcgccaaguccgccagcguguacuacucccagcucaugugccagcccauccugcugcucgaccaggcgcuggugagcgacgucggcgacagcgccgagguggccgugaagauguucgacgccuacgucaacaccuucuccagcaccuucaacgugcccauggagaagcugaagacccucguggccacggcggaggccgagcuggccaagaacgucucccuggacaacgugcucagcaccuucaucuccgccgcgcgccagggguucguggacagcgacgucgagaccaaggacgugguggagugccugaagcugucccaccagagcgacaucgaggucaccggcgacuccugcaacaacuacaugcucacguacaacaagguggagaacaugaccccgcgggaccugggggccugcaucgacugcagcgcccgccacaucaacgcccagguggccaagucccacaacaucgcgcugaucuggaacgucaaggacuucaugagccucuccgagcagcugcggaagcagauccgcagcgccgccaagaagaacaaccugcccuucaagcucaccugcgccaccacgcgccagguggugaacgucgugaccaccaagaucgcccugaagggcggguga

SEQ ID NO: 18201 - RNA, 5841 nt, Artificial Sequence
  SARS-CoV-2__MT461636.1__non-structural protein 3 (NSP3) CDS gc
auggcccccaccaaggugaccuucggcgacgacacggucaucgaggugcagggguacaagagcgugaacaucaccuucgagcuggacgagcgcaucgacaagguccucaacgagaagugcuccgccuacaccguggagcugggcaccgaggugaacgaguucgcgugcgucguggccgacgccgugaucaagacgcugcagccggucagcgagcuccugaccccccuggggaucgaccucgacgagugguccauggccaccuacuaccuguucgacgagagcggcgaguucaagcuggccucccacauguacugcagcuucuacccccccgacgaggacgaggaggagggggacugcgaggaggaggaguucgagccguccacccaguacgaguacggcacggaggacgacuaccagggcaagccccucgaguucggggcgaccagcgccgcccugcagcccgaggaggagcaggaggaggacuggcuggacgacgacucccagcagaccgugggccagcaggacgggagcgaggacaaccagaccacgaccauccagaccaucguggagguccagccccagcucgagauggagcugaccccgguggugcagacgaucgaggucaacuccuucagcggcuaccugaagcucaccgacaacguguacaucaagaacgccgacaucguggaggaggcgaagaaggucaagcccaccgugguggucaacgccgccaacguguaccugaagcacgggggcggcguggccggggcccugaacaaggcgaccaacaacgccaugcaggucgaguccgacgacuacaucgccacgaacggcccccucaagguggggggcagcugcguccuguccggccacaaccuggccaagcacugccuccacgugguggggcccaacgucaacaagggcgaggacauccagcugcugaagagcgccuacgagaacuucaaccagcacgaggugcuccuggcgccgcugcucuccgccgggaucuucggcgccgaccccauccacagccugcgggugugcgucgacaccgugcgcaccaacguguaccuggccgucuucgacaagaaccucuacgacaagcugguguccagcuuccuggagaugaagagcgagaagcagguggagcagaagaucgccgagauccccaaggaggaggucaagcccuucaucaccgaguccaagccgagcguggagcagcggaagcaggacgacaagaagaucaaggcgugcguggaggaggucacgaccacccucgaggagaccaaguuccugacggagaaccugcuccuguacaucgacaucaacgggaaccugcaccccgacuccgccacccucgugagcgacaucgacaucaccuuccugaagaaggacgcccccuacaucgugggcgacgucgugcaggagggcgugcugaccgccgucgugauccccacgaagaaggccgggggcaccaccgagaugcucgcgaaggcccugcgcaaggugccgaccgacaacuacaucacgaccuaccccgggcagggccugaacggguacaccgucgaggaggccaagaccgugcucaagaagugcaaguccgccuucuacauccugcccagcaucaucuccaacgagaagcaggagauccugggcaccgugagcuggaaccuccgggagaugcuggcgcacgccgaggagacgcgcaagcugaugcccgucugcguggagaccaaggccaucguguccaccauccagcggaaguacaagggcaucaagauccaggagggggucguggacuacggcgcccgcuucuacuucuacaccagcaagacgaccguggccucccugaucaacacccucaacgaccugaacgagacccuggucacgaugccgcucggguacgugacccacggccugaaccuggaggaggcggcccgguacaugcgcagccucaaggugcccgccaccgucuccgugagcucccccgacgccgugaccgccuacaacggguaccugacgagcuccagcaagacccccgaggagcacuucaucgagaccaucucccuggcgggcagcuacaaggacuggagcuacuccggccagagcacccagcucgggaucgaguuccugaagcggggcgacaaguccgucuacuacacgagcaacccgaccaccuuccaccuggacggggaggugaucaccuucgacaaccucaagacgcugcugucccuccgcgaggugcggaccaucaaggucuucaccaccguggacaacaucaaccugcacacgcagguggucgacaugagcaugaccuacggccagcaguucggccccaccuaccuggacggggccgacgugaccaagaucaagccccacaacucccacgagggcaagacguucuacgugcucccgaacgacgacacccugcgcgucgaggccuucgaguacuaccacaccaccgaccccagcuuccuggggcgguacauguccgcccucaaccacacgaagaaguggaaguacccccaggugaacggccugaccagcaucaagugggccgacaacaacugcuaccuggcgaccgcccuccugacccugcagcagaucgagcucaaguucaaccccccggcccugcaggacgccuacuaccgcgcgcgggccggggaggccgccaacuucugcgcccugauccucgcguacugcaacaagacggugggcgagcugggcgacguccgcgagaccauguccuaccuguuccagcacgccaaccucgacagcugcaagcgggugcugaacgucgugugcaagaccugcgggcagcagcagaccacccugaagggcguggaggccgucauguacauggggacgcucuccuacgagcaguucaagaagggcgugcagauccccugcaccugcgggaagcaggccaccaaguaccuggugcagcaggagagccccuucgucaugauguccgcccccccggcgcaguacgagcugaagcacggcaccuucacgugcgccagcgaguacaccggcaacuaccagugcgggcacuacaagcacaucaccuccaaggagacccucuacugcaucgacggcgcccugcugacgaagagcagcgaguacaaggggcccaucaccgacguguucuacaaggagaacuccuacaccaccacgaucaagcccgugaccuacaagcucgacggcgucgugugcaccgagaucgaccccaagcuggacaacuacuacaagaaggacaacagcuacuucaccgagcagccgaucgaccuggugcccaaccagcccuaccccaacgccuccuucgacaacuucaaguucgucugcgacaacaucaaguucgccgacgaccucaaccagcugacgggguacaagaagccggcgagccgcgagcugaaggugaccuucuuccccgaccucaacggcgacguggucgccaucgacuacaagcacuacacccccuccuucaagaagggcgccaagcugcugcacaagcccaucguguggcacgugaacaacgccaccaacaaggcgacguacaagccgaacaccuggugcauccggugccucuggagcaccaagcccgucgagaccuccaacagcuucgacgugcugaaguccgaggacgcccaggggauggacaaccuggccugcgaggaccucaagcccgugagcgaggaggucguggagaaccccacgauccagaaggacgugcuggagugcaacgucaagaccaccgagguggugggcgacaucauccugaagccggccaacaacucccucaagaucaccgaggaggucgggcacacggaccugauggccgcguacguggacaacagcucccugaccaucaagaagcccaacgagcucagccgcgugcugggccugaagacccucgccacccacgggcuggccgccgucaacuccgugcccugggacacgaucgccaacuacgcgaagccguuccugaacaagguggucagcaccaccaccaacaucgugacgcgcugccucaaccgggugugcaccaacuacaugcccuacuucuucacccugcugcuccagcugugcaccuucacccgcuccacgaacagccggaucaaggccuccaugcccaccaccaucgccaagaacaccgucaagagcgugggcaaguucugccuggaggccagcuucaacuaccucaagucccccaacuucagcaagcugaucaacaucaucaucugguuccugcuccuguccgugugccugggcagccucaucuacuccacggccgcgcuggggguccugauguucaaccucggcaugccgagcuacugcaccggguaccgcgagggcuaccugaacuccaccaacgugaccaucgccacguacugcaccggcagcauccccugcuccgugugccugagcgggcucgacucccuggacaccuaccccagccuggagaccauccagaucacgaucuccagcuucaagugggaccucaccgccuucggccuggucgccgagugguuccuggccuacauccucuucacccgguucuucuacgugcuggggcuggcggccaucaugcagcucuucuucuccuacuucgccgugcacuucaucagcaacuccuggcugauguggcugaucaucaaccugguccagauggcccccaucagcgcgauggugcgcauguacaucuucuucgccuccuucuacuacguguggaagagcuacguccacgugguggacggcugcaacagcuccaccugcaugaugugcuacaagcggaaccgcgccacgcgggucgagugcaccaccaucgugaacgggguccgccggagcuucuacguguacgccaacggcggcaagggguucugcaagcuccacaacuggaacugcgugaacugcgacaccuucugcgccggcuccacguucaucagcgacgaggucgcgcgcgaccugucccugcaguucaagcggccgaucaaccccaccgaccagagcuccuacaucguggacagcgugaccgucaagaacggguccauccaccucuacuucgacaaggccggccagaagaccuacgagcgccacagccugucccacuucgugaaccuggacaaccuccgggccaacaacacgaaggggagccugcccaucaacgugaucgucuucgacggcaaguccaagugcgaggagagcuccgccaagagcgccuccguguacuacagccagcugaugugccagcccauccuccugcuggaccaggcgcucguguccgacgucggcgacagcgccgagguggccgugaagauguucgacgccuacgucaacaccuucagcuccaccuucaacgugccgauggagaagcugaagacccugguggccacggcggaggccgagcucgccaagaacgucagccuggacaacgugcuguccaccuucaucagcgccgcgcgccagggguucguggacuccgacgucgagaccaaggacgugguggagugccucaagcugagccaccaguccgacaucgaggucaccggcgacagcugcaacaacuacaugcugacguacaacaagguggagaacaugaccccccgggaccucggggccugcaucgacugcuccgcccgccacaucaacgcccagguggccaagagccacaacaucgcgcugaucuggaacgucaaggacuucaugucccugagcgagcagcuccggaagcagauccgcuccgccgccaagaagaacaaccugcccuucaagcugaccugcgccaccacgcgccagguggugaacgucgugaccaccaagaucgcccucaagggcggguga

SEQ ID NO: 18202 - RNA, 5841 nt, Artificial Sequence
  SARS-CoV-2__MT461641.1__non-structural protein 3 (NSP3) CDS gc
auggcccccaccaaggugaccuucggcgacgacacggucaucgaggugcagggguacaagagcgugaacaucaccuucgagcuggacgagcgcaucgacaagguccucaacgagaagugcuccgccuacaccguggagcugggcaccgaggugaacgaguucgcgugcgucguggccgacgccgugaucaagacgcugcagccggucagcgagcuccugaccccccuggggaucgaccucgacgagugguccauggccaccuacuaccuguucgacgagagcggcgaguucaagcuggccucccacauguacugcagcuucuacccccccgacgaggacgaggaggagggggacugcgaggaggaggaguucgagccguccacccaguacgaguacggcacggaggacgacuaccagggcaagccccucgaguucggggcgaccagcgccgcccugcagcccgaggaggagcaggaggaggacuggcuggacgacgacucccagcagaccgugggccagcaggacgggagcgaggacaaccagaccacgaccauccagaccaucguggagguccagccccagcucgagauggagcugaccccgguggugcagacgaucgaggucaacuccuucagcggcuaccugaagcucaccgacaacguguacaucaagaacgccgacaucguggaggaggcgaagaaggucaagcccaccgugguggucaacgccgccaacguguaccugaagcacgggggcggcguggccggggcccugaacaaggcgaccaacaacgccaugcaggucgaguccgacgacuacaucgccacgaacggcccccucaagguggggggcagcugcguccuguccggccacaaccuggccaagcacugccuccacgugguggggcccaacgucaacaagggcgaggacauccagcugcugaagagcgccuacgagaacuucaaccagcacgaggugcuccuggcgccgcugcucuccgccgggaucuucggcgccgaccccauccacagccugcgggugugcgucgacaccgugcgcaccaacguguaccuggccgucuucgacaagaaccucuacgacaagcugguguccagcuuccuggagaugaagagcgagaagcagguggagcagaagaucgccgagauccccaaggaggaggucaagcccuucaucaccgaguccaagccgagcguggagcagcggaagcaggacgacaagaagaucaaggcgugcguggaggaggucacgaccacccucgaggagaccaaguuccugacggagaaccugcuccuguacaucgacaucaacgggaaccugcaccccgacuccgccacccucgugagcgacaucgacaucaccuuccugaagaaggacgcccccuacaucgugggcgacgucgugcaggagggcgugcugaccgucguggugauccccacgaagaaggccgggggcaccaccgagaugcucgccaaggcgcugcgcaaggucccgaccgacaacuacaucacgaccuaccccgggcagggccugaacggguacaccguggaggaggccaagaccgugcucaagaagugcaaguccgccuucuacauccugcccagcaucaucuccaacgagaagcaggagauccugggcaccgucagcuggaaccuccgggagaugcuggcccacgcggaggagacgcgcaagcugaugcccgugugcguggagaccaaggccaucgucuccaccauccagcggaaguacaagggcaucaagauccaggagggggugguggacuacggcgcccgcuucuacuucuacaccagcaagacgaccgucgccucccugaucaacacccucaacgaccugaacgagacccuggugacgaugccgcucggguacgugacccacggccugaaccuggaggaggccgcgcgguacaugcgcagccucaagguccccgccaccguguccgugagcucccccgacgccgucaccgccuacaacggguaccugacgagcuccagcaagacccccgaggagcacuucaucgagaccaucucccuggccggcagcuacaaggacuggagcuacuccggccagagcacccagcucgggaucgaguuccugaagcggggcgacaaguccguguacuacacgagcaacccgaccaccuuccaccuggacggggaggugaucaccuucgacaaccucaagacgcugcugucccuccgcgagguccggaccaucaagguguucaccaccguggacaacaucaaccugcacacgcacgucguggacaugagcaugaccuacggccagcaguucggccccaccuaccuggacggggcggacgugaccaagaucaagccccacaacucccacgagggcaagacguucuacguccucccgaacgacgacacccugcgcguggaggccuucgaguacuaccacaccaccgaccccagcuuccuggggcgguacauguccgcccucaaccacacgaagaaguggaaguacccccaggugaacggccugaccagcaucaagugggccgacaacaacugcuaccuggccaccgcgcuccugacccugcagcagaucgagcucaaguucaaccccccggcccugcaggacgccuacuaccgcgcccgggcgggggaggccgccaacuucugcgcccugauccucgccuacugcaacaagacggucggcgagcugggcgacgugcgcgagaccauguccuaccuguuccagcacgcgaaccucgacagcugcaagcggguccugaacguggugugcaagaccugcgggcagcagcagaccacccugaagggcgucgaggccgugauguacauggggacgcucuccuacgagcaguucaagaagggcgugcagauccccugcaccugcgggaagcaggccaccaaguaccugguccagcaggagagccccuucgugaugauguccgcccccccggcccaguacgagcugaagcacggcaccuucacgugcgcgagcgaguacaccggcaacuaccagugcgggcacuacaagcacaucaccuccaaggagacccucuacugcaucgacggcgcccugcugacgaagagcagcgaguacaaggggcccaucaccgacguguucuacaaggagaacuccuacaccaccacgaucaagcccgucaccuacaagcucgacggcguggugugcaccgagaucgaccccaagcuggacaacuacuacaagaaggacaacagcuacuucaccgagcagccgaucgaccugguccccaaccagcccuaccccaacgccuccuucgacaacuucaaguucgugugcgacaacaucaaguucgccgacgaccucaaccagcugacgggguacaagaagccggccagccgcgagcugaaggugaccuucuuccccgaccucaacggcgacgucguggcgaucgacuacaagcacuacacccccuccuucaagaagggcgccaagcugcugcacaagcccaucguguggcacgucaacaacgccaccaacaaggccacguacaagccgaacaccuggugcauccggugccucuggagcaccaagcccguggagaccuccaacagcuucgacgugcugaaguccgaggacgcgcaggggauggacaaccuggccugcgaggaccucaagcccgucagcgaggaggugguggagaaccccacgauccagaaggacguccuggagugcaacgugaagaccaccgagguggucggcgacaucauccugaagccggccaacaacucccucaagaucaccgaggagguggggcacacggaccugauggccgccuacguggacaacagcucccugaccaucaagaagcccaacgagcucagccgcguccugggccugaagacccucgcgacccacgggcuggccgccgugaacuccgugcccugggacacgaucgccaacuacgccaagccguuccugaacaaggucgugagcaccaccaccaacaucgugacgcgcugccucaaccgggucugcaccaacuacaugcccuacuucuucacccugcugcuccagcugugcaccuucacccgcuccacgaacagccggaucaaggcguccaugcccaccaccaucgccaagaacaccgugaagagcgugggcaaguucugccuggaggccagcuucaacuaccucaagucccccaacuucagcaagcugaucaacaucaucaucugguuccugcuccuguccgucugccugggcagccucaucuacuccacggccgcccugggggugcugaugagcaaccucggcaugccguccuacugcaccggguaccgcgagggcuaccugaacagcaccaacgugaccaucgcgacguacugcaccggcuccauccccugcagcgucugccuguccgggcucgacagccuggacaccuaccccucccuggagaccauccagaucacgaucagcuccuucaagugggaccucaccgccuucggccugguggccgagugguuccuggccuacauccucuucacccgguucuucuacgugcuggggcuggccgcgaucaugcagcucuucuucagcuacuucgccguccacuucaucuccaacagcuggcugauguggcugaucaucaaccuggugcagauggcccccaucuccgccauggugcgcauguacaucuucuucgcgagcuucuacuacgucuggaagagcuacgugcacguggucgacggcugcaacuccagcaccugcaugaugugcuacaagcggaaccgcgccacgcggguggagugcaccaccaucgucaacggggugcgccgguccuucuacguguacgccaacggcggcaagggguucugcaagcuccacaacuggaacugcgucaacugcgacaccuucugcgccggcagcacguucaucuccgacgagguggcccgcgaccugagccugcaguucaagcggccgaucaaccccaccgaccaguccagcuacaucguggacuccgucaccgugaagaacgggagcauccaccucuacuucgacaaggcgggccagaagaccuacgagcgccacucccugagccacuucgugaaccuggacaaccuccgggccaacaacacgaaggggucccugcccaucaacgucaucguguucgacggcaagagcaagugcgaggaguccagcgccaaguccgccagcguguacuacucccagcugaugugccagcccauccuccugcuggaccaggcccucgucagcgacgugggcgacagcgcggagguggccgucaagauguucgacgccuacgugaacaccuucuccagcaccuucaacgugccgauggagaagcugaagacccuggucgccacggccgaggcggagcucgccaagaacgugucccuggacaacgugcugagcaccuucaucuccgccgcccgccagggguucgucgacagcgacguggagaccaaggacguggucgagugccucaagcugucccaccagagcgacaucgaggugaccggcgacuccugcaacaacuacaugcugacguacaacaagguggagaacaugaccccccgggaccucggggcgugcaucgacugcagcgcccgccacaucaacgcccaggucgccaagucccacaacaucgcccugaucuggaacgugaaggacuucaugagccuguccgagcagcuccggaagcagauccgcagcgcggccaagaagaacaaccugcccuucaagcugaccugcgccaccacgcgccagguggucaacguggugaccaccaagaucgcccucaagggcggguga

SEQ ID NO: 18203 - RNA, 5841 nt, Artificial Sequence
  SARS-CoV-2__MT457391.1__non-structural protein 3 (NSP3) CDS gc
auggcccccaccaaggugaccuucggcgacgacacggucaucgaggugcagggguacaagagcgugaacaucaccuucgagcuggacgagcgcaucgacaagguccucaacgagaagugcuccgccuacaccguggagcugggcaccgaggugaacgaguucgcgugcgucguggccgacgccgugaucaagacgcugcagccggucagcgagcuccugaccccccuggggaucgaccucgacgagugguccauggccaccuacuaccuguucgacgagagcggcgaguucaagcuggccucccacauguacugcagcuucuacccccccgacgaggacgaggaggagggggacugcgaggaggaggaguucgagccguccacccaguacgaguacggcacggaggacgacuaccagggcaagccccucgaguucggggcgaccagcgccgcccugcagcccgaggaggagcaggaggaggacuggcuggacgacgacucccagcagaccgugggccagcaggacgggagcgaggacaaccagaccacgaccauccagaccaucguggagguccagccccagcucgagauggagcugaccccgguggugcagacgaucgaggucaacuccuucagcggcuaccugaagcucaccgacaacguguacaucaagaacgccgacaucguggaggaggcgaagaaggucaagcccaccgugguggucaacgccgccaacguguaccugaagcacgggggcggcguggccggggcccugaacaaggcgaccaacaacgccaugcaggucgaguccgacgacuacaucgccacgaacggcccccucaagguggggggcagcugcguccuguccggccacaaccuggccaagcacugccuccacgugguggggcccaacgucaacaagggcgaggacauccagcugcugaagagcgccuacgagaacuucaaccagcacgaggugcuccuggcgccgcugcucuccgccgggaucuucggcgccgaccccauccacagccugcgggugugcgucgacaccgugcgcaccaacguguaccuggccgucuucgacaagaaccucuacgacaagcugguguccagcuuccuggagaugaagagcgagaagcagguggagcagaagaucgccgagauccccaaggaggaggucaagcccuucaucaccgaguccaagccgagcguggagcagcggaagcaggacgacaagaagaucaaggcgugcguggaggaggucacgaccacccucgaggagaccaaguuccugacggagaaccugcuccuguacaucgacaucaacgggaaccugcaccccgacuccgccacccucgugagcgacaucgacaucaccuuccugaagaaggacgcccccuacaucgugggcgacgucgugcaggagggcgugcugaccgccgucgugauccccacgaagaaggccgggggcaccaccgagaugcucgcgaaggcccugcgcaaggugccgaccgacaacuacaucacgaccuaccccgggcagggccugaacggguacaccgucgaggaggccaagaccgugcucaagaagugcaaguccgccuucuacauccugcccagcaucaucuccaacgagaagcaggagauccugggcaccgugagcuggaaccuccgggagaugcuggcgcacgccgaggagacgcgcaagcugaugcccgucugcguggagaccaaggccaucguguccaccauccagcggaaguacaagggcaucaagauccaggagggggucguggacuacggcgcccgcuucuacuucuacaccagcaagacgaccguggccucccugaucaacacccucaacgaccugaacgagacccuggucacgaugccgcucggguacgugacccacggccugaaccuggaggaggcggcccgguacaugcgcagccucaaggugcccgccaccgucuccgugagcucccccgacgccgugaccgccuacaacggguaccugacgagcuccagcaagacccccgaggagcacuucaucgagaccaucucccuggcgggcagcuacaaggacuggagcuacuccggccagagcacccagcucgggaucgaguuccugaagcggggcgacaaguccgucuacuacacgagcaacccgaccaccuuccaccuggacggggaggugaucaccuucgacaaccucaagacgcugcugucccuccgcgaggugcggaccaucaaggucuucaccaccguggacaacaucaaccugcacacgcagguggucgacaugagcaugaccuacggccagcaguucggccccaccuaccuggacggggccgacgugaccaagaucaagccccacaacucccacgagggcaagacguucuacgugcucccgaacgacgacacccugcgcgucgaggccuucgaguacuaccacaccaccgaccccagcuuccuggggcgguacauguccgcccucaaccacacgaagaaguggaaguacccccaggugaacggccugaccagcaucaagugggccgacaacaacugcuaccuggcgaccgcccuccugacccugcagcagaucgagcucaaguucaaccccccggcccugcaggacgccuacuaccgcgcgcgggccggggaggccgccaacuucugcgcccugauccucgcguacugcaacaagacggugggcgagcugggcgacguccgcgagaccauguccuaccuguuccagcacgccaaccucgacagcugcaagcgggugcugaacgucgugugcaagaccugcgggcagcagcagaccacccugaagggcguggaggccgucauguacauggggacgcucuccuacgagcaguucaagaagggcgugcagauccccugcaccugcgggaagcaggccaccaaguaccuggugcagcaggagagccccuucgucaugauguccgcccccccggcgcaguacgagcugaagcacggcaccuucacgugcgccagcgaguacaccggcaacuaccagugcgggcacuacaagcacaucaccuccaaggagacccucuacugcaucgacggcgcccugcugacgaagagcagcgaguacaaggggcccaucaccgacguguucuacaaggagaacuccuacaccaccacgaucaagcccgugaccuacaagcucgacggcgucgugugcaccgagaucgaccccaagcuggacaacuacuacaagaaggacaacagcuacuucaccgagcagccgaucgaccuggugcccaaccagcccuaccccaacgccuccuucgacaacuucaaguucgucugcgacaacaucaaguucgccgacgaccucaaccagcugacgggguacaagaagccggcgagccgcgagcugaagaucaccuucuuccccgaccucaacggcgacgugguggccaucgacuacaagcacuacacccccuccuucaagaagggcgccaagcugcugcacaagcccaucgucuggcacgugaacaacgccaccaacaaggcgacguacaagccgaacaccuggugcauccggugccucuggagcaccaagcccguggagaccuccaacagcuucgacguccugaaguccgaggacgcccaggggauggacaaccuggccugcgaggaccucaagcccgugagcgaggagguggucgagaaccccacgauccagaaggacgugcuggagugcaacgugaagaccaccgaggucgugggcgacaucauccugaagccggccaacaacucccucaagaucaccgaggagguggggcacacggaccugauggccgcguacgucgacaacagcucccugaccaucaagaagcccaacgagcucagccgcgugcugggccugaagacccucgccacccacgggcuggccgccgugaacuccguccccugggacacgaucgccaacuacgcgaagccguuccugaacaagguggugagcaccaccaccaacaucgucacgcgcugccucaaccgggugugcaccaacuacaugcccuacuucuucacccugcugcuccagcugugcaccuucacccgcuccacgaacagccggaucaaggccuccaugcccaccaccaucgccaagaacaccgugaagagcgucggcaaguucugccuggaggccagcuucaacuaccucaagucccccaacuucagcaagcugaucaacaucaucaucugguuccugcuccuguccgugugccugggcagccucaucuacuccacggccgcgcugggggugcugaugagcaaccucggcaugccguccuacugcaccggguaccgcgagggcuaccugaacagcaccaacgucaccaucgccacguacugcaccggcuccauccccugcagcgugugccuguccgggcucgacagccuggacaccuaccccucccuggagaccauccagaucacgaucagcuccuucaagugggaccucaccgccuucggccugguggccgagugguuccuggccuacauccucuucacccgguucuucuacguccuggggcuggcggccaucaugcagcucuucuucagcuacuucgccgugcacuucaucuccaacagcuggcugauguggcugaucaucaaccuggugcagauggcccccaucuccgcgaugguccgcauguacaucuucuucgccagcuucuacuacguguggaagagcuacgugcacgucguggacggcugcaacuccagcaccugcaugaugugcuacaagcggaaccgcgccacgcggguggagugcaccaccaucgucaacggggugcgccgguccuucuacgucuacgccaacggcggcaagggguucugcaagcuccacaacuggaacugcgugaacugcgacaccuucugcgccggcagcacguucaucuccgacgagguggcgcgcgaccugagccugcaguucaagcggccgaucaaccccaccgaccaguccagcuacaucgucgacuccgugaccgugaagaacgggagcauccaccucuacuucgacaaggccggccagaagaccuacgagcgccacucccugagccacuucgucaaccuggacaaccuccgggccaacaacacgaaggggucccugcccaucaacgugaucguguucgacggcaagagcaagugcgaggaguccagcgccaaguccgccagcgucuacuacucccagcugaugugccagcccauccuccugcuggaccaggcgcucgugagcgacgugggcgacagcgccgaggucgccgugaagauguucgacgccuacgugaacaccuucuccagcaccuucaacgucccgauggagaagcugaagacccugguggccacggcggaggccgagcucgccaagaacgugucccuggacaacguccugagcaccuucaucuccgccgcgcgccagggguucguggacagcgacguggagaccaaggacgucguggagugccucaagcugucccaccagagcgacaucgaggugaccggcgacuccugcaacaacuacaugcugacguacaacaaggucgagaacaugaccccccgggaccucggggccugcaucgacugcagcgcccgccacaucaacgcccagguggccaagucccacaacaucgcgcugaucuggaacgugaaggacuucaugagccuguccgagcagcuccggaagcagauccgcagcgccgccaagaagaacaaccugcccuucaagcugaccugcgccaccacgcgccaggucgugaacguggucaccaccaagaucgcccucaagggcggguga

SEQ ID NO: 18204 - RNA, 5841 nt, Artificial Sequence
  SARS-CoV-2__MT457392.1__non-structural protein 3 (NSP3) CDS gc
auggcccccaccaaggugaccuucggcgacgacacggucaucgaggugcagggguacaagagcgugaacaucaccuucgagcuggacgagcgcaucgacaagguccucaacgagaagugcuccgccuacaccguggagcugggcaccgaggugaacgaguucgcgugcgucguggccgacgccgugaucaagacgcugcagccggucagcgagcuccugaccccccuggggaucgaccucgacgagugguccauggccaccuacuaccuguucgacgagagcggcgaguucaagcuggccucccacauguacugcagcuucuacccccccgacgaggacgaggaggagggggacugcgaggaggaggaguucgagccguccacccaguacgaguacggcacggaggacgacuaccagggcaagccccucgaguucggggcgaccagcgccgcccugcagcccgaggaggagcaggaggaggacuggcuggacgacgacucccagcagaccgugggccagcaggacgggagcgaggacaaccagaccacgaccauccagaccaucguggagguccagccccagcucgagauggagcugaccccgguggugcagacgaucgaggucaacuccuucagcggcuaccugaagcucaccgacaacguguacaucaagaacgccgacaucguggaggaggcgaagaaggucaagcccaccgugguggucaacgccgccaacguguaccugaagcacgggggcggcguggccggggcccugaacaaggcgaccaacaacgccaugcaggucgaguccgacgacuacaucgccacgaacggcccccucaagguggggggcagcugcguccuguccggccacaaccuggccaagcacugccuccacgugguggggcccaacgucaacaagggcgaggacauccagcugcugaagagcgccuacgagaacuucaaccagcacgaggugcuccuggcgccgcugcucuccgccgggaucuucggcgccgaccccauccacagccugcgggugugcgucgacaccgugcgcaccaacguguaccuggccgucuucgacaagaaccucuacgacaagcugguguccagcuuccuggagaugaagagcgagaagcagguggagcagaagaucgccgagauccccaaggaggaggucaagcccuucaucaccgaguccaagccgagcguggagcagcggaagcaggacgacaagaagaucaaggcgugcguggaggaggucacgaccacccucgaggagaccaaguuccugacggagaaccugcuccuguacaucgacaucaacgggaaccugcaccccgacuccgccacccucgugagcgacaucgacaucaccuuccugaagaaggacgcccccuacaucgugggcgacgucgugcaggagggcgugcugaccgccgucgugauccccacgaagaaggccgggggcaccaccgagaugcucgcgaaggcccugcgcaaggugccgaccgacaacuacaucacgaccuaccccgggcagggccugaacggguacaccgucgaggaggccaagaccgugcucaagaagugcaaguccgccuucuacauccugcccagcaucaucuccaacgagaagcaggagauccugggcaccgugagcuggaaccuccgggagaugcuggcgcacgccgaggagacgcgcaagcugaugcccgucugcguggagaccaaggccaucguguccaccauccagcggaaguacaagggcaucaagauccaggagggggucguggacuacggcgcccgcuucuacuucuacaccagcaagacgaccguggccucccugaucaacacccucaacgaccugaacgagacccuggucacgaugccgcucggguacgugacccacggccugaaccuggaggaggcggcccgguacaugcgcagccucaaggugcccgccaccgucuccgugagcucccccgacgccgugaccgccuacaacggguaccugacgagcuccagcaagacccccgaggagcacuucaucgagaccaucucccuggcgggcagcuacaaggacuggagcuacuccggccagagcacccagcucgggaucgaguuccugaagcggggcgacaaguccgucuacuacacgagcaacccgaccaccuuccaccuggacggggaggugaucaccuucgacaaccucaagacgcugcugucccuccgcgaggugcggaccgucaagguguucaccaccguggacaacaucaaccugcacacgcaggucguggacaugagcaugaccuacggccagcaguucggccccaccuaccuggacggggccgacgugaccaagaucaagccccacaacucccacgagggcaagacguucuacguccucccgaacgacgacacccugcgcguggaggccuucgaguacuaccacaccaccgaccccagcuuccuggggcgguacauguccgcccucaaccacacgaagaaguggaaguacccccaggugaacggccugaccagcaucaagugggccgacaacaacugcuaccuggcgaccgcccuccugacccugcagcagaucgagcucaaguucaaccccccggcccugcaggacgccuacuaccgcgcgcgggccggggaggccgccaacuucugcgcccugauccucgcguacugcaacaagacggucggcgagcugggcgacgugcgcgagaccauguccuaccuguuccagcacgccaaccucgacagcugcaagcggguccugaacguggugugcaagaccugcgggcagcagcagaccacccugaagggcgucgaggccgugauguacauggggacgcucuccuacgagcaguucaagaagggcgugcagauccccugcaccugcgggaagcaggccaccaaguaccugguccagcaggagagccccuucgugaugauguccgcccccccggcgcaguacgagcugaagcacggcaccuucacgugcgccagcgaguacaccggcaacuaccagugcgggcacuacaagcacaucaccuccaaggagacccucuacugcaucgacggcgcccugcugacgaagagcagcgaguacaaggggcccaucaccgacguguucuacaaggagaacuccuacaccaccacgaucaagcccgucaccuacaagcucgacggcguggugugcaccgagaucgaccccaagcuggacaacuacuacaagaaggacaacagcuacuucaccgagcagccgaucgaccugguccccaaccagcccuaccccaacgccuccuucgacaacuucaaguucgugugcgacaacaucaaguucgccgacgaccucaaccagcugacgggguacaagaagccggcgagccgcgagcugaaggugaccuucuuccccgaccucaacggcgacgucguggccaucgacuacaagcacuacacccccuccuucaagaagggcgccaagcugcugcacaagcccaucguguggcacgucaacaacgccaccaacaaggcgacguacaagccgaacaccuggugcauccggugccucuggagcaccaagcccguggagaccuccaacagcuucgacgugcugaaguccgaggacgcccaggggauggacaaccuggccugcgaggaccucaagcccgucagcgaggaggugguggagaaccccacgauccagaaggacguccuggagugcaacgugaagaccaccgagguggucggcgacaucauccugaagccggccaacaacucccucaagaucaccgaggagguggggcacacggaccugauggccgcguacguggacaacagcucccugaccaucaagaagcccaacgagcucagccgcguccugggccugaagacccucgccacccacgggcuggccgccgugaacuccgugcccugggacacgaucgccaacuacgcgaagccguuccugaacaaggucgugagcaccaccaccaacaucgugacgcgcugccucaaccgggucugcaccaacuacaugcccuacuucuucacccugcugcuccagcugugcaccuucacccgcuccacgaacagccggaucaaggccuccaugcccaccaccaucgccaagaacaccgugaagagcgugggcaaguucugccuggaggccagcuucaacuaccucaagucccccaacuucagcaagcugaucaacaucaucaucugguuccugcuccuguccgucugccugggcagccucaucuacuccacggccgcgcugggggugcugaugagcaaccucggcaugccguccuacugcaccggguaccgcgagggcuaccugaacagcaccaacgugaccaucgccacguacugcaccggcuccauccccugcagcgucugccuguccgggcucgacagccuggacaccuaccccucccuggagaccauccagaucacgaucagcuccuucaagugggaccucaccgccuucggccugguggccgagugguuccuggccuacauccucuucacccgguucuucuacgugcuggggcuggcggccaucaugcagcucuucuucagcuacuucgccguccacuucaucuccaacagcuggcugauguggcugaucaucaaccuggugcagauggcccccaucuccgcgauggugcgcauguacaucuucuucgccagcuucuacuacgucuggaagagcuacgugcacguggucgacggcugcaacuccagcaccugcaugaugugcuacaagcggaaccgcgccacgcggguggagugcaccaccaucgucaacggggugcgccgguccuucuacguguacgccaacggcggcaagggguucugcaagcuccacaacuggaacugcgucaacugcgacaccuucugcgccggcagcacguucaucuccgacgagguggcgcgcgaccugagccugcaguucaagcggccgaucaaccccaccgaccaguccagcuacaucguggacuccgucaccgugaagaacgggagcauccaccucuacuucgacaaggccggccagaagaccuacgagcgccacucccugagccacuucgugaaccuggacaaccuccgggccaacaacacgaaggggucccugcccaucaacgucaucguguucgacggcaagagcaagugcgaggaguccagcgccaaguccgccagcguguacuacucccagcugaugugccagcccauccuccugcuggaccaggcgcucgucagcgacgugggcgacagcgccgagguggccgucaagauguucgacgccuacgugaacaccuucuccagcaccuucaacgugccgauggagaagcugaagacccuggucgccacggcggaggccgagcucgccaagaacgugucccuggacaacgugcugagcaccuucaucuccgccgcgcgccagggguucgucgacagcgacguggagaccaaggacguggucgagugccucaagcugucccaccagagcgacaucgaggugaccggcgacuccugcaacaacuacaugcugacguacaacaagguggagaacaugaccccccgggaccucggggccugcaucgacugcagcgcccgccacaucaacgcccaggucgccaagucccacaacaucgcgcugaucuggaacgugaaggacuucaugagccuguccgagcagcuccggaagcagauccgcagcgccgccaagaagaacaaccugcccuucaagcugaccugcgccaccacgcgccagguggucaacguggugaccaccaagaucgcccucaagggcggguga

SEQ ID NO: 18205 - RNA, 5841 nt, Artificial Sequence
  SARS-CoV-2__MT457400.1__non-structural protein 3 (NSP3) CDS gc
auggcccccaccaaggugaccuucggcgacgacacggucaucgaggugcagggguacaagagcgugaacaucaccuucgagcuggacgagcgcaucgacaagguccucaacgagaagugcuccgccuacaccguggagcugggcaccgaggugaacgaguucgcgugcgucguggccgacgccgugaucaagacgcugcagccggucagcgagcuccugaccccccuggggaucgaccucgacgagugguccauggccaccuacuaccuguucgacgagagcggcgaguucaagcuggccucccacauguacugcagcuucuacccccccgacgaggacgaggaggagggggacugcgaggaggaggaguucgagccguccacccaguacgaguacggcacggaggacgacuaccagggcaagccccucgaguucggggcgaccagcgccgcccugcagcccgaggaggagcaggaggaggacuggcuggacgacgacucccagcagaccgugggccagcaggacgggagcgaguacaaccagaccacgaccauccagaccaucguggagguccagccccagcucgagauggagcugaccccgguggugcagacgaucgaggucaacuccuucagcggcuaccugaagcucaccgacaacguguacaucaagaacgccgacaucguggaggaggcgaagaaggucaagcccaccgugguggucaacgccgccaacguguaccugaagcacgggggcggcguggccggggcccugaacaaggcgaccaacaacgccaugcaggucgaguccgacgacuacaucgccacgaacggcccccucaagguggggggcagcugcguccuguccggccacaaccuggccaagcacugccuccacgugguggggcccaacgucaacaagggcgaggacauccagcugcugaagagcgccuacgagaacuucaaccagcacgaggugcuccuggcgccgcugcucuccgccgggaucuucggcgccgaccccauccacagccugcgggugugcgucgacaccgugcgcaccaacguguaccuggccgucuucgacaagaaccucuacgacaagcugguguccagcuuccuggagaugaagagcgagaagcagguggagcagaagaucgccgagauccccaaggaggaggucaagcccuucaucaccgaguccaagccgagcguggagcagcggaagcaggacgacaagaagaucaaggcgugcguggaggaggucacgaccacccucgaggagaccaaguuccugacggagaaccugcuccuguacaucgacaucaacgggaaccugcaccccgacuccgccacccucgugagcgacaucgacaucaccuuccugaagaaggacgcccccuacaucgugggcgacgucgugcaggagggcgugcugaccgccgucgugauccccacgaagaaggccgggggcaccaccgagaugcucgcgaaggcccugcgcaaggugccgaccgacaacuacaucacgaccuaccccgggcagggccugaacggguacaccgucgaggaggccaagaccgugcucaagaagugcaaguccgccuucuacauccugcccagcaucaucuccaacgagaagcaggagauccugggcaccgugagcuggaaccuccgggagaugcuggcgcacgccgaggagacgcgcaagcugaugcccgucugcguggagaccaaggccaucguguccaccauccagcggaaguacaagggcaucaagauccaggagggggucguggacuacggcgcccgcuucuacuucuacaccagcaagacgaccguggccucccugaucaacacccucaacgaccugaacgagacccuggucacgaugccgcucggguacgugacccacggccugaaccuggaggaggcggcccgguacaugcgcagccucaaggugcccgccaccgucuccgugagcucccccgacgccgugaccgccuacaacggguaccugacgagcuccagcaagacccccgaggagcacuucaucgagaccaucucccuggcgggcagcuacaaggacuggagcuacuccggccagagcacccagcucgggaucgaguuccugaagcggggcgacaaguccgucuacuacacgagcaacccgaccaccuuccaccuggacggggaggugaucaccuucgacaaccucaagacgcugcugucccuccgcgaggugcggaccaucaaggucuucaccaccguggacaacaucaaccugcacacgcagguggucgacaugagcaugaccuacggccagcaguucggccccaccuaccuggacggggccgacgugaccaagaucaagccccacaacucccacgagggcaagacguucuacgugcucccgaacgacgacacccugcgcgucgaggccuucgaguacuaccacaccaccgaccccagcuuccuggggcgguacauguccgcccucaaccacacgaagaaguggaaguacccccaggugaacggccugaccagcaucaagugggccgacaacaacugcuaccuggcgaccgcccuccugacccugcagcagaucgagcucaaguucaaccccccggcccugcaggacgccuacuaccgcgcgcgggccggggaggccgccaacuucugcgcccugauccucgcguacugcaacaagacggugggcgagcugggcgacguccgcgagaccauguccuaccuguuccagcacgccaaccucgacagcugcaagcgggugcugaacgucgugugcaagaccugcgggcagcagcagaccacccugaagggcguggaggccgucauguacauggggacgcucuccuacgagcaguucaagaagggcgugcagauccccugcaccugcgggaagcaggccaccaaguaccuggugcagcaggagagccccuucgucaugauguccgcccccccggcgcaguacgagcugaagcacggcaccuucacgugcgccagcgaguacaccggcaacuaccagugcgggcacuacaagcacaucaccuccaaggagacccucuacugcaucgacggcgcccugcugacgaagagcagcgaguacaaggggcccaucaccgacguguucuacaaggagaacuccuacaccaccacgaucaagcccgugaccuacaagcucgacggcgucgugugcaccgagaucgaccccaagcuggacaacuacuacaagaaggacaacagcuacuucaccgagcagccgaucgaccuggugcccaaccagcccuaccccaacgccuccuucgacaacuucaaguucgucugcgacaacaucaaguucgccgacgaccucaaccagcugacgggguacaagaagccggcgagccgcgagcugaaggugaccuucuuccccgaccucaacggcgacguggucgccaucgacuacaagcacuacacccccuccuucaagaagggcgccaagcugcugcacaagcccaucguguggcacgugaacaacgccaccaacaaggcgacguacaagccgaacaccuggugcauccggugccucuggagcaccaagcccgucgagaccuccaacagcuucgacgugcugaaguccgaggacgcccaggggauggacaaccuggccugcgaggaccucaagcccgugagcgaggaggucguggagaaccccacgauccagaaggacgugcuggagugcaacgucaagaccaccgagguggugggcgacaucauccugaagccggccaacaacucccucaagaucaccgaggaggucgggcacacggaccugauggccgcguacguggacaacagcucccugaccaucaagaagcccaacgagcucagccgcgugcugggccugaagacccucgccacccacgggcuggccgccgucaacuccgugcccugggacacgaucgccaacuacgcgaagccguuccugaacaagguggucagcaccaccaccaacaucgugacgcgcugccucaaccgggugugcaccaacuacaugcccuacuucuucacccugcugcuccagcugugcaccuucacccgcuccacgaacagccggaucaaggccuccaugcccaccaccaucgccaagaacaccgucaagagcgugggcaaguucugccuggaggccagcuucaacuaccucaagucccccaacuucagcaagcugaucaacaucaucaucugguuccugcuccuguccgugugccugggcagccucaucuacuccacggccgcgcuggggguccugaugagcaaccucggcaugccguccuacugcaccggguaccgcgagggcuaccugaacagcaccaacgugaccaucgccacguacugcaccggcuccauccccugcagcgugugccuguccgggcucgacagccuggacaccuaccccucccuggagaccauccagaucacgaucagcuccuucaagugggaccucaccgccuucggccuggucgccgagugguuccuggccuacauccucuucacccgguucuucuacgugcuggggcuggcggccaucaugcagcucuucuucagcuacuucgccgugcacuucaucuccaacagcuggcugauguggcugaucaucaaccugguccagauggcccccaucuccgcgauggugcgcauguacaucuucuucgccagcuucuacuacguguggaagagcuacguccacgugguggacggcugcaacuccagcaccugcaugaugugcuacaagcggaaccgcgccacgcgggucgagugcaccaccaucgugaacgggguccgccgguccuucuacguguacgccaacggcggcaagggguucugcaagcuccacaacuggaacugcgugaacugcgacaccuucugcgccggcagcacguucaucuccgacgaggucgcgcgcgaccugagccugcaguucaagcggccgaucaaccccaccgaccaguccagcuacaucguggacuccgugaccgucaagaacgggagcauccaccucuacuucgacaaggccggccagaagaccuacgagcgccacucccugagccacuucgugaaccuggacaaccuccgggccaacaacacgaaggggucccugcccaucaacgugaucgucuucgacggcaagagcaagugcgaggaguccagcgccaaguccgccagcguguacuacucccagcugaugugccagcccauccuccugcuggaccaggcgcucgugagcgacgucggcgacagcgccgagguggccgugaagauguucgacgccuacgucaacaccuucuccagcaccuucaacgugccgauggagaagcugaagacccugguggccacggcggaggccgagcucgccaagaacgucucccuggacaacgugcugagcaccuucaucuccgccgcgcgccagggguucguggacagcgacgucgagaccaaggacgugguggagugccucaagcugucccaccagagcgacaucgaggucaccggcgacuccugcaacaacuacaugcugacguacaacaagguggagaacaugaccccccgggaccucggggccugcaucgacugcagcgcccgccacaucaacgcccagguggccaagucccacaacaucgcgcugaucuggaacgucaaggacuucaugagccuguccgagcagcuccggaagcagauccgcagcgccgccaagaagaacaaccugcccuucaagcugaccugcgccaccacgcgccagguggugaacgucgugaccaccaagaucgcccucaagggcggguga

SEQ ID NO: 18206 - RNA, 5841 nt, Artificial Sequence
  SARS-CoV-2__MT457401.1__non-structural protein 3 (NSP3) CDS gc
auggcccccaccaaggugaccuucggcgacgacacggucaucgaggugcagggguacaagagcgugaacaucaccuucgagcuggacgagcgcaucgacaagguccucaacgagaagugcuccgccuacaccguggagcugggcaccgaggugaacgaguucgcgugcgucguggccgacgccgugaucaagacgcugcagccggucagcgagcuccugaccccccuggggaucgaccucgacgagugguccauggccaccuacuaccuguucgacgagagcggcgaguucaagcuggccucccacauguacugcagcuucuacccccccgacgaggacgaggaggagggggacugcgaggaggaggaguucgagccguccacccaguacgaguacggcacggaggacgacuaccagggcaagccccucgaguucggggcgaccagcgccgcccugcagcccgaggaggagcaggaggaggacuggcuggacgacgacucccagcagaccgugggccagcaggacgggagcgaggacaaccagaccacgaccauccagaccaucguggagguccagccccagcucgagauggagcugaccccgguggugcagacgaucgaggucaacuccuucagcggcuaccugaagcucaccgacaacguguacaucaagaacgccgacaucguggaggaggcgaagaaggucaagcccaccgugguggucaacgccgccaacguguaccugaagcacgggggcggcguggccggggcccugaacaaggcgaccaacaacgccaugcaggucgaguccgacgacuacaucgccacgaacggccuccugaagguggggggcagcugcguccuguccggccacaaccucgccaagcacugccugcacgugguggggcccaacgucaacaagggcgaggacauccagcugcucaagagcgccuacgagaacuucaaccagcacgaggugcugcuggcgccccuccuguccgccgggaucuucggcgccgacccgauccacagccugcgggugugcgucgacaccgugcgcaccaacguguaccucgccgucuucgacaagaaccuguacgacaagcugguguccagcuuccucgagaugaagagcgagaagcagguggagcagaagaucgccgagauccccaaggaggaggucaagcccuucaucaccgaguccaagcccagcguggagcagcggaagcaggacgacaagaagaucaaggcgugcguggaggaggucacgaccacccuggaggagaccaaguuccugacggagaaccuccugcuguacaucgacaucaacgggaaccuccacccggacuccgccacccuggugagcgacaucgacaucaccuuccugaagaaggacgcccccuacaucgugggcgacgucgugcaggagggcgugcucaccgccgucgugauccccacgaagaaggccgggggcaccaccgagaugcuggcgaaggcccugcgcaaggugcccaccgacaacuacaucacgaccuacccggggcagggccucaacggguacaccgucgaggaggccaagaccgugcugaagaagugcaaguccgccuucuacauccugcccagcaucaucuccaacgagaagcaggagauccucggcaccgugagcuggaaccugcgggagaugcuggcgcacgccgaggagacgcgcaagcugaugcccgucugcguggagaccaaggccaucguguccaccauccagcggaaguacaagggcaucaagauccaggagggggucguggacuacggcgcccgcuucuacuucuacaccagcaagacgaccguggccucccucaucaacacccugaacgaccugaacgagacccucgucacgaugccccugggguacgugacccacggccugaaccucgaggaggcggcccgguacaugcgcagccugaaggugccggccaccgucuccgugagcucccccgacgccgugaccgccuacaacggguaccugacgagcuccagcaagacccccgaggagcacuucaucgagaccaucucccucgcgggcagcuacaaggacuggagcuacuccggccagagcacccagcuggggaucgaguuccugaagcggggcgacaaguccgucuacuacacgagcaaccccaccaccuuccaccucgacggggaggugaucaccuucgacaaccugaagacgcugcucucccugcgcgaggugcggaccaucaaggucuucaccaccguggacaacaucaaccugcacacgcagguggucgacaugagcaugaccuacggccagcaguucggcccgaccuaccucgacggggccgacgugaccaagaucaagccccacaacucccacgagggcaagacguucuacgugcugcccaacgacgacacccugcgcgucgaggccuucgaguacuaccacaccaccgacccgagcuuccucgggcgguacauguccgcccugaaccacacgaagaaguggaaguacccccaggugaacggccugaccagcaucaagugggccgacaacaacugcuaccucgcgaccgcccugcugacccuccagcagaucgagcugaaguucaacccccccgcccugcaggacgccuacuaccgcgcgcgggccggggaggccgccaacuucugcgcccucauccuggcguacugcaacaagacggugggcgagcugggcgacguccgcgagaccauguccuaccucuuccagcacgccaaccuggacagcugcaagcgggugcugaacgucgugugcaagaccugcgggcagcagcagaccacccucaagggcguggaggccgucauguacauggggacgcuguccuacgagcaguucaagaagggcgugcagaucccgugcaccugcgggaagcaggccaccaaguaccuggugcagcaggagagccccuucgucaugauguccgccccccccgcgcaguacgagcucaagcacggcaccuucacgugcgccagcgaguacaccggcaacuaccagugcgggcacuacaagcacaucaccuccaaggagacccuguacugcaucgacggcgcccugcucacgaagagcagcgaguacaaggggccgaucaccgacguguucuacaaggagaacuccuacaccaccacgaucaagcccgugaccuacaagcuggacggcgucgugugcaccgagaucgaccccaagcuggacaacuacuacaagaaggacaacagcuacuucaccgagcagcccaucgaccucgugccgaaccagcccuaccccaacgccuccuucgacaacuucaaguucgucugcgacaacaucaaguucgccgacgaccugaaccagcugacgggguacaagaagcccgcgagccgcgagcucaaggugaccuucuucccggaccugaacggcgacguggucgccaucgacuacaagcacuacacccccuccuucaagaagggcgccaagcugcuccacaagcccaucguguggcacgugaacaacgccaccaacaaggucacguacaagcccaacaccuggugcauccggugccuguggagcaccaagccgguggagaccuccaacagcuucgacgugcugaaguccgaggacgcgcaggggauggacaaccucgccugcgaggaccugaagcccgucagcgaggaggugguggagaaccccacgauccagaaggacguccuggagugcaacgugaagaccaccgagguggucggcgacaucauccucaagcccgccaacaacucccugaagaucaccgaggagguggggcacacggaccugauggccgccuacguggacaacagcucccucaccaucaagaagccgaacgagcugagccgcguccugggccucaagacccuggcgacccacgggcuggccgccgugaacuccgugcccugggacacgaucgccaacuacgccaagcccuuccucaacaaggucgugagcaccaccaccaacaucgugacgcgcugccugaaccgggucugcaccaacuacaugccguacuucuucacccugcuccugcagcugugcaccuucacccgcuccacgaacagccggaucaaggcguccaugcccaccaccaucgccaagaacaccgugaagagcgugggcaaguucugccucgaggccagcuucaacuaccugaagucccccaacuucagcaagcugaucaacaucaucaucugguuccuccugcuguccgucugccucggcagccugaucuacuccacggccgcccugggggugcucaugagcaaccugggcaugcccuccuacugcaccggguaccgcgagggcuaccugaacagcaccaacgugaccaucgcgacguacugcaccggcuccaucccgugcagcgucugccucuccgggcuggacagccuggacaccuaccccucccucgagaccauccagaucacgaucagcuccuucaagugggaccugaccgccuucggccugguggccgagugguuccucgccuacauccuguucacccgguucuucuacgugcuggggcucgccgcgaucaugcagcuguucuucagcuacuucgccguccacuucaucuccaacagcuggcugauguggcugaucaucaaccucgugcagauggcccccaucuccgccauggugcgcauguacaucuucuucgcgagcuucuacuacgucuggaagagcuacgugcacguggucgacggcugcaacuccagcaccugcaugaugugcuacaagcggaaccgcgccacgcggguggagugcaccaccaucgucaacggggugcgccgguccuucuacguguacgccaacggcggcaagggguucugcaagcugcacaacuggaacugcgucaacugcgacaccuucugcgccggcagcacguucaucuccgacgagguggcccgcgaccugagccuccaguucaagcggcccaucaacccgaccgaccaguccagcuacaucguggacuccgucaccgugaagaacgggagcauccaccuguacuucgacaaggcgggccagaagaccuacgagcgccacucccugagccacuucgugaaccucgacaaccugcgggccaacaacacgaaggggucccugcccaucaacgucaucguguucgacggcaagagcaagugcgaggaguccagcgccaaguccgccagcguguacuacucccagcucaugugccagcccauccugcugcucgaccaggcccuggucagcgacgugggcgacagcgcggagguggccgucaagauguucgacgccuacgugaacaccuucuccagcaccuucaacgugcccauggagaagcugaagacccucgucgccacggccgaggcggagcuggccaagaacgugucccuggacaacgugcucagcaccuucaucuccgccgcccgccagggguucgucgacagcgacguggagaccaaggacguggucgagugccugaagcugucccaccagagcgacaucgaggugaccggcgacuccugcaacaacuacaugcucacguacaacaagguggagaacaugaccccgcgggaccugggggcgugcaucgacugcagcgcccgccacaucaacgcccaggucgccaagucccacaacaucgcccugaucuggaacgugaaggacuucaugagccucuccgagcagcugcggaagcagauccgcagcgcggccaagaagaacaaccugcccuucaagcucaccugcgccaccacgcgccagguggucaacguggugaccaccaagaucgcccugaagggcggguga

SEQ ID NO: 18207 - RNA, 5841 nt, Artificial Sequence
  SARS-CoV-2__MT451874.1__non-structural protein 3 (NSP3) CDS gc
auggcccccaccaaggugaccuucggcgacgacacggucaucgaggugcagggguacaagagcgugaacaucaccuucgagcuggacgagcgcaucgacaagguccucaacgagaagugcuccgccuacaccguggagcugggcaccgaggugaacgaguucgcgugcgucguggccgacgccgugaucaagacgcugcagccggucagcgagcuccugaccccccuggggaucgaccucgacgagugguccauggccaccuacuaccuguucgacgagagcggcgaguucaagcuggccucccacauguacugcagcuucuacccccccgacgaggacgaggaggagggggacugcgaggaggaggaguucgagccguccacccaguacgaguacggcacggaggacgacuaccagggcaagccccucgaguucggggcgaccagcgccgcccugcagcccgaggaggagcaggaggaggacuggcuggacgacgacucccagcagaccgugggccagcaggacgggagcgaggacaaccagaccacgaccauccagaccaucguggagguccagccccagcucgagauggagcugaccccgguggugcagacgaucgaggucaacuccuucagcggcuaccugaagcucaccgacaacguguacaucaagaacgccgacaucguggaggaggcgaagaaggucaagcccaccgugguggucaacgccgccaacguguaccugaagcacgggggcggcguggccggggcccugaacaaggcgaccaacaacgccaugcaggucgaguccgacgacuacaucgccacgaacggcccccucaagguggggggcagcugcguccuguccggccacaaccuggccaagcacugccuccacgugguggggcccaacgucaacaagggcgaggacauccagcugcugaagagcgccuacgagaacuucaaccagcacgaggugcuccuggcgccgcugcucuccgccgggaucuucggcgccgaccccauccacagccugcgggugugcgucgacaccgugcgcaccaacguguaccuggccgucuucgacaagaaccucuacgacaagcugguguccagcuuccuggagaugaagagcgagaagcagguggagcagaagaucgccgagauccccaaggaggaggucaagcccuucaucaccgaguccaagccgagcguggagcagcggaagcaggacgacaagaagaucaaggcgugcguggaggaggucacgaccacccucgaggagaccaaguuccugacggagaaccugcuccuguacaucgacaucaacgggaaccugcaccccgacuccgccacccucgugagcgacaucgacaucaccuuccugaagaaggacgcccccuacaucgugggcgacgucgugcaggagggcgugcugaccgccgucgugauccccacgaagaaggccgggggcaccaccgagaugcucgcgaaggcccugcgcaaggugccgaccgacaacuacaucacgaccuaccccgggcagggccugaacggguacaccgucgaggaggccaagaccgugcucaagaagugcaaguccgccuucuacauccugcccagcaucaucuccaacgagaagcaggagauccugggcaccgugagcuggaaccuccgggagaugcuggcgcacgccgaggagacgcgcaagcugaugcccgucugcguggagaccaaggccaucguguccaccauccagcggaaguacaagggcaucaagauccaggagggggucguggacuacggcgcccgcuucuacuucuacaccagcaagacgaccguggccucccugaucaacacccucaacgaccugaacgagacccuggucacgaugccgcucggguacgugacccacggccugaaccuggaggaggcggcccgguacaugcgcagccucaaggugcccgccaccgucuccgugagcucccccgacgccgugaccgccuacaacggguaccugacgagcuccagcaagacccccgaggagcacuucaucgagaccaucucccuggcgggcagcuacaaggacuggagcuacuccggccagagcacccagcucgggaucgaguuccugaagcggggcgacaaguccgucuacuacacgagcaacccgaccaccuuccaccuggacggggaggugaucaccuucgacaaccucaagacgcugcugucccuccgcgaggugcggaccaucaaggucuucaccaccguggacaacaucaaccugcacacgcagguggucgacaugagcaugaccuacggccagcaguucggccccaccuaccuggacggggccgacgugaccaagaucaagccccacaacucccacgagggcaagacguucuacgugcucccgaacgacgacacccugcgcgucgaggccuucgaguacuaccacaccaccgaccccagcuuccuggggcgguacauguccgcccucaaccacacgaagaaguggaaguacccccaggugaacggccugaccagcaucaagugggccgacaacaacugcuaccuggcgaccgcccuccugacccugcagcagaucgagcucaaguucaaccccccggcccugcaggacgccuacuaccgcgcgcgggccggggaggccgccaacuucugcgcccugauccucgcguacugcaacaagacggugggcgagcugggcgacguccgcgagaccauguccuaccuguuccagcacgccaaccucgacagcugcaagcgggugcugaacgucgugugcaagaccugcgggcagcagcagaccacccugaagggcguggaggccgucauguacauggggacgcucuccuacgagcaguucaagaagggcgugcagauccccugcaccugcgggaagcaggccaccaaguaccuggugcagcaggagagccccuucgucaugauguccgcccccccggcgcaguacgagcugaagcacggcaccuucacgugcgccagcgaguacaccggcaacuaccagugcgggcacuacaagcacaucaccuccaaggagacccucuacugcaucgacggcgcccugcugacgaagagcagcgaguacaaggggcccaucaccgacguguucuacaaggagaacuccuacaccaccacgaucaagcccgugaccuacaagcucgacggcgucgugugcaccgagaucgaccccaagcuggacaacuacuacaagaaggacaacagcuacuucaccgagcagccgaucgaccuggugcccaaccagcccuaccccaacgccuccuucgacaacuucaaguucgucugcgacaacaucaaguucgccgacgaccucaaccagcugacgggguacaagaagccggcgagccgcgagcugaaggugaccuucuuccccgaccucaacggcgacguggucgccaucgacuacaagcacuacacccccuccuucaagaagggcgccaagcugcugcacaagcccaucguguggcacgugaacaacgccaccaacaaggcgacguacaagccgaacaccuggugcauccggugccucuggcgcaagaagcccgucgagaccagcaacuccuucgacgugcugaagagcgaggacgcccaggggauggacaaccuggccugcgaggaccucaagcccguguccgaggaggucguggagaaccccaccauccagaaggacgugcuggagugcaacgucaagacgaccgagguggugggcgacaucauccugaagccggccaacaacagccucaagaucaccgaggaggucgggcacaccgaccugauggccgcguacguggacaacuccagccugacgaucaagaagcccaacgagcucucccgcgugcugggccugaagacccucgccacccacgggcuggccgccgucaacagcgugcccugggacaccaucgccaacuacgcgaagccguuccccaacaagguggucuccacgaccaccaacaucgugacccggugccugaaccgcgugugcacgaacuacaugcccuacuucuucacccuccugcugcagcucugcaccuucacccggagcaccaacucccgcaucaaggccagcaugcccacgaccaucgccaagaacaccgucaaguccgugggcaaguucugccuggaggccagcuucaacuaccugaagagcccgaacuucuccaagcucaucaacaucaucaucugguuccugcugcucagcgugugccugggcucccugaucuacagcaccgccgcgcucgggguccugauguccaaccugggcaugcccagcuacugcacgggguaccgggagggcuaccucaacuccaccaacgugaccaucgccaccuacugcacgggcagcauccccugcuccgugugccugagcgggcuggacucccucgacaccuaccccagccuggagaccauccagaucaccaucuccagcuucaagugggaccugacggccuucggccucgucgccgagugguuccuggccuacauccuguucacccgcuucuucuacgugcucgggcuggcggccaucaugcagcuguucuucuccuacuucgccgugcacuucaucagcaacuccuggcucauguggcugaucaucaaccugguccagauggccccgaucagcgcgauggugcggauguacaucuucuucgccuccuucuacuacguguggaagagcuacguccacgugguggacggcugcaacagcuccaccugcaugaugugcuacaagcgcaaccgggccacccgcgucgagugcacgaccaucgugaacgggguccggcgcagcuucuacguguacgccaacggcggcaagggguucugcaagcugcacaacuggaacugcgugaacugcgacaccuucugcgccggcuccaccuucaucagcgacgaggucgcgcgggaccucucccugcaguucaagcgccccaucaaccccacggaccagagcuccuacaucguggacagcgugaccgucaagaacggguccauccaccuguacuucgacaaggccggccagaagaccuacgagcggcacagccucucccacuucgugaaccuggacaaccugcgcgccaacaacaccaaggggagccuccccaucaacgugaucgucuucgacggcaaguccaagugcgaggagagcuccgccaagagcgccuccguguacuacagccagcugaugugccagccgauccugcuccuggaccaggcgcugguguccgacgucggcgacagcgccgagguggccgugaagauguucgacgccuacgucaacacguucagcuccaccuucaacgugcccauggagaagcucaagacccugguggccaccgcggaggccgagcuggccaagaacgucagccucgacaacgugcuguccacguucaucagcgccgcgcggcagggguucguggacuccgacgucgagaccaaggacgugguggagugccugaagcucagccaccaguccgacaucgaggucaccggcgacagcugcaacaacuacaugcugaccuacaacaagguggagaacaugacgccccgcgaccugggggccugcaucgacugcuccgcccggcacaucaacgcccagguggccaagagccacaacaucgcgcucaucuggaacgucaaggacuucaugucccugagcgagcagcugcgcaagcagauccgcuccgccgccaagaagaacaaccuccccuucaagcugaccugcgccaccacccggcagguggugaacgucgugacgaccaagaucgcccugaagggcggguga

SEQ ID NO: 18208 - RNA, 5841 nt, Artificial Sequence
  SARS-CoV-2__MT451888.1__non-structural protein 3 (NSP3) CDS gc
auggcccccaccaaggugaccuucggcgacgacacggucaucgaggugcagggguacaagagcgugaacaucaccuucgagcuggacgagcgcaucgacaagguccucaacgagaagugcuccgccuacaccguggagcugggcaccgaggugaacgaguucgcgugcgucguggccgacgccgugaucaagacgcugcagccggucagcgagcuccugaccccccuggggaucgaccucgacgagugguccauggccaccuacuaccuguucgacgagagcggcgaguucaagcuggccucccacauguacugcagcuucuacccccccgacgaggacgaggaggagggggacugcgaggaggaggaguucgagccguccacccaguacgaguacggcacggaggacgacuaccagggcaagccccucgaguucggggcgaccagcgccgcccugcagcccgaggaggagcaggaggaggacuggcuggacgacgacucccagcagaccgugggccagcaggacgggagcgaggacaaccagaccacgaccauccagaccaucguggagguccagccccagcucgagauggagcugaccccgguggugcagacgaucgaggucaacuccuucagcggcuaccugaagcucaccgacaacguguacaucaagaacgccgacaucguggaggaggcgaagaaggucaagcccaccgugguggucaacgccgccaacguguaccugaagcacgggggcggcguggccggggcccugaacaaggcgaccaacaacgccaugcaggucgaguccgacgacuacaucgccacgaacggcccccucaagguggggggcagcugcguccuguccggccacaaccuggccaagcacugccuccacgugguggggcccaacgucaacaagggcgaggacauccagcugcugaagagcgccuacgagaacuucaaccagcacgaggugcuccuggcgccgcugcucuccgccgggaucuucggcgccgaccccauccacagccugcgggugugcgucgacaccgugcgcaccaacguguaccuggccgucuucgacaagaaccucuacgacaagcugguguccagcuuccuggagaugaagagcgagaagcagguggagcagaagaucgccgagauccccaaggaggaggucaagcccuucaucaccgaguccaagccgagcguggagcagcggaagcaggacgacaagaagaucaaggcgugcguggaggaggucacgaccacccucgaggagaccaaguuccugacggagaaccugcuccuguacaucgacaucaacgggaaccugcaccccgacuccgccacccucgugagcgacaucgacaucaccuuccugaagaaggacgcccccuacaucgugggcgacgucgugcaggagggcgugcugaccgccgucgugauccccacgaagaaggccgggggcaccaccgagaugcucgcgaaggcccugcgcaaggugccgaccgacaacuacaucacgaccuaccccgggcagggccugaacggguacaccgucgaggaggccaagaccgugcucaagaagugcaaguccgccuucuacauccugcccagcaucaucuccaacgagaagcaggagauccugggcaccgugagcuggaaccuccgggagaugcuggcgcacgccgaggagacgcgcaagcugaugcccgucugcguggagaccaaggccaucguguccaccauccagcggaaguacaagggcaucaagauccaggagggggucguggacuacggcgcccgcuucuacuucuacaccagcaagacgaccguggccucccugaucaacacccucaacgaccugaacgagacccuggucacgaugccgcucggguacgugacccacggccugaaccuggaggaggcggcccgguacaugcgcagccucaaggugcccgccaccgucuccgugagcucccccgacgccgugaccgccuacaacggguaccugacgagcuccagcaagacccccgaggagcacuucaucgagaccaucucccuggcgggcagcuacaaggacuggagcuacuccggccagagcacccagcucgggaucgaguuccugaagcggggcgacaaguccgucuacuacacgagcaacccgaccaccuuccaccuggacggggaggugaucaccuucgacaaccucaagacgcugcugucccuccgcgaggugcggaccaucaaggucuucaccaccguggacaacaucaaccugcacacgcagguggucgacaugagcaugaccuacggccagcaguucggccccaccuaccuggacggggccgacgugaccaagaucaagccccacaacucccacgagggcaagacguucuacgugcucccgaacgacgacacccugcgcgucgaggccuucgaguacuaccacaccaccgaccccagcuuccuggggcgguacauguccgcccucaaccacacgaagaaguggaaguacccccaggugaacggccugaccagcaucaagugggccgacaacaacugcuaccuggcgaccgcccuccugacccugcagcagaucgagcucaaguucaaccccccggcccugcaggacgccuacuaccgcgcgcgggccggggaggccgccaacuucugcgcccugauccucgcguacugcaacaagacggugggcgagcugggcgacguccgcgagaccauguccuaccuguuccagcacgccaaccucgacagcugcaagcgggugcugaacgucgugugcaagaccugcgggcagcagcagaccacccugaagggcguggaggccgucauguacauggggacgcucuccuacgagcaguucaagaagggcgugcagauccccugcaccugcgggaagcaggccaccaaguaccuggugcagcaggagagccccuucgucaugauguccgcccccccggcgcaguacgagcugaagcacggcaccuucacgugcgccagcgaguacaccggcaacuaccagugcgggcacuacaagcacaucaccuccaaggagacccucuacugcaucgacggcgcccugcuggccaagagcagcgaguacaaggggcccaucacggacguguucuacaaggagaacuccuacaccaccaccaucaagcccgugacguacaagcucgacggcgucgugugcaccgagaucgaccccaagcuggacaacuacuacaagaaggacaacagcuacuucaccgagcagccgaucgaccuggugcccaaccagcccuaccccaacgccuccuucgacaacuucaaguucgucugcgacaacaucaaguucgcggacgaccucaaccagcugaccggguacaagaagccggccagccgcgagcugaaggugacguucuuccccgaccucaacggcgacguggucgccaucgacuaccggcacuacacccccuccuucaagaagggcgccaagcugcugcacaagcccaucguguggcacgugaacaacgcgaccaacaaggccaccuacaagccgaacacguggugcauccgcugccucuggagcaccaagcccgucgagaccuccaacagcuucgacgugcugaaguccgaggacgcccaggggauggacaaccuggccugcgaggaccucaagcccgugagcgaggaggucguggagaaccccaccauccagaaggacgugcuggagugcaacgucaagacgaccgagguggugggcgacaucauccugaagccggccaacaacucccucaagaucaccgaggaggucgggcacaccgaccugauggcggccuacguggacaacagcucccugacgaucaagaagcccaacgagcucagccgcgugcugggccugaagacccucgccacccacgggcuggccgccgucaacuccgugcccugggacaccaucgcgaacuacgccaagccguuccugaacaagguggucagcacgaccaccaacaucgugacccggugccucaaccgcgugugcacgaacuacaugcccuacuucuucacccugcugcuccagcugugcaccuucacccgguccaccaacagccgcaucaaggccuccaugcccacgaccaucgccaagaacaccgucaagagcgugggcaaguucugccuggaggccagcuucaacuaccucaagucccccaacuucagcaagcugaucaacaucaucaucugguuccugcuccuguccgugugccugggcagccucaucuacuccaccgcggcccuggggguccugaugagcaaccucggcaugccguccuacugcacgggguaccgggagggcuaccugaacagcaccaacgugaccaucgccaccuacugcacgggcuccauccccugcagcgugugccuguccgggcucgacagccuggacaccuaccccucccuggagaccauccagaucaccaucagcuccuucaagugggaccucacggccuucggccuggucgccgagugguuccuggcguacauccucuucacccgcuucuucuacgugcuggggcuggccgccaucaugcagcucuucuucagcuacuucgccgugcacuucaucuccaacagcuggcugauguggcugaucaucaaccugguccagauggcgcccaucuccgccauggugcggauguacaucuucuucgccagcuucuacuacguguggaagagcuacguccacgugguggacggcugcaacuccagcaccugcaugaugugcuacaagcgcaaccgggccacccgcgucgagugcacgaccaucgugaacgggguccggcgcuccuucuacguguacgccaacggcggcaagggguucugcaagcuccacaacuggaacugcgugaacugcgacaccuucugcgcgggcagcaccuucaucuccgacgaggucgcccgggaccugagccugcaguucaagcgcccgaucaaccccacggaccaguccagcuacaucguggacuccgugaccgucaagaacgggagcauccaccucuacuucgacaaggccggccagaagaccuacgagcggcacucccugagccacuucgugaaccuggacaaccuccgcgccaacaacaccaaggggucccugcccaucaacgugaucgucuucgacggcaagagcaagugcgaggaguccagcgccaaguccgcgagcguguacuacucccagcugaugugccagcccauccuccugcuggaccaggcccucgugagcgacgucggcgacagcgccgagguggccgugaagauguucgacgccuacgucaacacguucuccagcaccuucaacgugccgauggagaagcugaagacccugguggcgaccgccgaggccgagcucgccaagaacgucucccuggacaacgugcugagcacguucaucuccgcggcccggcagggguucguggacagcgacgucgagaccaaggacgugguggagugccucaagcugucccaccagagcgacaucgaggucaccggcgacuccugcaacaacuacaugcugaccuacaacaagguggagaacaugacgccccgcgaccucggggccugcaucgacugcagcgcccggcacaucaacgcccagguggcgaagucccacaacaucgcccugaucuggaacgucaaggacuucaugagccuguccgagcagcuccgcaagcagauccgcagcgccgccaagaagaacaaccugcccuucaagcugaccugcgccaccacccggcagguggugaacgucgugacgaccaagaucgcgcucaagggcggguga

SEQ ID NO: 18209 - RNA, 5841 nt, Artificial Sequence
  SARS-CoV-2__MT451889.1__non-structural protein 3 (NSP3) CDS gc
auggcccccaccaaggugaccuucggcgacgacacggucaucgaggugcagggguacaagagcgugaacaucaccuucgagcuggacgagcgcaucgacaagguccucaacgagaagugcuccgccuacaccguggagcugggcaccgaggugaacgaguucgcgugcgucguggccgacgccgugaucaagacgcugcagccggucagcgagcuccugaccccccuggggaucgaccucgacgagugguccauggccaccuacuaccuguucgacgagagcggcgaguucaagcuggccucccacauguacugcagcuucuacccccccgacgaggacgaggaggagggggacugcgaggaggaggaguucgagccguccacccaguacgaguacggcacggaggacgacuaccagggcaagccccucgaguucggggcgaccagcgccgcccugcagcccgaggaggagcaggaggaggacuggcuggacgacgacucccagcagaccgugggccagcaggacgggagcgaggacaaccagaccacgaccauccagaccaucguggagguccagccccagcucgagauggagcugaccccgguggugcagacgaucgaggucaacuccuucagcggcuaccugaagcucaccgacaacguguacaucaagaacgccgacaucguggaggaggcgaagaaggucaagcccaccgugguggucaacgccgccaacguguaccugaagcacgggggcggcguggccggggcccugaacaaggcgaccaacaacgccaugcaggucgaguccgacgacuacaucgccacgaacggcccccucaagguggggggcagcugcguccuguccggccacaaccuggccaagcacugccuccacgugguggggcccaacgucaacaagggcgaggacauccagcugcugaagagcgccuacgagaacuucaaccagcacgaggugcuccuggcgccgcugcucuccgccgggaucuucggcgccgaccccauccacagccugcgggugugcgucgacaccgugcgcaccaacguguaccuggccgucuucgacaagaaccucuacgacaagcugguguccagcuuccuggagaugaagagcgagaagcagguggagcagaagaucgccgagauccccaaggaggaggucaagcccuucaucaccgaguccaagccgagcguggagcagcggaagcaggacgacaagaagaucaaggcgugcguggaggaggucacgaccacccucgaggagaccaaguuccugacggagaaccugcuccuguacaucgacaucaacgggaaccugcaccccgacuccgccacccucgugagcgacaucgacaucaccuuccugaagaaggacgcccccuacaucgugggcgacgucgugcaggagggcgugcugaccgccgucgugauccccacgaagaaggccgggggcaccaccgagaugcucgcgaaggcccugcgcaaggugccgaccgacaacuacaucacgaccuaccccgggcagggccugaacggguacaccgucgaggaggccaagaccgugcucaagaagugcaaguccgccuucuacauccugcccagcaucaucuccaacgagaagcaggagauccugggcaccgugagcuggaaccuccgggagaugcuggcgcacgccgaggagacgcgcaagcugaugcccgucugcguggagaccaaggccaucguguccaccauccagcggaaguacaagggcaucaagauccaggagggggucguggacuacggcgcccgcuucuacuucuacaccagcaagacgaccguggccucccugaucaacacccucaacgaccugaacgagacccuggucacgaugccgcucggguacgugacccacggccugaaccuggaggaggcggcccgguacaugcgcagccucaaggugcccgccaccgucuccgugagcucccccgacgccgugaccgccuacaacggguaccugacgagcuccagcaagacccccgaggagcacuucaucgagaccaucucccuggcgggcagcuacaaggacuggagcuacuccggccagagcacccagcucgggaucgaguuccugaagcggggcgacaaguccgucuacuacacgagcaacccgaccaccuuccaccuggacggggaggugaucaccuucgacaaccucaagacgcugcugucccuccgcgaggugcggaccaucaaggucuucaccaccguggacaacaucaaccugcacacgcagguggucgacaugagcaugaccuacggccagcaguucggccccaccuaccuggacggggccgacgugaccaagaucaagccccacaacucccacgagggcaagacguucuacgugcucccgaacgacgacacccugcgcgucgaggccuucgaguacuaccacaccaccgaccccagcuuccuggggcgguacauguccgcccucaaccacacgaagaaguggaaguacccccaggugaacggccugaccagcaucaagugggccgacaacaacugcuaccuggcgaccgcccuccugacccugcagcagaucgagcucaaguucaaccccccggcccugcaggacgccuacuaccgcgcgcgggccggggaggccgccaacuucugcgcccugauccucgcguacugcaacaagacggugggcgagcugggcgacguccgcgagaccauguccuaccuguuccagcacgccaaccucgacagcugcaagcgggugcugaacgucgugugcaagaccugcgggcagcagcagaccacccugaagggcguggaggccgucauguacauggggacgcucuccuacgagcaguucaagaagggcgugcagauccccugcaccugcgggaagcaggccaccaaguaccuggugcagcaggagagccccuucgucaugauguccgcccccccggcgcaguacgagcugaagcacggcaccuucacgugcgccagcgaguacaccggcaacuaccagugcgggcacuacaagcacaucaccuccaaggagacccucuacugcaucgacggcgcccugcugacgaagagcagcgaguacaaggggcccaucaccgacguguucuacaaggagaacuccuacaccaccacgaucaagcccgugaccuacaagcucgacggcgucgugugcaccgagaucgaccccaagcuggacaacuacuacaagaaggacaacagcuacuucaccgagcagccgaucgaccuggugcccaaccagcccuaccccaacgccuccuucgacaacuucaaguucgucugcgacaacaucaaguucgccggggaccucaaccagcugacgggcuacaagaagccggcgagccgcgagcugaaggugaccuucuuccccgaccucaacggcgacguggucgccaucgacuacaagcacuacacccccuccuucaagaagggggccaagcugcugcacaagcccaucguguggcacgugaacaacgccaccaacaaggcgacguacaagccgaacaccuggugcauccggugccucuggagcaagaagcccgucgagaccuccaacagcuucgacgugcugaaguccgaggacgcccagggcauggacaaccuggccugcgaggaccucaagcccgugagcgaggaggucguggagaaccccaccauccagaaggacgugcuggagugcaacgucaagacgaccgagguggugggggacaucauccugaagccggccaacaacucccucaagaucaccgaggaggucggccacaccgaccugauggccgcguacguggacaacagcucccugacgaucaagaagcccaacgagcucagccgcgugcuggggcugaagacccucgccacccacggccuggccgccgucaacuccgugcccugggacaccaucgccaacuacgcgaagccguuccugaacaagguggucagcacgaccaccaacaucgugacccgcugccucaaccgggugugcacgaacuacaugcccuacuucuucacccugcugcuccagcugugcaccuucacccgcuccaccaacagccggaucaaggccuccaugcccacgaccaucgccaagaacaccgucaagagcgugggcaaguucugccuggaggccagcuucaacuaccucaagucccccaacuucagcaagcugaucaacaucaucaucugguuccugcuccuguccgugugccuggggccgcucaucuacagcaccgccgcgcugggcguccugauguccaaccucgggaugcccagcuacugcacgggcuaccgcgagggcuaccugaacuccaccaacgugaccaucgccaccuacugcacggggagcauccccugcuccgugugccugagcggccucgacucccuggacaccuaccccagccuggagaccauccagaucaccaucuccagcuucaagugggaccucacggccuucgggcuggucgccgagugguuccuggccuacauccucuucacccgguucuucuacgugcugggccuggcggccaucaugcagcucuucuucuccuacuucgccgugcacuucaucagcaacuccuggcugauguggcugaucaucaaccugguccagauggccccgaucagcgcgauggugcgcauguacaucuucuucgccuccuucuacuacguguggaagagcuacguccacgugguggacgggugcaacagcuccaccugcaugaugugcuacaagcggaaccgcgccacccgggucgagugcacgaccaucgugaacggcguccgccggagcuucuacguguacgccaacggcgggaagggcuucugcaagcuccacaacuggaacugcgugaacugcgacaccuucugcgccggguccaccuucaucagcgacgaggucgcgcgcgaccugucccugcaguucaagcggcccaucaaccccacggaccagagcuccuacaucguggacagcgugaccgucaagaacggcuccauccaccucuacuucgacaaggccgggcagaagaccuacgagcgccacagccugucccacuucgugaaccuggacaaccuccgggccaacaacaccaagggcagccugcccaucaacgugaucgucuucgacggcaaguccaagugcgaggagagcuccgccaagagcgccuccguguacuacagccagcugaugugccagccgauccuccugcuggaccaggcgcucguguccgacgucggggacagcgccgagguggccgugaagauguucgacgccuacgucaacacguucagcuccaccuucaacgugcccauggagaagcugaagacccugguggccaccgcggaggccgagcucgccaagaacgucagccuggacaacgugcuguccacguucaucagcgccgcgcgccagggcuucguggacuccgacgucgagaccaaggacgugguggagugccucaagcugagccaccaguccgacaucgaggucaccggggacagcugcaacaacuacaugcugaccuacaacaagguggagaacaugacgccccgggaccucggcgccugcaucgacugcuccgcccgccacaucaacgcccagguggccaagagccacaacaucgcgcugaucuggaacgucaaggacuucaugucccugagcgagcagcuccggaagcagauccgcuccgccgccaagaagaacaaccugcccuucaagcugaccugcgccaccacccgccagguggugaacgucgugacgaccaagaucgcccucaaggggggcuga

SEQ ID NO: 18210 - RNA, 5841 nt, Artificial Sequence
  SARS-CoV-2__MT450936.1__non-structural protein 3 (NSP3) CDS gc
auggcccccaccaaggugaccuucggcgacgacacggucaucgaggugcagggguacaagagcgugaacaucaccuucgagcuggacgagcgcaucgacaagguccucaacgagaagugcuccgccuacaccguggagcugggcaccgaggugaacgaguucgcgugcgucguggccgacgccgugaucaagacgcugcagccggucagcgagcuccugaccccccuggggaucgaccucgacgagugguccauggccaccuacuaccuguucgacgagagcggcgaguucaagcuggccucccacauguacugcagcuucuacccccccgacgaggacgaggaggagggggacugcgaggaggaggaguucgagccguccacccaguacgaguacggcacggaggacgacuaccagggcaagccccucgaguucggggcgaccagcgccgcccugcagcccgaggaggagcaggaggaggacuggcuggacgacgacucccagcagaccgugggccagcaggacgggagcgaggacaaccagaccacgaccauccagaccaucguggagguccagccccagcucgagauggagcugaccccgguggugcagacgaucgaggucaacuccuucagcggcuaccugaagcucaccgacaacguguacaucaagaacgccgacaucguggaggaggcgaagaaggucaagcccaccgugguggucaacgccgccaacguguaccugaagcacgggggcggcguggccggggcccugaacaaggcgaccaacaacgccaugcaggucgaguccgacgacuacaucgccacgaacggcccccucaagguggggggcagcugcguccuguccggccacaaccuggccaagcacugccuccacgugguggggcccaacgucaacaagggcgaggacauccagcugcugaagagcgccuacgagaacuucaaccagcacgaggugcuccuggcgccgcugcucuccgccgggaucuucggcgccgaccccauccacagccugcgggugugcgucgacaccgugcgcaccaacguguaccuggccgucuucgacaagaaccucuacgacaagcugguguccagcuuccuggagaugaagagcgagaagcagguggagcagaagaucgccgagauccccaaggaggaggucaagcccuucaucaccgaguccaagccgagcguggagcagcggaagcaggacgacaagaagaucaaggcgugcguggaggaggucacgaccacccucgaggagaccaaguuccugacggagaaccugcuccuguacaucgacaucaacgggaaccugcaccccgacuccgccacccucgugagcgacaucgacaucaccuuccugaagaaggacgcccccuacaucgugggcgacgucgugcaggagggcgugcugaccgccgucgugauccccacgaagaaggccgggggcaccaccgagaugcucgcgaaggcccugcgcaaggugccgaccgacaacuacaucacgaccuaccccgggcagggccugaacggguacaccgucgaggaggccaagaccgugcucaagaagugcaaguccgccuucuacauccugcccagcaucaucuccaacgagaagcaggagauccugggcaccgugagcuggaaccuccgggagaugcuggcgcacgccgaggagacgcgcaagcugaugcccgucugcguggagaccaaggccaucguguccaccauccagcggaaguacaagggcaucaagauccaggagggggucguggacuacggcgcccgcuucuacuucuacaccagcaagacgaccguggccucccugaucaacacccucaacgaccugaacgagacccuggucacgaugccgcucggguacgugacccacggccugaaccuggaggaggcggcccgguacaugcgcagccucaaggugcccgccaccgucuccgugagcucccccgacgccgugaccgccuacaacggguaccugacgagcuccagcaagacccccgaggagcacuucaucgagaccaucucccuggcgggcagcuacaaggacuggagcuacuccggccagagcacccagcucgggaucgaguuccugaagcggggcgacaaguccgucuacuacacgagcaacccgaccaccuuccaccuggacggggaggugaucaccuucgacaaccucaagacgcugcugucccuccgcgaggugcggaccaucaaggucuucaccaccguggacaacaucaaccugcacacgcagguggucgacaugagcaugaccuacggccagcaguucggccccaccuaccuggacggggccgacgugaccaagaucaagccccacaacucccacgagggcaagacguucuacgugcucccgaacgacgacacccugcgcgucgaggccuucgaguacuaccacaccaccgaccccagcuuccuggggcgguacauguccgcccucaaccacacgaagaaguggaaguacccccaggugaacggccugaccagcaucaagugggccgacaacaacugcuaccuggcgaccgcccuccugacccugcagcagaucgagcucaaguucaaccccccggcccugcaggacgccuacuaccgcgcgcgggccggggaggccgccaacuucugcgcccugauccucgcguacugcaacaagacggugggcgagcugggcgacguccgcgagaccauguccuaccuguuccagcacgccaaccucgacagcugcaagcgggugcugaacgucgugugcaagaccugcgggcagcagcagaccacccugaagggcguggaggccgucauguacauggggacgcucuccuacgagcaguucaagaagggcgugcagauccccugcaccugcgggaagcaggccaccaaguaccuggugcagcaggagagccccuucgucaugauguccgcccccccggcgcaguacgagcugaagcacggcaccuucacgugcgccagcgaguacaccggcaacuaccagugcgggcacuacaagcacaucaccuccaaggagacccucuacugcaucgacggcgcccugcugacgaagagcagcgaguacaaggggcccaucaccgacguguucuacaaggagaacuccuacaccaccacgaucaagcccgugaccuacaagcucgacggcgucgugugcaccgagaucgaccccaagcuggacaacuacuacaagaaggacaacagcuacuucaccgagcagccgaucgaccuggugcccaaccagcccuaccccaacgccuccuucgacaacuucaaguucgucugcgacaacaucaaguucgccgacgaccucaaccagcugacgggguacaagaagccggcgagccgcgagcugaaggugaccuucuuccccgaccucaacggcgacguggucgccaucgacuacaagcacuacacccccuccuucaagaagggcgccaagcugcugcacaagcccaucguguggcacgugaacaacgccaccaacaaggcgacguacaagccgaacaccuggugcauccggugccucuggagcaccaagcccgucgagaccuccaacagcuucgacgugcugaaguccgaggacgcccaggggauggacaaccuggccugcgaggaccucaagcccgugagcgaggaggucguggagaaccccacgauccagaaggacgugcuggagugcaacgucaagaccaccgagguggugggcgacaucauccugaagccggccaacaacucccucaagaucaccgaggaggucgggcacacggaccugauggccgcguacguggacaacagcucccugaccaucaagaagcccaacgagcucagccgcgugcugggccugaagacccucgccacccacgggcuggccgccgucaacuccgugcccugggacacgaucgccaacuacgcgaagccguuccugaacaagguggucagcaccaccaccaacaucgugacgcgcugccucaaccgggugugcaccaacuacaugcccuacuucuucacccugcugcuccagcugugcaccuucacccgcuccacgaacagccggaucaaggccuccaugcccaccaccaucgccaagaacaccgucaagagcgugggcaaguucugccuggaggccagcuucaacuaccucaagucccccaacuucagcaagcugaucaacaucaucaucugguuccugcuccugaucaucugccugggcucccucaucuacagcacggccgcgcugggggugcugauguccaaccucggcaugccgagcuacugcaccggguaccgcgagggcuaccugaacuccaccaacgucaccaucgccacguacugcaccggcagcauccccugcuccgugugccugagcgggcucgacucccuggacaccuaccccagccuggagaccauccagaucacgaucuccagcuucaagugggaccucaccgccuucggccugguggccgagugguuccuggccuacauccucuucacccgguucuucuacguccuggggcuggcggccaucaugcagcucuucuucuccuacuucgccgugcacuucaucagcaacuccuggcugauguggcugaucaucaaccuggugcagauggcccccaucagcgcgaugguccgcauguacaucuucuucgccuccuucuacuacguguggaagagcuacgugcacgucguggacggcugcaacagcuccaccugcaugaugugcuacaagcggaaccgcgccacgcggguggagugcaccaccaucgucaacggggugcgccggagcuucuacgucuacgccaacggcggcaagggguucugcaagcuccacaacuggaacugcgugaacugcgacaccuucugcgccggcuccacguucaucagcgacgagguggcgcgcgaccugucccugcaguucaagcggccgaucaaccccaccgaccagagcuccuacaucgucgacagcgugaccgugaagaacggguccauccaccucuacuucgacaaggccggccagaagaccuacgagcgccacagccugucccacuucgucaaccuggacaaccuccgggccaacaacacgaaggggagccugcccaucaacgugaucguguucgacggcaaguccaagugcgaggagagcuccgccaagagcgccuccgucuacuacagccagcugaugugccagcccauccuccugcuggaccaggcgcucguguccgacgugggcgacagcgccgaggucgccgugaagauguucgacgccuacgugaacaccuucagcuccaccuucaacgucccgauggagaagcugaagacccugguggccacggcggaggccgagcucgccaagaacgugagccuggacaacguccuguccaccuucaucagcgccgcgcgccagggguucguggacuccgacguggagaccaaggacgucguggagugccucaagcugagccaccaguccgacaucgaggugaccggcgacagcugcaacaacuacaugcugacguacaacaaggucgagaacaugaccccccgggaccucggggccugcaucgacugcuccgcccgccacaucaacgcccagguggccaagagccacaacaucgcgcugaucuggaacgugaaggacuucaugucccugagcgagcagcuccggaagcagauccgcuccgccgccaagaagaacaaccugcccuucaagcugaccugcgccaccacgcgccaggucgugaacguggucaccaccaagaucgcccucaagggcggguga

SEQ ID NO: 18211 - RNA, 5841 nt, Artificial Sequence
  SARS-CoV-2__MT450951.1__non-structural protein 3 (NSP3) CDS gc
auggcccccaccaaggugaccuucggcgacgacacggucaucgaggugcagggguacaagagcgugaacaucaccuucgagcuggacgagcgcaucgacaagguccucaacgagaagugcuccgccuacaccguggagcugggcaccgaggugaacgaguucgcgugcgucguggccgacgccgugaucaagacgcugcagccggucagcgagcuccugaccccccuggggaucgaccucgacgagugguccauggccaccuacuaccuguucgacgagagcggcgaguucaagcuggccucccacauguacugcagcuucuacccccccgacgaggacgaggaggagggggacugcgaggaggaggaguucgagccguccacccaguacgaguacggcacggaggacgacuaccagggcaagccccucgaguucggggcgaccagcgccgcccugcagcccgaggaggagcaggaggaggacuggcuggacgacgacucccagcagaccgugggccagcaggacgggagcgaggacaaccagaccacgaccauccagaccaucguggagguccagccccagcucgagauggagcugaccccgguggugcagacgaucgaggucaacuccuucagcggcuaccugaagcucaccgacaacguguacaucaagaacgccgacaucguggaggaggcgaagaaggucaagcccaccgugguggucaacgccgccaacguguaccugaagcacgggggcggcguggccggggcccugaacaaggcgaccaacaacgccaugcaggucgaguccgacgacuacaucgccacgaacggcccccucaagguggggggcagcugcguccuguccggccacaaccuggccaagcacugccuccacgugguggggcccaacgucaacaagggcgaggacauccagcugcugaagagcgccuacgagaacuucaaccagcacgaggugcuccuggcgccgcugcucuccgccgggaucuucggcgccgaccccauccacagccugcgggugugcgucgacaccgugcgcaccaacguguaccuggccgucuucgacaagaaccucuacgacaagcugguguccagcuuccuggagaugaagagcgagaagcagguggagcagaagaucgccgagauccccaaggaggaggucaagcccuucaucaccgaguccaagccgagcguggagcagcggaagcaggacgacaagaagaucaaggcgugcguggaggaggucacgaccacccucgaggagaccaaguuccugacggagaaccugcuccuguacaucgacaucaacgggaaccugcaccccgacuccgccacccucgugagcgacaucgacaucaccuuccugaagaaggacgcccccuacaucgugggcgacgucgugcaggagggcgugcugaccgccgucgugauccccacgaagaaggccgggggcaccaccgagaugcucgcgaaggcccugcgcaaggugccgaccgacaacuacaucacgaccuaccccgggcagggccugaacggguacaccgucgaggaggccaagaccgugcucaagaagugcaaguccgccuucuacauccugcccagcaucaucuccaacgagaagcaggagauccugggcaccgugagcuggaaccuccgggagaugcuggcgcacgccgaggagacgcgcaagcugaugcccgucugcguggagaccaaggccaucguguccaccauccagcggaaguacaagggcaucaagauccaggagggggucguggacuacggcgcccgcuucuacuucuacaccagcaagacgaccguggccucccugaucaacacccucaacgaccugaacgagacccuggucacgaugccgcucggguacgugacccacggccugaaccuggaggaggcggcccgguacaugcgcagccucaaggugcccgccaccgucuccgugagcucccccgacgccgugaccgccuacaacggguaccugacgagcuccagcaagacccccgaggagcacuucaucgagaccaucucccuggcgggcagcuacaaggacuggagcuacuccggccagagcacccagcucgggaucgaguuccugaagcggggcgacaaguccgucuacuacacgagcaacccgaccaccuuccaccuggacggggaggugaucaccuucgacaaccucaagacgcugcugucccuccgcgaggugcggaccaucaaggucuucaccaccguggacaacaucaaccugcacacgcagguggucgacaugagcaugaccuacggccagcaguucggccccaccuaccuggacggggccgacgugaccaagaucaagccccacaacucccacgagggcaagacguucuacgugcucccgaacgacgacacccugcgcgucgaggccuucgaguacuaccacaccaccgaccccagcuuccuggggcgguacauguccgcccucaaccacacgaagaaguggaaguacccccaggugaacggccugaccagcaucaagugggccgacaacaacugcuaccuggcgaccgcccuccugacccugcagcagaucgagcucaaguucaaccccccggcccugcaggacgccuacuaccgcgcgcgggccggggaggccgccaacuucugcgcccugauccucgcguacugcaacaagacggugggcgagcugggcgacguccgcgagaccauguccuaccuguuccagcacgccaaccucgacagcugcaagcgggugcugaacgucgugugcaagaccugcgggcagcagcagaccacccugaagggcguggaggccgucauguacauggggacgcucuccuacgagcaguucaagaagggcgugcagauccccugcaccugcgggaagcaggccaccaaguaccuggugcagcaggagagccccuucgucaugauguccgcccccccggcgcaguacgagcugaagcacggcaccuucacgugcgccagcgaguacaccggcaacuaccagugcgggcacuacaagcacaucaccuccaaggagacccucuacugcaucgacggcgcccugcugacgaagagcagcgaguacaaggggcccaucaccgacguguucuacaaggagaacuccuacaccaccacgaucaagcccgugaccuacaagcucgacggcgucgugugcaccgagaucgaccccaagcuggacaacuacuacaagaaggacaacagcuacuucaccgagcagccgaucgaccuggugcccaaccagcccuaccccaacgccuccuucgacaacuucaaguucgucugcgacaacaucaaguucgccgacgaccucaaccagcugacgggguacaagaagccggcgagccgcgagcugaaggugaccuucuuccccgaccucaacggcgacguggucgccaucgacuacaagcacuacacccccuccuucaagaagggcgccaagcugcugcacaagcccaucguguggcacgugaacaacgccaccaacaaggcgacguacaagccgaacaccuggugcauccggugccucuggagcaccaagcccgucgagaccuccaacagcuucgacgugcugaaguccgaggacgcccaggggauggacaaccuggccugcgaggaccucaagcccgugagcgaggaggucguggagaaccccacgauccagaaggacgugcuggagugcaacgucaagaccaccgagguggugggcgacaucauccugaagccggccaacaacucccucaagaucaccgaggaggucgggcacacggaccugauggccgcguacguggacaacagcucccugaccaucaagaagcccaacgagcucagccgcgugcugggccugaagacccucgccacccacgggcuggccgccgucaacuccgugcccugggacacgaucgccaacuacgcgaagccguuccugaacaagguggucagcaccaccaccaacaucgugacgcgcugccucaaccgggugugcaccaacuacaugcccuacuucuucacccugcugcuccagcugugcaccuucacccgcuccacgaacagccggaucaaggccuccaugcccaccaccaucgccaagaacaccgucaagagcgugggcaaguucugccuggaggccagcuucaacuaccucaagucccccaacuucagcaagcugaucaacaucaucaucugguuccugcuccuguccgugugccugggcagccucaucuacuccacggccgcgcuggggguccugaugagcaaccucggcaugccguccuacugcaccggguaccgcgagggcuaccugaacagcaccaacgugaccaucgccacguacugcaccggcuccauccccuacagcgugugccuguccgggcucgacagccuggacaccuaccccucccuggagaccauccagaucacgaucagcuccuucaagugggaccucaccgccuucggccuggucgccgagugguuccuggccuacauccucuucacccgguucuucuacgugcuggggcuggcggccaucaugcagcucuucuucagcuacuucgccgugcacuucaucuccaacagcuggcugauguggcugaucaucaaccugguccagauggcccccaucuccgcgauggugcgcauguacaucuucuucgccagcuucuacuacguguggaagagcuacguccacgugguggacggcugcaacuccagcaccugcaugaugugcuacaagcggaaccgcgccacgcgggucgagugcaccaccaucgugaacgggguccgccgguccuucuacguguacgccaacggcggcaagggguucugcaagcuccacaacuggaacugcgugaacugcgacaccuucugcgccggcagcacguucaucuccgacgaggucgcgcgcgaccugagccugcaguucaagcggccgaucaaccccaccgaccaguccagcuacaucguggacuccgugaccgucaagaacgggagcauccaccucuacuucgacaaggccggccagaagaccuacgagcgccacucccugagccacuucgugaaccuggacaaccuccgggccaacaacacgaaggggucccugcccaucaacgugaucgucuucgacggcaagagcaagugcgaggaguccagcgccaaguccgccagcguguacuacucccagcugaugugccagcccauccuccugcuggaccaggcgcucgugagcgacgucggcgacagcgccgagguggccgugaagauguucgacgccuacgucaacaccuucuccagcaccuucaacgugccgauggagaagcugaagacccugguggccacggcggaggccgagcucgccaagaacgucucccuggacaacgugcugagcaccuucaucuccgccgcgcgccagggguucguggacagcgacgucgagaccaaggacgugguggagugccucaagcugucccaccagagcgacaucgaggucaccggcgacuccugcaacaacuacaugcugacguacaacaagguggagaacaugaccccccgggaccucggggccugcaucgacugcagcgcccgccacaucaacgcccagguggccaagucccacaacaucgcgcugaucuggaacgucaaggacuucaugagccuguccgagcagcuccggaagcagauccgcagcgccgccaagaagaacaaccugcccuucaagcugaccugcgccaccacgcgccagguggugaacgucgugaccaccaagaucgcccucaagggcggguga

SEQ ID NO: 18212 - RNA, 5841 nt, Artificial Sequence
  SARS-CoV-2__MT451017.1__non-structural protein 3 (NSP3) CDS gc
auggcccccaccaaggugaccuucggcgacgacacggucaucgaggugcagggguacaagagcgugaacaucaccuucgagcuggacgagcgcaucgacaagguccucaacgagaagugcuccgccuacaccguggagcugggcaccgaggugaacgaguucgcgugcgucguggccgacgccgugaucaagacgcugcagccggucagcgagcuccugaccccccuggggaucgaccucgacgagugguccauggccaccuacuaccuguucgacgagagcggcgaguucaagcuggccucccacauguacugcagcuucuacccccccgacgaggacgaggaggagggggacugcgaggaggaggaguucgagccguccacccaguacgaguacggcacggaggacgacuaccagggcaagccccucgaguucggggcgaccagcgccgcccugcagcuggaggaggagcaggaggaggacuggcucgacgacgacucccagcagaccgugggccagcaggacgggagcgaggacaaccagaccacgaccauccagaccaucguggagguccagccccagcuggagauggagcugacccccguggugcagacgaucgaggucaacuccuucagcggcuaccucaagcugaccgacaacguguacaucaagaacgccgacaucguggaggaggcgaagaaggucaagccgaccgugguggucaacgccgccaacguguaccugaagcacgggggcggcguggccggggcccucaacaaggcgaccaacaacgccaugcaggucgaguccgacgacuacaucgccacgaacggcccccugaagguggggggcagcugcguccuguccggccacaaccucgccaagcacugccugcacgugguggggcccaacgucaacaagggcgaggacauccagcugcucaagagcgccuacgagaacuucaaccagcacgaggugcugcuggcgccccuccuguccgccgggaucuucggcgccgacccgauccacagccugcgggugugcgucgacaccgugcgcaccaacguguaccucgccgucuucgacaagaaccuguacgacaagcugguguccagcuuccucgagaugaagagcgagaagcagguggagcagaagaucgccgagauccccaaggaggaggucaagcccuucaucaccgaguccaagcccagcguggagcagcggaagcaggacgacaagaagaucaaggcgugcguggaggaggucacgaccacccuggaggagaccaaguuccugacggagaaccuccugcuguacaucgacaucaacgggaaccuccacccggacuccgccacccuggugagcgacaucgacaucaccuuccugaagaaggacgcccccuacaucgugggcgacgucgugcaggagggcgugcucaccgccgucgugauccccacgaagaaggccgggggcaccaccgagaugcuggcgaaggcccugcgcaaggugcccaccgacaacuacaucacgaccuacccggggcagggccucaacggguacaccgucgaggaggccaagaccgugcugaagaagugcaaguccgccuucuacauccugcccagcaucaucuccaacgagaagcaggagauccucggcaccgugagcuggaaccugcgggagauguucgcgcacgccgaggagacgcgcaagcugaugcccgucugcguggagaccaaggccaucguguccaccauccagcggaaguacaagggcaucaagauccaggagggggucguggacuacggcgcccgcuucuacuucuacaccagcaagacgaccguggccucccugaucaacacccucaacgaccugaacgagacccuggucacgaugccccucggguacgugacccacggccugaaccuggaggaggcggcccgguacaugcgcagccucaaggugccggccaccgucuccgugagcucccccgacgccgugaccgccuacaacggguaccugacgagcuccagcaagacccccgaggagcacuucaucgagaccaucucccuggcgggcagcuacaaggacuggagcuacuccggccagagcacccagcucgggaucgaguuccugaagcggggcgacaaguccgucuacuacacgagcaaccccaccaccuuccaccuggacggggaggugaucaccuucgacaaccucaagacgcugcugucccuccgcgaggugcggaccaucaaggucuucaccaccguggacaacaucaaccugcacacgcagguggucgacaugagcaugaccuacggccagcaguucggcccgaccuaccuggacggggccgacgugaccaagaucaagccccacaacucccacgagggcaagacguucuacgugcuccccaacgacgacacccugcgcgucgaggccuucgaguacuaccacaccaccgacccgagcuuccuggggcgguacauguccgcccucaaccacacgaagaaguggaaguacccccaggugaacggccugaccagcaucaagugggccgacaacaacugcuaccuggcgaccgcccuccugacccugcagcagaucgagcucaaguucaacccccccgcccugcaggacgccuacuaccgcgcgcgggccggggaggccgccaacuucugcgcccugauccucgcguacugcaacaagacggugggcgagcugggcgacguccgcgagaccauguccuaccuguuccagcacgccaaccucgacagcugcaagcgggugcugaacgucgugugcaagaccugcgggcagcagcagaccacccugaagggcguggaggccgucauguacauggggacgcucuccuacgagcaguucaagaagggcgugcagaucccgugcaccugcgggaagcaggccaccaaguaccuggugcagcaggagagccccuucgucaugauguccgccccccccgcgcaguacgagcugaagcacggcaccuucacgugcgccagcgaguacaccggcaacuaccagugcgggcacuacaagcacaucaccuccaaggagacccucuacugcaucgacggcgcccugcugacgaagagcagcgaguacaaggggccgaucaccgacguguucuacaaggagaacuccuacaccaccacgaucaagcccgugaccuacaagcucgacggcgucgugugcaccgagaucgaccccaagcuggacaacuacuacaagaaggacaacagcuacuucaccgagcagcccaucgaccuggugccgaaccagcccuaccccaacgccuccuucgacaacuucaaguucgucugcgacaacaucaaguucgccgacgaccucaaccagcugacgggguacaagaagcccgcgagccgcgagcugaaggugaccuucuucccggaccucaacggcgacguggucgccaucgacuacaagcacuacacccccuccuucaagaagggcgccaagcugcugcacaagcccaucguguggcacgugaacaacgccaccaacaaggcgacguacaagcccaacaccuggugcauccggugccucuggagcaccaagccggucgagaccuccaacagcuucgacgugcugaaguccgaggacgcccaggggauggacaaccuggccugcgaggaccucaagcccgugagcgaggaggucguggagaaccccacgauccagaaggacgugcuggagugcaacgucaagaccaccgagguggugggcgacaucauccugaagcccgccaacaacucccucaagaucaccgaggaggucgggcacacggaccugauggccgcguacguggacaacagcucccugaccaucaagaagccgaacgagcucagccgcgugcugggccugaagacccucgccacccacgggcuggccgccgucaacuccgugcccugggacacgaucgccaacuacgcgaagcccuuccugaacaagguggucagcaccaccaccaacaucgugacgcgcugccucaaccgggugugcaccaacuacaugccguacuucuucacccugcugcuccagcugugcaccuucacccgcuccacgaacagccggaucaaggccuccaugcccaccaccaucgccaagaacaccgucaagagcgugggcaaguucugccuggaggccagcuucaacuaccucaagucccccaacuucagcaagcugaucaacaucaucaucugguuccugcuccuguccgugugccugggcagccucaucuacuccacggccgcgcuggggguccugaugagcaaccucggcaugcccuccuacugcaccggguaccgcgagggcuaccugaacagcaccaacgugaccaucgccacguacugcaccggcuccaucccgugcagcgugugccuguccgggcucgacagccuggacaccuaccccucccuggagaccauccagaucacgaucagcuccuucaagugggaccucaccgccuucggccuggucgccgagugguuccuggccuacauccucuucacccgguucuucuacgugcuggggcuggcggccaucaugcagcucuucuucagcuacuucgccgugcacuucaucuccaacagcuggcugauguggcugaucaucaaccugguccagauggcccccaucuccgcgauggugcgcauguacaucuucuucgccagcuucuacuacguguggaagagcuacguccacgugguggacggcugcaacuccagcaccugcaugaugugcuacaagcggaaccgcgccacgcgggucgagugcaccaccaucgugaacgggguccgccgguccuucuacguguacgccaacggcggcaagggguucugcaagcuccacaacuggaacugcgugaacugcgacaccuucugcgccggcagcacguucaucuccgacgaggucgcgcgcgaccugagccugcaguucaagcggcccaucaacccgaccgaccaguccagcuacaucguggacuccgugaccgucaagaacgggagcauccaccucuacuucgacaaggccggccagaagaccuacgagcgccacucccugagccacuucgugaaccuggacaaccuccgggccaacaacacgaaggggucccugcccaucaacgugaucgucuucgacggcaagagcaagugcgaggaguccagcgccaaguccgccagcguguacuacucccagcugaugugccagcccauccuccugcuggaccaggcgcucgugagcgacgucggcgacagcgccgagguggccgugaagauguucgacgccuacgucaacaccuucuccagcaccuucaacgugcccauggagaagcugaagacccugguggccacggcggaggccgagcucgccaagaacgucucccuggacaacgugcugagcaccuucaucuccgccgcgcgccagggguucguggacagcgacgucgagaccaaggacgugguggagugccucaagcugucccaccagagcgacaucgaggucaccggcgacuccugcaacaacuacaugcugacguacaacaagguggagaacaugaccccgcgggaccucggggccugcaucgacugcagcgcccgccacaucaacgcccagguggccaagucccacaacaucgcgcugaucuggaacgucaaggacuucaugagccuguccgagcagcuccggaagcagauccgcagcgccgccaagaagaacaaccugcccuucaagcugaccugcgccaccacgcgccagguggugaacgucgugaccaccaagaucgcccucaagggcggguga

SEQ ID NO: 18213 - RNA, 5841 nt, Artificial Sequence
  SARS-CoV-2__MT451142.1__non-structural protein 3 (NSP3) CDS gc
auggcccccaccaaggugaccuucggcgacgacacggucaucgaggugcagggguacaagagcgugaacaucaccuucgagcuggacgagcgcaucgacaagguccucaacgagaagugcuccgccuacaccguggagcugggcaccgaggugaacgaguucgcgugcgucguggccgacgccgugaucaagacgcugcagccggucagcgagcuccugaccccccuggggaucgaccucgacgagugguccauggccaccuacuaccuguucgacgagagcggcgaguucaagcugaccucccacauguacugcagcuucuacccccccgacgaggacgaggaggagggggacugcgaggaggaggaguucgagccguccacgcaguacgaguacggcaccgaggacgacuaccagggcaagccccucgaguucggggccaccagcgcggcccugcagcccgaggaggagcaggaggaggacuggcuggacgacgacucccagcagaccgugggccagcaggacgggagcgaggacaaccagacgaccaccauccagaccaucguggagguccagccccagcucgagauggagcugacgccgguggugcagaccaucgaggucaacuccuucagcggcuaccugaagcucaccgacaacguguacaucaagaacgccgacaucguggaggaggccaagaaggucaagcccaccgugguggucaacgcggccaacguguaccugaagcacgggggcggcguggccggggcccugaacaaggccacgaacaacgcgaugcaggucgaguccgacgacuacaucgccaccaacggcccccucaagguggggggcagcugcguccuguccggccacaaccuggccaagcacugccuccacgugguggggcccaacgucaacaagggcgaggacauccagcugcugaagagcgccuacgagaacuucaaccagcacgaggugcuccuggccccgcugcucuccgcggggaucuucggcgccgaccccauccacagccugcgggugugcgucgacaccgugcgcaccaacguguaccuggccgucuucgacaagaaccucuacgacaagcugguguccagcuuccuggagaugaagagcgagaagcagguggagcagaagaucgccgagauccccaaggaggaggucaagcccuucaucacggaguccaagccgagcguggagcagcggaagcaggacgacaagaagaucaaggccugcguggaggaggucaccaccacccucgaggagacgaaguuccugaccgagaaccugcuccuguacaucgacaucaacgggaaccugcaccccgacuccgcgacccucgugagcgacaucgacaucaccuuccugaagaaggacgcccccuacaucgugggcgacgucgugcaggagggcgugcugacggccgucgugauccccaccaagaaggccgggggcaccaccgagaugcucgccaaggcgcugcgcaaggugccgacggacaacuacaucaccaccuaccccgggcagggccugaacggguacaccgucgaggaggccaagaccgugcucaagaagugcaaguccgccuucuacauccugcccagcaucaucuccaacgagaagcaggagauccugggcacggugagcuggaaccuccgggagaugcuggcccacgcggaggagacccgcaagcugaugcccgucugcguggagaccaaggccaucguguccaccauccagcggaaguacaagggcaucaagauccaggagggggucguggacuacggcgcccgcuucuacuucuacacgagcaagaccaccguggccucccugaucaacacccucaacgaccugaacgagacgcuggucaccaugccgcucggguacgugacccacggccugaaccuggaggaggccgcgcgguacaugcgcagccucaaggugcccgccaccgucuccgugagcucccccgacgccgugacggccuacaacggguaccugaccagcuccagcaagacccccgaggagcacuucaucgagaccaucucccuggccggcagcuacaaggacuggagcuacuccggccagagcacgcagcucgggaucgaguuccugaagcggggcgacaaguccgucuacuacaccagcaacccgaccaccuuccaccuggacggggaggugaucacguucgacaaccucaagacccugcugucccuccgcgaggugcggaccaucaaggucuucaccacgguggacaacaucaaccugcacacccagguggucgacaugagcaugaccuacggccagcaguucggccccaccuaccuggacggggcggacgugacgaagaucaagccccacaacucccacgagggcaagaccuucuacgugcucccgaacgacgacacccugcgcgucgaggccuucgaguacuaccacaccacggaccccagcuuccuggggcgguacauguccgcccucaaccacaccaagaaguggaaguacccccaggugaacggccugaccagcaucaagugggccgacaacaacugcuaccuggccaccgcgcuccugacgcugcagcagaucgagcucaaguucaaccccccggcccugcaggacgccuacuaccgcgcccgggcgggggaggccgccaacuucugcgcccugauccucgccuacugcaacaagaccgugggcgagcugggcgacguccgcgagaccauguccuaccuguuccagcacgcgaaccucgacagcugcaagcgggugcugaacgucgugugcaagaccugcgggcagcagcagaccacgcugaagggcguggaggccgucauguacauggggacccucuccuacgagcaguucaagaagggcgugcagauccccugcaccugcgggaagcaggccaccaaguaccuggugcagcaggagagccccuucgucaugauguccgcccccccggcccaguacgagcugaagcacggcacguucaccugcgcgagcgaguacaccggcaacuaccagugcgggcacuacaagcacaucaccuccaaggagacgcucuacugcaucgacggcgcccugcugaccaagagcagcgaguacaaggggcccaucaccgacguguucuacaaggagaacuccuacaccacgaccaucaagcccgugaccuacaagcucgacggcgucgugugcaccgagaucgaccccaagcuggacaacuacuacaagaaggacaacagcuacuucacggagcagccgaucgaccuggugcccaaccagcccuaccccaacgccuccuucgacaacuucaaguucgucugcgacaacaucaaguucgccgacgaccucaaccagcugaccggguacaagaagccggccagccgcgagcugaaggugaccuucuuccccgaccucaacggcgacguggucgcgaucgacuacaagcacuacacccccuccuucaagaagggcgccaagcugcugcacaagcccaucguguggcacgugaacaacgccacgaacaaggccaccuacaagccgaacaccuggugcauccggugccucuggagcaccaagcccgucgagacguccaacagcuucgacgugcugaaguccgaggacgcgcaggggauggacaaccuggccugcgaggaccucaagcccgugagcgaggaggucguggagaaccccaccauccagaaggacgugcuggagugcaacgucaagaccaccgagguggugggcgacaucauccugaagccggccaacaacucccucaagaucacggaggaggucgggcacaccgaccugauggccgccuacguggacaacagcucccugaccaucaagaagcccaacgagcucagccgcgugcugggccugaagacccucgcgacgcacgggcuggccgccgucaacuccgugcccugggacaccaucgccaacuacgccaagccguuccugaacaagguggucagcaccaccacgaacaucgugacccgcugccucaaccgggugugcaccaacuacaugcccuacuucuucacccugcugcuccagcugugcaccuucacgcgcuccaccaacagccggaucaaggcguccaugcccaccaccaucgccaagaacacggucaagagcgugggcaaguucugccuggaggccagcuucaacuaccucaagucccccaacuucagcaagcugaucaacaucaucaucugguuccugcuccuguccgugugccugggcagccucaucuacuccaccgccgcccuggggguccugaugagcaaccucggcaugccguccuacugcaccggguaccgcgagggcuaccugaacagcaccaacgugacgaucgcgaccuacugcaccggcuccauccccugcagcgugugccuguccgggcucgacagccuggacaccuaccccucccuggagacgauccagaucaccaucagcuccuucaagugggaccucaccgccuucggccuggucgccgagugguuccuggccuacauccucuucacccgguucuucuacgugcuggggcuggccgcgaucaugcagcucuucuucagcuacuucgccgugcacuucaucuccaacagcuggcugauguggcugaucaucaaccugguccagauggcccccaucuccgccauggugcgcauguacaucuucuucgcgagcuucuacuacguguggaagagcuacguccacgugguggacggcugcaacuccagcacgugcaugaugugcuacaagcggaaccgcgccacccgggucgagugcaccaccaucgugaacgggguccgccgguccuucuacguguacgccaacggcggcaagggguucugcaagcuccacaacuggaacugcgugaacugcgacacguucugcgccggcagcaccuucaucuccgacgaggucgcccgcgaccugagccugcaguucaagcggccgaucaaccccaccgaccaguccagcuacaucguggacuccgugaccgucaagaacgggagcauccaccucuacuucgacaaggcgggccagaagacguacgagcgccacucccugagccacuucgugaaccuggacaaccuccgggccaacaacaccaaggggucccugcccaucaacgugaucgucuucgacggcaagagcaagugcgaggaguccagcgccaaguccgccagcguguacuacucccagcugaugugccagcccauccuccugcuggaccaggcccucgugagcgacgucggcgacagcgcggagguggccgugaagauguucgacgccuacgucaacaccuucuccagcaccuucaacgugccgauggagaagcugaagacgcugguggccaccgccgaggcggagcucgccaagaacgucucccuggacaacgugcugagcaccuucaucuccgccgcccgccagggguucguggacagcgacgucgagaccaaggacgugguggagugccucaagcugucccaccagagcgacaucgaggucacgggcgacuccugcaacaacuacaugcugaccuacaacaagguggagaacaugaccccccgggaccucggggcgugcaucgacugcagcgcccgccacaucaacgcccagguggccaagucccacaacaucgcccugaucuggaacgucaaggacuucaugagccuguccgagcagcuccggaagcagauccgcagcgcggccaagaagaacaaccugcccuucaagcugaccugcgccacgacccgccagguggugaacgucgugaccaccaagaucgcccucaagggcggguga

SEQ ID NO: 18214 - RNA, 5841 nt, Artificial Sequence
  SARS-CoV-2__MT451146.1__non-structural protein 3 (NSP3) CDS gc
auggcccccaccaaggugaccuucggcgacgacacggucaucgaggugcagggguacaagagcgugaacaucaccuucgagcuggacgagcgcaucgacaagguccucaacgagaagugcuccgccuacaccguggagcugggcaccgaggugaacgaguucgcgugcgucguggccgacgccgugaucaagacgcugcagccggucagcgagcuccugaccccccuggggaucgaccucgacgagugguccauggccaccuacuaccuguucgacgagagcggcgaguucaagcuggccucccacauguacugcagcuucuacccccccgacgaggacgaggaggagggggacugcgaggaggaggaguucgagccguccacccaguacgaguacggcacggaggacgacuaccagggcaagccccucgaguucggggcgaccagcgccgcccugcagcccgaggaggagcaggaggaggacuggcuggacgacgacucccagcagaccgugggccagcaggacgggagcgaggacaaccagaccacgaccauccagaccaucguggagguccagccccagcucgagauggagcugaccccgguggugcagacgaucgaggucaacuccuucagcggcuaccugaagcucaccgacaacguguacaucaagaacgccgacaucguggaggaggcgaagaagaucaagcccaccgucguggugaacgccgccaacgucuaccugaagcacgggggcggcguggccggggcccugaacaaggcgaccaacaacgccaugcagguggaguccgacgacuacaucgccacgaacggcccccucaaggucgggggcagcugcgugcuguccggccacaaccuggccaagcacugccuccacgucguggggcccaacgugaacaagggcgaggacauccagcugcugaagagcgccuacgagaacuucaaccagcacgagguccuccuggcgccgcugcucuccgccgggaucuucggcgccgaccccauccacagccugcgggugugcguggacaccguccgcaccaacguguaccuggccguguucgacaagaaccucuacgacaagcuggucuccagcuuccuggagaugaagagcgagaagcagguggagcagaagaucgccgagauccccaaggaggaggugaagcccuucaucaccgaguccaagccgagcgucgagcagcggaagcaggacgacaagaagaucaaggcgugcguggaggaggugacgaccacccucgaggagaccaaguuccugacggagaaccugcuccuguacaucgacaucaacgggaaccugcaccccgacuccgccacccucgucagcgacaucgacaucaccuuccugaagaaggacgcccccuacaucgugggcgacgugguccaggagggcgugcugaccgccguggucauccccacgaagaaggccgggggcaccaccgagaugcucgcgaaggcccugcgcaaggugccgaccgacaacuacaucacgaccuaccccgggcagggccugaacggguacaccguggaggaggccaagaccguccucaagaagugcaaguccgccuucuacauccugcccagcaucaucuccaacgagaagcaggagauccugggcaccgugagcuggaaccuccgggagaugcuggcgcacgccgaggagacgcgcaagcugaugcccgugugcgucgagaccaaggccaucguguccaccauccagcggaaguacaagggcaucaagauccaggaggggguggucgacuacggcgcccgcuucuacuucuacaccagcaagacgaccguggccucccugaucaacacccucaacgaccugaacgagacccuggugacgaugccgcucggguacgucacccacggccugaaccuggaggaggcggcccgguacaugcgcagccucaaggugcccgccaccguguccgucagcucccccgacgccgugaccgccuacaacggguaccugacgagcuccagcaagacccccgaggagcacuucaucgagaccaucucccuggcgggcagcuacaaggacuggagcuacuccggccagagcacccagcucgggaucgaguuccugaagcggggcgacaaguccguguacuacacgagcaacccgaccaccuuccaccuggacggggaggucaucaccuucgacaaccucaagacgcugcugucccuccgcgaggugcggaccaucaagguguucaccaccgucgacaacaucaaccugcacacgcaggugguggacaugagcaugaccuacggccagcaguucggccccaccuaccuggacggggccgacgucaccaagaucaagccccacaacucccacgagggcaagacguucuacgugcucccgaacgacgacacccugcgcguggaggccuucgaguacuaccacaccaccgaccccagcuuccuggggcgguacauguccgcccucaaccacacgaagaaguggaaguacccccaggucaacggccugaccagcaucaagugggccgacaacaacugcuaccuggcgaccgcccuccugacccugcagcagaucgagcucaaguucaaccccccggcccugcaggacgccuacuaccgcgcgcgggccggggaggccgccaacuucugcgcccugauccucgcguacugcaacaagacggugggcgagcugggcgacgugcgcgagaccauguccuaccuguuccagcacgccaaccucgacagcugcaagcggguccugaacguggucugcaagaccugcgggcagcagcagaccacccugaagggcguggaggccgugauguacauggggacgcucuccuacgagcaguucaagaagggcguccagauccccugcaccugcgggaagcaggccaccaaguaccuggugcagcaggagagccccuucgugaugauguccgcccccccggcgcaguacgagcugaagcacggcaccuucacgugcgccagcgaguacaccggcaacuaccagugcgggcacuacaagcacaucaccuccaaggagacccucuacugcaucgacggcgcccugcugacgaagagcagcgaguacaaggggcccaucaccgacgucuucuacaaggagaacuccuacaccaccacgaucaagcccgugaccuacaagcucgacggcguggucugcaccgagaucgaccccaagcuggacaacuacuacaagaaggacaacagcuacuucaccgagcagccgaucgaccuggugcccaaccagcccuaccccaacgccuccuucgacaacuucaaguucgugugcgacaacaucaaguucgccgacgaccucaaccagcugacgggguacaagaagccggcgagccgcgagcugaaggucaccuucuuccccgaccucaacggcgacgugguggccaucgacuacaagcacuacacccccuccuucaagaagggcgccaagcugcugcacaagcccaucgucuggcacgugaacaacgccaccaacaaggcgacguacaagccgaacaccuggugcauccggugccucuggagcaccaagcccguggagaccuccaacagcuucgacguccugaaguccgaggacgcccaggggauggacaaccuggccugcgaggaccucaagcccgugagcgaggagguggucgagaaccccacgauccagaaggacgugcuggagugcaacgugaagaccaccgaggucgugggcgacaucauccugaagccggccaacaacucccucaagaucaccgaggagguggggcacacggaccugauggccgcguacgucgacaacagcucccugaccaucaagaagcccaacgagcucagccgcgugcugggccugaagacccucgccacccacgggcuggccgccgugaacuccguccccugggacacgaucgccaacuacgcgaagccguuccugaacaagguggugagcaccaccaccaacaucgucacgcgcugccucaaccgggugugcaccaacuacaugcccuacuucuucacccugcugcuccagcugugcaccuucacccgcuccacgaacagccggaucaaggccuccaugcccaccaccaucgccaagaacaccgugaagagcgucggcaaguucugccuggaggccagcuucaacuaccucaagucccccaacuucagcaagcugaucaacaucaucaucugguuccugcuccuguccgugugccugggcagccucaucuacuccacggccgcgcugggggugcugaugagcaaccucggcaugccguccuacugcaccggguaccgcgagggcuaccugaacagcaccaacgucaccaucgccacguacugcaccggcuccauccccugcagcgugugccuguccgggcucgacagccuggacaccuaccccucccuggagaccauccagaucacgaucagcuccuucaagugggaccucaccgccuucggccugguggccgagugguuccuggccuacauccucuucacccgguucuucuacguccuggggcuggcggccaucaugcagcucuucuucagcuacuucgccgugcacuucaucuccaacagcuggcugauguggcugaucaucaaccuggugcagauggcccccaucuccgcgaugguccgcauguacaucuucuucgccagcuucuacuacguguggaagagcuacgugcacgucguggacggcugcaacuccagcaccugcaugaugugcuacaagcggaaccgcgccacgcggguggagugcaccaccaucgucaacggggugcgccgguccuucuacgucuacgccaacggcggcaagggguucugcaagcuccacaacuggaacugcgugaacugcgacaccuucugcgccggcagcacguucaucuccgacgagguggcgcgcgaccugagccugcaguucaagcggccgaucaaccccaccgaccaguccagcuacaucgucgacuccgugaccgugaagaacgggagcauccaccucuacuucgacaaggccggccagaagaccuacgagcgccacucccugagccacuucgucaaccuggacaaccuccgggccaacaacacgaaggggucccugcccaucaacgugaucguguucgacggcaagagcaagugcgaggaguccagcgccaaguccgccagcgucuacuacucccagcugaugugccagcccauccuccugcuggaccaggcgcucgugagcgacgugggcgacagcgccgaggucgccgugaagauguucgacgccuacgugaacaccuucuccagcaccuucaacgucccgauggagaagcugaagacccugguggccacggcggaggccgagcucgccaagaacgugucccuggacaacguccugagcaccuucaucuccgccgcgcgccagggguucguggacagcgacguggagaccaaggacgucguggagugccucaagcugucccaccagagcgacaucgaggugaccggcgacuccugcaacaacuacaugcugacguacaacaaggucgagaacaugaccccccgggaccucggggccugcaucgacugcagcgcccgccacaucaacgcccagguggccaagucccacaacaucgcgcugaucuggaacgugaaggacuucaugagccuguccgagcagcuccggaagcagauccgcagcgccgccaagaagaacaaccugcccuucaagcugaccugcgccaccacgcgccaggucgugaacguggucaccaccaagaucgcccucaagggcggguga

SEQ ID NO: 18215 - RNA, 5841 nt, Artificial Sequence
  SARS-CoV-2__MT451231.1__non-structural protein 3 (NSP3) CDS gc
auggcccccaccaaggugaccuucggcgacgacacggucaucgaggugcagggguacaagagcgugaacaucaccuucgagcuggacgagcgcaucgacaagguccucaacgagaagugcuccgccuacaccguggagcugggcaccgaggugaacgaguucgcgugcgucguggccgacgccgugaucaagacgcugcagccggucagcgagcuccugaccccccuggggaucgaccucgacgagugguccauggccaccuacuaccuguucgacgagagcggcgaguucaagcuggccucccacauguacugcagcuucuacccccccgacgaggacgaggaggagggggacugcgaggaggaggaguucgagccguccacccaguacgaguacggcacggaggacgacuaccagggcaagccccucgaguucggggcgaccagcgccgcccugcagcccgaggaggagcaggaggaggacuggcuggacgacgacucccagcagaccgugggccagcaggacgggagcgaggacaaccagaccacgaccauccagaccaucguggagguccagccccagcucgagauggagcugaccccgguggugcagacgaucgaggucaacuccuucagcggcuaccugaagcucaccgacaacguguacaucaagaacgccgacaucguggaggaggcgaagaaggucaagcccaccgugguggucaacgccgccaacguguaccugaagcacgggggcggcguggccggggcccugaacaaggcgaccaacaacgccaugcaggucgaguccgacgacuacaucgccacgaacggcccccucaagguggggggcagcugcguccuguccggccacaaccuggccaagcacugccuccacgugguggggcccaacgucaacaagggcgaggacauccagcugcugaagagcgccuacgagaacuucaaccagcacgaggugcuccuggcgccgcugcucuccgccgggaucuucggcgccgaccccauccacagccugcgggugugcgucgacaccgugcgcaccaacguguaccuggccgucuucgacaagaaccucuacgacaagcugguguccagcuuccuggagaugaagagcgagaagcagguggagcagaagaucgccgagauccccaaggaggaggucaagcccuucaucaccgaguccaagccgagcguggagcagcggaagcaggacgacaagaagaucaaggcgugcguggaggaggucacgaccacccucgaggagaccaaguuccugacggagaaccugcuccuguacaucgacaucaacgggaaccugcaccccgacuccgccacccucgugagcgacaucgacaucaccuuccugaagaaggacgcccccuacaucgugggcgacgucgugcaggagggcgugcugaccgccgucgugauccccacgaagaaggccgggggcaccaccgagaugcucgcgaaggcccugcgcaaggugccgaccgacaacuacaucacgaccuaccccgggcagggccugaacggguacaccgucgaggaggccaagaccgugcucaagaagugcaaguccgccuucuacauccugcccagcaucaucuccaacgagaagcaggagauccugggcaccgugagcuggaaccuccgggagaugcuggcgcacgccgaggagacgcgcaagcugaugcccgucugcguggagaccaaggccaucguguccaccauccagcggaaguacaagggcaucaagauccaggagggggucguggacuacggcgcccgcuucuacuucuacaccagcaagacgaccguggccucccugaucaacacccucaacgaccugaacgagacccuggucacgaugccgcucggguacgugacccacggccugaaccuggaggaggcggcccgguacaugcgcagccucaaggugcccgccaccgucuccgugagcucccccgacgccgugaccgccuacaacggguaccugacgagcuccagcaagacccccgaggagcacuucaucgagaccaucucccuggcgggcagcuacaaggacuggagcuacuccggccagagcacccagcucgggaucgaguuccugaagcggggcgacaaguccgucuacuacacgagcaacccgaccaccuuccaccuggacggggaggugaucaccuucgacaaccucaagacgcugcugucccuccgcgaggugcggaccaucaaggucuucaccaccguggacaacaucaaccugcacacgcagguggucgacaugagcaugaccuacggccagcaguucggccccaccuaccuggacggggccgacgugaccaagaucaagccccacaacucccacgagggcaagacguucuacgugcucccgaacgacgacacccugcgcgucgaggccuucgaguacuaccacaccaccgaccccagcuuccuggggcgguacauguccgcccucaaccacacgaagaaguggaaguacccccaggugaacggccugaccagcaucaagugggccgacaacaacugcuaccuggcgaccgcccuccugacccugcagcagaucgagcucaaguucaaccccccggcccugcaggacgccuacuaccgcgcgcgggccggggaggccgccaacuucugcgcccugauccucgcguacugcaacaagacggugggcgagcugggcgacguccgcgagaccauguccuaccuguuccagcacgccaaccucgacagcugcaagcgggugcugaacgucgugugcaagaccugcgggcagcagcagaccacccugaagggcguggaggccgucauguacauggggacgcucuccuacgagcaguucaagaagggcgugcagauccccugcaccugcgggaagcaggccaccaaguaccuggugcagcaggagagccccuucgucaugauguccgcccccccggcgcaguacgagcugaagcacggcaccuucacgugcgccagcgaguacaccggcaacuaccagugcgggcacuacaagcacaucaccuccaaggagacccucuacugcaucgacggcgcccugcugacgaagagcagcgaguacaaggggcccaucaccgacguguucuacaaggagaacuccuacaccaccacgaucaagcccgugaccuacaagcucgacggcgucgugugcaccgagaucgaccccaagcuggacaacuacuacaagaaggacaacagcuacuucaccgagcagccgaucgaccuggugcccaaccagcccuaccccaacgccuccuucgacaacuucaaguucgucugcgacaacaucaaguucgccgacgaccucaaccagcugacgggguacaagaagccggcgagccgcgagcugaaggugaccuucuuccccgaccucaacggcgacguggucgccaucgacuacaagcacuacacccccuccuucaagaagggcgccaagcugcugcacaagcccaucguguggcacgugaacaacgccaccaacaaggcgacguacaagccgaacaccuggugcauccggugccucuggagcaccaagcccgucgagaccuccaacagcuucgacgugcugaaguccgaggacgcccaggggauggacaaccuggccugcgaggaccucaagcccgugagcgaggaggucguggagaaccccacgauccagaaggacgugcuggagugcaacgucaagaccaccgagguggugggcgacaucauccugaagccggccaacaacucccucaagaucaccgaggaggucgggcacacggaccugauggccgcguacguggacaacagcucccugaccaucaagaagcccaacgagcucagccgcgugcugggccugaagacccucgccacccacgggcuggccgccgucaacuccgugcccugggacacgaucgccaacuacgcgaagccguuccugaacaagguggucagcaccaccaccaacaucgugacgcgcugccucaaccgggugugcaccaacuacaugcccuacuucuucacccugcugcuccagcugugcaccuucacccgcuccacgaacagccggaucaaggccuccaugcccaccaccaucgccaagaacaccgucaagagcgugggcaaguucugccuggaggccagcuucaacuaccucaagucccccaacuucagcaagcugaucaacaucaucaucugguuccugcuccuguccgugugccugggcagccucaucuacuccacggccguccugggggugcugaugagcaaccucggcaugccguccuacugcaccggguaccgcgagggcuaccugaacagcaccaacgugaccaucgcgacguacugcaccggcuccauccccugcagcgucugccuguccgggcucgacagccuggacaccuaccccucccuggagaccauccagaucacgaucagcuccuucaagugggaccucaccgccuucggccugguggccgagugguuccuggccuacauccucuucacccgguucuucuacgugcuggggcuggccgcgaucaugcagcucuucuucagcuacuucgccguccacuucaucuccaacagcuggcugauguggcugaucaucaaccuggugcagauggcccccaucuccgccauggugcgcauguacaucuucuucgcgagcuucuacuacgucuggaagagcuacgugcacguggucgacggcugcaacuccagcaccugcaugaugugcuacaagcggaaccgcgccacgcggguggagugcaccaccaucgucaacggggugcgccgguccuucuacguguacgccaacggcggcaagggguucugcaagcuccacaacuggaacugcgucaacugcgacaccuucugcgccggcagcacguucaucuccgacgagguggcccgcgaccugagccugcaguucaagcggccgaucaaccccaccgaccaguccagcuacaucguggacuccgucaccgugaagaacgggagcauccaccucuacuucgacaaggcgggccagaagaccuacgagcgccacucccugagccacuucgugaaccuggacaaccuccgggccaacaacacgaaggggucccugcccaucaacgucaucguguucgacggcaagagcaagugcgaggaguccagcgccaaguccgccagcguguacuacucccagcugaugugccagcccauccuccugcuggaccaggcccucgucagcgacgugggcgacagcgcggagguggccgucaagauguucgacgccuacgugaacaccuucuccagcaccuucaacgugccgauggagaagcugaagacccuggucgccacggccgaggcggagcucgccaagaacgugucccuggacaacgugcugagcaccuucaucuccgccgcccgccagggguucgucgacagcgacguggagaccaaggacguggucgagugccucaagcugucccaccagagcgacaucgaggugaccggcgacuccugcaacaacuacaugcugacguacaacaagguggagaacaugaccccccgggaccucggggcgugcaucgacugcagcgcccgccacaucaacgcccaggucgccaagucccacaacaucgcccugaucuggaacgugaaggacuucaugagccuguccgagcagcuccggaagcagauccgcagcgcggccaagaagaacaaccugcccuucaagcugaccugcgccaccacgcgccagguggucaacguggugaccaccaagaucgcccucaagggcggguga

SEQ ID NO: 18216 - RNA, 5841 nt, Artificial Sequence
  SARS-CoV-2__MT451236.1__non-structural protein 3 (NSP3) CDS gc
auggcccccaccaaggugaccuucggcgacgacacggucaucgaggugcagggguacaagagcgugaacaucaccuucgagcuggacgagcgcaucgacaagguccucaacgagaagugcuccgccuacaccguggagcugggcaccgaggugaacgaguucgcgugcgucguggccgacgccgugaucaagacgcugcagccggucagcgagcuccugaccccccuggggaucgaccucgacgagugguccauggccaccuacuaccuguucgacgagagcggcgaguucaagcuggccucccacauguacugcagcuucuacccccccgacgaggacgaggaggagggggacugcgaggaggaggaguucgagccguccacccaguacgaguacggcacggaggacgacuaccagggcaagccccucgaguucggggcgaccagcgccgcccugcagcccgaggaggagcaggaggaggacuggcuggacgacgacucccagcagaccgugggccagcaggacgggagcaaggacaaccagaccacgaccauccagaccaucguggagguccagccccagcucgagauggagcugaccccgguggugcagacgaucgaggucaacuccuucagcggcuaccugaagcucaccgacaacguguacaucaagaacgccgacaucguggaggaggcgaagaaggucaagcccaccgugguggucaacgccgccaacguguaccugaagcacgggggcggcguggccggggcccugaacaaggcgaccaacaacgccaugcaggucgaguccgacgacuacaucgccacgaacggcccccucaagguggggggcagcugcguccuguccggccacaaccuggccaagcacugccuccacgugguggggcccaacgucaacaagggcgaggacauccagcugcugaagagcgccuacgagaacuucaaccagcacgaggugcuccuggcgccgcugcucuccgccgggaucuucggcgccgaccccauccacagccugcgggugugcgucgacaccgugcgcaccaacguguaccuggccgucuucgacaagaaccucuacgacaagcugguguccagcuuccuggagaugaagagcgagaagcagguggagcagaagaucgccgagauccccaaggaggaggucaagcccuucaucaccgaguccaagccgagcguggagcagcggaagcaggacgacaagaagaucaaggcgugcguggaggaggucacgaccacccucgaggagaccaaguuccugacggagaaccugcuccuguacaucgacaucaacgggaaccugcaccccgacuccgccacccucgugagcgacaucgacaucaccuuccugaagaaggacgcccccuacaucgugggcgacgucgugcaggagggcgugcugaccgccgucgugauccccacgaagaaggccgggggcaccaccgagaugcucgcgaaggcccugcgcaaggugccgaccgacaacuacaucacgaccuaccccgggcagggccugaacggguacaccgucgaggaggccaagaccgugcucaagaagugcaaguccgccuucuacauccugcccagcaucaucuccaacgagaagcaggagauccugggcaccgugagcuggaaccuccgggagaugcuggcgcacgccgaggagacgcgcaagcugaugcccgucugcguggagaccaaggccaucguguccaccauccagcggaaguacaagggcaucaagauccaggagggggucguggacuacggcgcccgcuucuacuucuacaccagcaagacgaccguggccucccugaucaacacccucaacgaccugaacgagacccuggucacgaugccgcucggguacgugacccacggccugaaccuggaggaggcggcccgguacaugcgcagccucaaggugcccgccaccgucuccgugagcucccccgacgccgugaccgccuacaacggguaccugacgagcuccagcaagacccccgaggagcacuucaucgagaccaucucccuggcgggcagcuacaaggacuggagcuacuccggccagagcacccagcucgggaucgaguuccugaagcggggcgacaaguccgucuacuacacgagcaacccgaccaccuuccaccuggacggggaggugaucaccuucgacaaccucaagacgcugcugucccuccgcgaggugcggaccaucaaggucuucaccaccguggacaacaucaaccugcacacgcagguggucgacaugagcaugaccuacggccagcaguucggccccaccuaccuggacggggccgacgugaccaagaucaagccccacaacucccacgagggcaagacguucuacgugcucccgaacgacgacacccugcgcgucgaggccuucgaguacuaccacaccaccgaccccagcuuccuggggcgguacauguccgcccucaaccacacgaagaaguggaaguacccccaggugaacggccugaccagcaucaagugggccgacaacaacugcuaccuggcgaccgcccuccugacccugcagcagaucgagcucaaguucaaccccccggcccugcaggacgccuacuaccgcgcgcgggccggggaggccgccaacuucugcgcccugauccucgcguacugcaacaagacggugggcgagcugggcgacguccgcgagaccauguccuaccuguuccagcacgccaaccucgacagcugcaagcgggugcugaacgucgugugcaagaccugcgggcagcagcagaccacccugaagggcguggaggccgucauguacauggggacgcucuccuacgagcaguucaagaagggcgugcagauccccugcaccugcgggaagcaggccaccaaguaccuggugcagcaggagagccccuucgucaugauguccgcccccccggcgcaguacgagcugaagcacggcaccuucacgugcgccagcgaguacaccggcaacuaccagugcgggcacuacaagcacaucaccuccaaggagacccucuacugcaucgacggcgcccugcugacgaagagcagcgaguacaaggggcccaucaccgacguguucuacaaggagaacuccuacaccaccacgaucaagcccgugaccuacaagcucgacggcgucgugugcaccgagaucgaccccaagcuggacaacuacuacaagaaggacaacagcuacuucaccgagcagccgaucgaccuggugcccaaccagcccuaccccaacgccuccuucgacaacuucaaguucgucugcgacaacaucaaguucgccgacgaccucaaccagcugacgggguacaagaagccggcgagccgcgagcugaaggugaccuucuuccccgaccucaacggcgacguggucgccaucgacuacaagcacuacacccccuccuucaagaagggcgccaagcugcugcacaagcccaucguguggcacgugaacaacgccaccaacaaggcgacguacaagccgaacaccuggugcauccggugccucuggagcaccaagcccgucgagaccuccaacagcuucgacgugcugaaguccgaggacgcccaggggauggacaaccuggccugcgaggaccucaagcccgugagcgaggaggucguggagaaccccacgauccagaaggacgugcuggagugcaacgucaagaccaccgagguggugggcgacaucauccugaagccggccaacaacucccucaagaucaccgaggaggucgggcacacggaccugauggccgcguacguggacaacagcucccugaccaucaagaagcccaacgagcucagccgcgugcugggccugaagacccucgccacccacgggcuggccgccgucaacuccgugcccugggacacgaucgccaacuacgcgaagccguuccugaacaagguggucagcaccaccaccaacaucgugacgcgcugccucaaccgggugugcaccaacuacaugcccuacuucuucacccugcugcuccagcugugcaccuucacccgcuccacgaacagccggaucaaggccuccaugcccaccaccaucgccaagaacaccgucaagagcgugggcaaguucugccuggaggccagcuucaacuaccucaagucccccaacuucagcaagcugaucaacaucaucaucugguuccugcuccuguccgugugccugggcagccucaucuacuccacggccgcgcuggggguccugaugagcaaccucggcaugccguccuacugcaccggguaccgcgagggcuaccugaacagcaccaacgugaccaucgccacguacugcaccggcuccauccccugcagcgugugccuguccgggcucgacagccuggacaccuaccccucccuggagaccauccagaucacgaucagcuccuucaagugggaccucaccgccuucggccuggucgccgagugguuccuggccuacauccucuucacccgguucuucuacgugcuggggcuggcggccaucaugcagcucuucuucagcuacuucgccgugcacuucaucuccaacagcuggcugauguggcugaucaucaaccugguccagauggcccccaucuccgcgauggugcgcauguacaucuucuucgccagcuucuacuacguguggaagagcuacguccacgugguggacggcugcaacuccagcaccugcaugaugugcuacaagcggaaccgcgccacgcgggucgagugcaccaccaucgugaacgggguccgccgguccuucuacguguacgccaacggcggcaagggguucugcaagcuccacaacuggaacugcgugaacugcgacaccuucugcgccggcagcacguucaucuccgacgaggucgcgcgcgaccugagccugcaguucaagcggccgaucaaccccaccgaccaguccagcuacaucguggacuccgugaccgucaagaacgggagcauccaccucuacuucgacaaggccggccagaagaccuacgagcgccacucccugagccacuucgugaaccuggacaaccuccgggccaacaacacgaaggggucccugcccaucaacgugaucgucuucgacggcaagagcaagugcgaggaguccagcgccaaguccgccagcguguacuacucccagcugaugugccagcccauccuccugcuggaccaggcgcucgugagcgacgucggcgacagcgccgagguggccgugaagauguucgacgccuacgucaacaccuucuccagcaccuucaacgugccgauggagaagcugaagacccugguggccacggcggaggccgagcucgccaagaacgucucccuggacaacgugcugagcaccuucaucuccgccgcgcgccagggguucguggacagcgacgucgagaccaaggacgugguggagugccucaagcugucccaccagagcgacaucgaggucaccggcgacuccugcaacaacuacaugcugacguacaacaagguggagaacaugaccccccgggaccucggggccugcaucgacugcagcgcccgccacaucaacgcccagguggccaagucccacaacaucgcgcugaucuggaacgucaaggacuucaugagccuguccgagcagcuccggaagcagauccgcagcgccgccaagaagaacaaccugcccuucaagcugaccugcgccaccacgcgccagguggugaacgucgugaccaccaagaucgcccucaagggcggguga

SEQ ID NO: 18217 - RNA, 5841 nt, Artificial Sequence
  SARS-CoV-2__MT451238.1__non-structural protein 3 (NSP3) CDS gc
auggcccccaccaaggugaccuucggcgacgacacggucaucgaggugcagggguacaagagcgugaacaucaccuucgagcuggacgagcgcaucgacaagguccucaacgagaagugcuccgccuacaccguggagcugggcaccgaggugaacgaguucgcgugcgucguggccgacgccgugaucaagacgcugcagccggucagcgagcuccugaccccccuguccaucgaccucgacgaguggagcauggccaccuacuaccuguucgacgaguccggggaguucaagcuggccagccacauguacugcuccuucuacccccccgacgaggacgaggaggagggcgacugcgaggaggaggaguucgagccgagcacccaguacgaguacgggacggaggacgacuaccagggcaagccccucgaguucggcgcgaccuccgccgcccugcagcccgaggaggagcaggaggaggacuggcuggacgacgacagccagcagaccguggggcagcaggacggcuccgaggacaaccagaccacgaccauccagaccaucguggagguccagccccagcucgagauggagcugaccccgguggugcagacgaucgaggucaacagcuucuccggguaccugaagcucaccgacaacguguacaucaagaacgccgacaucguggaggaggcgaagaaggucaagcccaccgugguggucaacgccgccaacguguaccugaagcacggcgggggcguggccggcgcccugaacaaggcgaccaacaacgccaugcaggucgagagcgacgacuacaucgccacgaacgggccccucaaggugggcggguccugcguccugagcggccacaaccuggccaagcacugccuccacguggugggccccaacgucaacaagggggaggacauccagcugcugaaguccgccuacgagaacuucaaccagcacgaggugcuccuggcgccgcugcucagcgccggcaucuucggggccgaccccauccacucccugcgggugugcgucgacaccgugcgcaccaacguguaccuggccgucuucgacaagaaccucuacgacaagcuggugagcagcuuccuggagaugaaguccgagaagcagguggagcagaagaucgccgagauccccaaggaggaggucaagcccuucaucaccgagagcaagccguccguggagcagcggaagcaggacgacaagaagaucaaggcgugcguggaggaggucacgaccacccucgaggagaccaaguuccugacggagaaccugcuccuguacaucgacaucaacggcaaccugcaccccgacagcgccacccucguguccgacaucgacaucaccuuccugaagaaggacgcccccuacaucgugggggacgucgugcaggagggcgugcugaccgccgucgugauccccacgaagaaggccggcgggaccaccgagaugcucgcgaaggcccugcgcaaggugccgaccgacaacuacaucacgaccuaccccggccaggggcugaacggcuacaccgucgaggaggccaagaccgugcucaagaagugcaagagcgccuucuacauccugcccuccaucaucagcaacgagaagcaggagauccuggggaccguguccuggaaccuccgggagaugcuggcgcacgccgaggagacgcgcaagcugaugcccgucugcguggagaccaaggccaucgugagcaccauccagcggaaguacaagggcaucaagauccaggagggcgucguggacuacggggcccgcuucuacuucuacaccuccaagacgaccguggccagccugaucaacacccucaacgaccugaacgagacccuggucacgaugccgcucggcuacgugacccacgggcugaaccuggaggaggcggcccgguacaugcgcucccucaaggugcccgccaccgucagcguguccagccccgacgccgugaccgccuacaacggcuaccugacguccagcuccaagacccccgaggagcacuucaucgagaccaucagccuggcggggagcuacaaggacugguccuacagcggccaguccacccagcucggcaucgaguuccugaagcggggggacaagagcgucuacuacacguccaacccgaccaccuuccaccuggacggcgaggugaucaccuucgacaaccucaagacgcugcugagccuccgcgaggugcggaccaucaaggucuucaccaccguggacaacaucaaccugcacacgcagguggucgacauguccaugaccuacgggcagcaguucggccccaccuaccuggacggcgccgacgugaccaagaucaagccccacaacagccacgaggggaagacguucuacgugcucccgaacgacgacacccugcgcgucgaggccuucgaguacuaccacaccaccgaccccuccuuccugggccgguacaugagcgcccucaaccacacgaagaaguggaaguacccccaggugaacgggcugaccuccaucaagugggccgacaacaacugcuaccuggcgaccgcccuccugacccugcagcagaucgagcucaaguucaaccccccggcccugcaggacgccuacuaccgcgcgcgggccggcgaggccgccaacuucugcgcccugauccucgcguacugcaacaagacggugggggagcugggcgacguccgcgagaccaugagcuaccuguuccagcacgccaaccucgacuccugcaagcgggugcugaacgucgugugcaagaccugcggccagcagcagaccacccugaaggggguggaggccgucauguacaugggcacgcucagcuacgagcaguucaagaagggggugcagauccccugcaccugcggcaagcaggccaccaaguaccuggugcagcaggagucccccuucgucaugaugagcgcccccccggcgcaguacgagcugaagcacgggaccuucacgugcgccuccgaguacaccggcaacuaccagugcggccacuacaagcacaucaccagcaaggagacccucuacugcaucgacggggcccugcugacgaagagcuccgaguacaagggccccaucaccgacguguucuacaaggagaacagcuacaccaccacgaucaagcccgugaccuacaagcucgacggggucgugugcaccgagaucgaccccaagcuggacaacuacuacaagaaggacaacuccuacuucaccgagcagccgaucgaccuggugcccaaccagcccuaccccaacgccagcuucgacaacuucaaguucgucugcgacaacaucaaguucgccgacgaccucaaccagcugacgggcuacaagaagccggcgucccgcgagcugaaggugaccuucuuccccgaccucaacggggacguggucgccaucgacuacaagcacuacacccccagcuucaagaagggcgccaagcugcugcacaagcccaucguguggcacgugaacaacgccaccaacaaggcgacguacaagccgaacaccuggugcauccggugccucugguccaccaagcccgucgagaccagcaacuccuucgacgugcugaagagcgaggacgcccagggcauggacaaccuggccugcgaggaccucaagcccguguccgaggaggucguggagaaccccacgauccagaaggacgugcuggagugcaacgucaagaccaccgagguggugggggacaucauccugaagccggccaacaacagccucaagaucaccgaggaggucggccacacggaccugauggccgcguacguggacaacuccagccugaccaucaagaagcccaacgagcucucccgcgugcuggggcugaagacccucgccacccacggccuggccgccgucaacagcgugcccugggacacgaucgccaacuacgcgaagccguuccugaacaagguggucuccaccaccaccaacaucgugacgcgcugccucaaccgggugugcaccaacuacaugcccuacuucuucacccugcugcuccagcugugcaccuucacccgcagcacgaacucccggaucaaggccagcaugcccaccaccaucgccaagaacaccgucaagagcguggggaaguucugccuggaggccuccuucaacuaccucaagagccccaacuucuccaagcugaucaacaucaucaucugguuccugcuccugagcgugugccugggcucccucaucuacagcacggccgcgcugggcguccugauguccaaccucgggaugccgagcuacugcaccggcuaccgcgagggguaccugaacuccaccaacgugaccaucgccacguacugcaccggcagcauccccugcuccgugugccugagcggccucgacucccuggacaccuaccccagccuggagaccauccagaucacgaucuccagcuucaagugggaccucaccgccuucgggcuggucgccgagugguuccuggccuacauccucuucacccgguucuucuacgugcugggccuggcggccaucaugcagcucuucuucuccuacuucgccgugcacuucaucagcaacuccuggcugauguggcugaucaucaaccugguccagauggcccccaucagcgcgauggugcgcauguacaucuucuucgccagcuucuacuacguguggaaguccuacguccacgugguggacgggugcaacagcuccaccugcaugaugugcuacaagcggaaccgcgccacgcgggucgagugcaccaccaucgugaacggcguccgccggagcuucuacguguacgccaacgggggcaagggcuucugcaagcuccacaacuggaacugcgugaacugcgacaccuucugcgccggguccacguucaucagcgacgaggucgcgcgcgaccugucccugcaguucaagcggccgaucaaccccaccgaccagagcuccuacaucguggacagcgugaccgucaagaacggcuccauccaccucuacuucgacaaggccgggcagaagaccuacgagcgccacagccugucccacuucgugaaccuggacaaccuccgggccaacaacacgaagggcagccugcccaucaacgugaucgucuucgacgggaaguccaagugcgaggagagcuccgccaagagcgccuccguguacuacagccagcugaugugccagcccauccuccugcuggaccaggcgcucgugagcgacgucggcgacuccgccgagguggccgugaagauguucgacgccuacgucaacaccuucagcuccaccuucaacgugccgauggagaagcugaagacccugguggccacggcggaggccgagcucgccaagaacgucagccuggacaacgugcuguccaccuucaucagcgccgcgcgccagggcuucguggacuccgacgucgagaccaaggacgugguggagugccucaagcugagccaccaguccgacaucgaggucaccggggacagcugcaacaacuacaugcugacguacaacaagguggagaacaugaccccccgggaccucggcgccugcaucgacugcuccgcccgccacaucaacgcccagguggccaagagccacaacaucgcgcugaucuggaacgucaaggacuucaugucccugagcgagcagcuccggaagcagauccgcuccgccgccaagaagaacaaccugcccuucaagcugaccugcgccaccacgcgccagguggugaacgucgugaccaccaagaucgcccucaaggggggcuga

SEQ ID NO: 18218 - RNA, 5841 nt, Artificial Sequence
  SARS-CoV-2__MT451255.1__non-structural protein 3 (NSP3) CDS gc
auggcccccaccaaggugaccuucggcgacgacacggucaucgaggugcagggguacaagagcgugaacaucaccuucgagcuggacgagcgcaucgacaagguccucaacgagaagugcuccgccuacaccguggagcugggcaccgaggugaacgaguucgcgugcgucguggccgacgccgugaucaagacgcugcagccggucagcgagcuccugaccccccuggggaucgaccucgacgagugguccauggccaccuacuaccuguucgacgagagcggcgaguucaagcuggccucccacauguacugcagcuucuacccccccgacgaggacgaggaggagggggacugcgaggaggaggaguucgagccguccacccaguacgaguacggcacggaggacgacuaccagggcaagccccucgaguucggggcgaccagcgccgcccugcagcccgaggaggagcaggaggaggacuggcuggacgacgacucccagcagaccgugggccagcaggacgggagcgaggacaaccagaccacgaccauccagaccaucguggagguccagccccagcucgagauggagcugaccccgguggugcagacgaucgaggucaacuccuucagcggcuaccugaagcucaccgacaacguguacaucaagaacgccgacaucguggaggaggcgaagaaggucaagcccaccgugguggucaacgccgccaacguguaccugaagcacgggggcggcguggccggggcccugaacaaggcgaccaacaacgccaugcaggucgaguccgacgacuacaucgccacgaacggcccccucaagguggggggcagcugcguccuguccggccacaaccuggccaagcacugccuccacgugguggggcccaacgucaacaagggcgaggacauccagcugcugaagagcgccuacgagaacuucaaccagcacgaggugcuccuggcgccgcugcucuccgccgggaucuucggcgccgaccccauccacagccugcgggugugcgucgacaccgugcgcaccaacguguaccuggccgucuucgacaagaaccucuacgacaagcugguguccagcuuccuggagaugaagagcgagaagcagguggagcagaagaucgccgagauccccaaggaggaggucaagcccuucaucaccgaguccaagccgagcguggagcagcggaagcaggacgacaagaagaucaaggcgugcguggaggaggucacgaccacccucgaggagaccaaguuccugacggagaaccugcuccuguacaucgacaucaacgggaaccugcaccccgacuccgccacccucgugagcgacaucgacaucaccuuccugaagaaggacgcccccuacaucgugggcgacgucgugcaggagggcgugcugaccgccgucgugauccccacgaagaaggccgggggcaccaccgagaugcucgcgaaggcccugcgcaaggugccgaccgacaacuacaucacgaccuaccccgggcagggccugaacggguacaccgucgaggaggccaagaccgugcucaagaagugcaaguccgccuucuacauccugcccagcaucaucuccaacgagaagcaggagauccugggcaccgugagcuggaaccuccgggagaugcuggcgcacgccgaggagacgcgcaagcugaugcccgucugcguggagaccaaggccaucguguccaccauccagcggaaguacaagggcaucaagauccaggagggggucguggacuacggcgcccgcuucuacuucuacaccagcaagacgaccguggccucccugaucaacacccucaacgaccugaacgagacccuggucacgaugccgcucggguacgugacccacggccugaaccuggaggaggcggcccgguacaugcgcagccucaaggugcccgccaccgucuccgugagcucccccgacgccgugaccgccuacaacggguaccugacgagcuccagcaagacccccgaggagcacuucaucgagaccaucucccuggcgggcagcuacaaggacuggagcuacuccggccagagcacccagcucgggaucgaguuccugaagcggggcgacaaguccgucuacuacacgagcaacccgaccaccuuccaccuggacggggaggugaucaccuucgacaaccucaagacgcugcugucccuccgcgaggugcggaccaucaaggucuucaccaccguggacaacaucaaccugcacacgcagguggucgacaugagcaugaccuacggccagcaguucggccccaccuaccuggacggggccgacgugaccaagaucaagccccacaacucccacgagggcaagacguucuacgugcucccgaacgacgacacccugcgcgucgaggccuucgaguacuaccacaccaccgaccccagcuuccuggggcgguacauguccgcccucaaccacacgaagaaguggaaguacccccaggugaacggccugaccagcaucaagugggccgacaacaacugcuaccuggcgaccgcccuccugacccugcagcagaucgagcucaaguucaaccccccggcccugcaggacgccuacuaccgcgcgcgggccggggaggccgccaacuucugcgcccugauccucgcguacugcaacaagacggugggcgagcugggcgacguccgcgagaccauguccuaccuguuccagcacgccaaccucgacagcugcaagcgggugcugaacgucgugugcaagaccugcgggcagcagcagaccacccugaagggcguggaggccgucauguacauggggacgcucuccuacgagcaguucaagaagggcgugcagauccccugcaccugcgggaagcaggccaccaaguaccuggugcagcaggagagccccuucgucaugauguccgcccccccggcgcaguacgagcugaagcacggcaccuucacgugcgccagcgaguacaccggcaacuaccagugcgggcacuacaagcacaucaccuccaaggagacccucuacugcaucgacggcgcccugcugacgaagagcagcgaguacaaggggcccaucaccgacguguucuacaaggagaacuccuacaccaccacgaucaagcccgugaccuacaagcucgacggcgucgugugcaccgagaucgaccccaagcuggacaacuacuacaagaaggacaacagcuacuucaccgagcagccgaucgaccuggugcccaaccagcccuaccccaacgccuccuucgacaacuucaaguucgucugcgacaacaucaaguucgccgacgaccucaaccagcugacgggguacaagaagccggcgagccgcgagcugaaggugaccuucuuccccgaccucaacggcgacguggucgccaucgacuacaagcacuacacccccuccuucaagaagggcgccaagcugcugcacaagcccaucguguggcacgugaacaacgccaccaacaaggcgacguacaagccgaacaccuggugcauccggugccucuggagcaccaagcccgucgagaccuccaacagcuucgacgugcugaaguccgaggacgcccaggggauggacaaccuggccugcgaggaccucaagcccgugagcgaggaggucguggagaaccccacgauccagaaggacgugcuggagugcaacgucaagaccaccgagguggugggcgacaucauccugaagccggccaacaacucccucaagaucaccgaggaggucgggcacacggaccugauggccgcguacguggacaacagcucccugaccaucaagaagcccaacgagcucagccgcgugcugggccugaagacccucgccacccacgggcuggccgccgucaacuccgugcccugggacacgaucgccaacuacgcgaagccguuccugaacaagguggucagcaccaccaccaacaucgugacgcgcugccucaaccgggugugcaccaacuacaugcccuacuucuucacccugcugcuccagcugugcaccuucacccgcuccacgaacagccggaucaaggccuccaugcccaccaccaucgccaagaacaccgucaagagcgugggcaaguucugccuggaggccagcuucaacuaccucaagucccccaacuucuucaagcugaucaacaucaucaucugguuccugcuccugagcgugugccugggcucccucaucuacagcacggccgcgcuggggguccugauguccaaccucggcaugccgagcuacugcaccggguaccgcgagggcuaccugaacuccaccaacgugaccaucgccacguacugcaccggcagcauccccugcuccgugugccugagcgggcucgacucccuggacaccuaccccagccuggagaccauccagaucacgaucuccagcuucaagugggaccucaccgccuucggccuggucgccgagugguuccuggccuacauccucuucacccgguucuucuacgugcuggggcuggcggccaucaugcagcucuucuucuccuacuucgccgugcacuucaucagcaacuccuggcugauguggcugaucaucaaccugguccagauggcccccaucagcgcgauggugcgcauguacaucuucuucgccuccuucuacuacguguggaagagcuacguccacgugguggacggcugcaacagcuccaccugcaugaugugcuacaagcggaaccgcgccacgcgggucgagugcaccaccaucgugaacgggguccgccggagcuucuacguguacgccaacggcggcaagggguucugcaagcuccacaacuggaacugcgugaacugcgacaccuucugcgccggcuccacguucaucagcgacgaggucgcgcgcgaccugucccugcaguucaagcggccgaucaaccccaccgaccagagcuccuacaucguggacagcgugaccgucaagaacggguccauccaccucuacuucgacaaggccggccagaagaccuacgagcgccacagccugucccacuucgugaaccuggacaaccuccgggccaacaacacgaaggggagccugcccaucaacgugaucgucuucgacggcaaguccaagugcgaggagagcuccgccaagagcgccuccguguacuacagccagcugaugugccagcccauccuccugcuggaccaggcgcucguguccgacgucggcgacagcgccgagguggccgugaagauguucgacgccuacgucaacaccuucagcuccaccuucaacgugccgauggagaagcugaagacccugguggccacggcggaggccgagcucgccaagaacgucagccuggacaacgugcuguccaccuucaucagcgccgcgcgccagggguucguggacuccgacgucgagaccaaggacgugguggagugccucaagcugagccaccaguccgacaucgaggucaccggcgacagcugcaacaacuacaugcugacguacaacaagguggagaacaugaccccccgggaccucggggccugcaucgacugcuccgcccgccacaucaacgcccagguggccaagagccacaacaucgcgcugaucuggaacgucaaggacuucaugucccugagcgagcagcuccggaagcagauccgcuccgccgccaagaagaacaaccugcccuucaagcugaccugcgccaccacgcgccagguggugaacgucgugaccaccaagaucgcccucaagggcggguga

SEQ ID NO: 18219 - RNA, 5841 nt, Artificial Sequence
  SARS-CoV-2__MT451356.1__non-structural protein 3 (NSP3) CDS gc
auggcccccaccaaggugaccuucggcgacgacacggucaucgaggugcagggguacaagagcgugaacaucaccuucgagcuggacgagcgcaucgacaagguccucaacgagaagugcuccgccuacaccguggagcugggcaccgaggugaacgaguucgcgugcgucguggccgacgccgugaucaagacgcugcagccggucagcgagcuccugaccccccuggggaucgaccucgacgagugguccauggccaccuacuaccuguucgacgagagcggcgaguucaagcuggccucccacauguacugcagcuucuacccccccgacgaggacgaggaggagggggacugcgaggaggaggaguucgagccguccacccaguacgaguacggcacggaggacgacuaccagggcaagccccucgaguucggggcgaccagcgccgcccugcagcccgaggaggagcaggaggaggacuggcuggacgacgacucccagcagaccgugggccagcaggacgggagcgaggacaaccagaccacgaccauccagaccaucguggagguccagccccagcucgagauggagcugaccccgguggugcagacgaucgaggucaacuccuucagcggcuaccugaagcucaccgacaacguguacaucaagaacgccgacaucguggaggaggcgaagaaggucaagcccaccgugguggucaacgccgccaacguguaccugaagcacgggggcggcguggccggggcccugaacaaggcgaccaacaacgccaugcaggucgaguccgacgacuacaucgccacgaacggcccccucaagguggggggcagcugcguccuguccggccacaaccuggccaagcacugccuccacgugguggggcccaacgucaacaagggcgaggacauccagcugcugaagagcgccuacgagaacuucaaccagcacgaggugcuccuggcgccgcugcucuccgccgggaucuucggcgccgaccccauccacagccugcgggugugcgucgacaccgugcgcaccaacguguaccuggccgucuucgacaagaaccucuacgacaagcugguguccagcuuccuggagaugaagagcgagaagcagguggagcagaagaucgccgagauccccaaggaggaggucaagcccuucaucaccgaguccaagccgagcguggagcagcggaagcaggacgacaagaagaucaaggcgugcguggaggaggucacgaccacccucgaggagaccaaguuccugacggagaaccugcuccuguacaucgacaucaacgggaaccugcaccccgacuccgccacccucgugagcgacaucgacaucaccuuccugaagaaggacgcccccuacaucgugggcgacgucgugcaggagggcgugcugaccgccgucgugauccccacgaagaaggccgggggcaccaccgagaugcucgcgaaggcccugcgcaaggugccgaccgacaacuacaucacgaccuaccccgggcagggccugaacggguacaccgucgaggaggccaagaccgugcucaagaagugcaaguccgccuucuacauccugcccagcaucaucuccaacgagaagcaggagauccugggcaccgugagcuggaaccuccgggagaugcuggcgcacgccgaggagacgcgcaagcugaugcccgucugcguggagaccaaggccaucguguccaccauccagcggaaguacaagggcaucaagauccaggagggggucguggacuacggcgcccgcuucuacuucuacaccagcaagacgaccguggccucccugaucaacacccucaacgaccugaacgagacccuggucacgaugccgcucggguacgugacccacggccugaaccuggaggaggcggcccgguacaugcgcagccucaaggugcccgccaccgucuccgugagcucccccgacgccgugaccgccuacaacggguaccugacgagcuccagcaagacccccgaggagcacuucaucgagaccaucucccuggcgggcagcuacaaggacuggagcuacuccggccagagcacccagcucgggaucgaguuccugaagcggggcgacaaguccgucuacuacacgagcaacccgaccaccuuccaccuggacggggaggugaucaccuucgacaaccucaagacgcugcugucccuccgcgaggugcggaccaucaaggucuucaccaccguggacaacaucaaccugcacacgcagguggucgacaugagcaugaccuacggccagcaguucggccccaccuaccuggacggggccgacgugaccaagaucaagccccacaacucccacgagggcaagacguucuacgugcucccgaacgacgacacccugcgcgucgaggccuucgaguacuaccacaccaccgaccccagcuuccuggggcgguacauguccgcccucaaccacacgaagaaguggaaguacccccaggugaacggccugaccagcaucaagugggccgacaacaacugcuaccuggcgaccgcccuccugacccugcagcagaucgagcucaaguucaaccccccggcccugcaggacgccuacuaccgcgcgcgggccggggaggccgccaacuucugcgcccugauccucgcguacugcaacaagacggugggcgagcugggcgacguccgcgagaccauguccuaccuguuccagcacgccaaccucgacagcugcaagcgggugcugaacgucgugugcaagaccugcgggcagcagcagaccacccugaagggcguggaggccgucauguacauggggacgcucuccuacgagcaguucaagaagggcgugcagauccccugcaccugcgggaagcaggccaccaaguaccuggugcagcaggagagccccuucgucaugauguccgcccccccggcgcaguacgagcugaagcacggcaccuucacgugcgccagcgaguacaccggcaacuaccagugcgggcacuacaagcacaucaccuccaaggagacccucuacugcaucgacggcgcccugcugacgaagagcagcgaguacaaggggcccaucaccgacguguucuacaaggagaacuccuacaccaccacgaucaagcccgugaccuacaagcucgacggcgucgugugcaccgagaucgaccccaagcuggacaacuacuacaagaaggacaacagcuacuucaccgagcagccgaucgaccuggugcccaaccagcccuaccccaacgccuccuucgacaacuucaaguucgucugcgacaacaucaaguucgccgacgaccucaaccagcugacgggguacaagaagccggcgagccgcgagcugaaggugaccuucuuccccgaccucaacggcgacguggucgccaucgacuacaagcacuacacccccuccuucaagaagggcgccaagcugcugcacaagcccaucguguggcacgugaacaacgccaccaacaaggcgacguacaagccgaacaccuggugcauccggugccucuggagcaccaagcccgucgagaccuccaacagcuucgacgugcugaaguccgaggacgcccaggggauggacaaccuggccugcgaggaccucaagcccgugagcgaggaggucguggagaaccccacgauccagaaggacgugcuggagugcaacgucaagaccaccgagguggugggcgacaucauccugaagccggccaacaacucccucaagaucaccgaggaggucgggcacacggaccugauggccgcguacguggacaacagcucccugaccaucaagaagcccaacgagcucagccgcgugcugggccugaagacccucgccacccacgggcuggccgccgucaacuccgugcccugggacacgaucgccaacuacgcgaagccguuccugaacaagguggucagcaccaucaccaacaucgugacccgcugccucaaccgggugugcacgaacuacaugcccuacuucuucacccugcugcuccagcugugcaccuucacccgcuccaccaacagccggaucaaggccuccaugcccacgaccaucgccaagaacaccgucaagagcgugggcaaguucugccuggaggccagcuucaacuaccucaagucccccaacuucagcaagcugaucaacaucaucaucugguuccugcuccuguccgugugccugggcagccucaucuacuccaccgccgcgcuggggguccugaugagcaaccucggcaugccguccuacugcacgggguaccgcgagggcuaccugaacagcaccaacgugaccaucgccaccuacugcacgggcuccauccccugcagcgugugccuguccgggcucgacagccuggacaccuaccccucccuggagaccauccagaucaccaucagcuccuucaagugggaccucacggccuucggccuggucgccgagugguuccuggccuacauccucuucacccgguucuucuacgugcuggggcuggcggccaucaugcagcucuucuucagcuacuucgccgugcacuucaucuccaacagcuggcugauguggcugaucaucaaccugguccagauggcccccaucuccgcgauggugcgcauguacaucuucuucgccagcuucuacuacguguggaagagcuacguccacgugguggacggcugcaacuccagcaccugcaugaugugcuacaagcggaaccgcgccacccgggucgagugcacgaccaucgugaacgggguccgccgguccuucuacguguacgccaacggcggcaagggguucugcaagcuccacaacuggaacugcgugaacugcgacaccuucugcgccggcagcaccuucaucuccgacgaggucgcgcgcgaccugagccugcaguucaagcggccgaucaaccccacggaccaguccagcuacaucguggacuccgugaccgucaagaacgggagcauccaccucuacuucgacaaggccggccagaagaccuacgagcgccacucccugagccacuucgugaaccuggacaaccuccgggccaacaacaccaaggggucccugcccaucaacgugaucgucuucgacggcaagagcaagugcgaggaguccagcgccaaguccgccagcguguacuacucccagcugaugugccagcccauccuccugcuggaccaggcgcucgugagcgacgucggcgacagcgccgagguggccgugaagauguucgacgccuacgucaacacguucuccagcaccuucaacgugccgauggagaagcugaagacccugguggccaccgcggaggccgagcucgccaagaacgucucccuggacaacgugcugagcacguucaucuccgccgcgcgccagggguucguggacagcgacgucgagaccaaggacgugguggagugccucaagcugucccaccagagcgacaucgaggucaccggcgacuccugcaacaacuacaugcugaccuacaacaagguggagaacaugacgccccgggaccucggggccugcaucgacugcagcgcccgccacaucaacgcccagguggccaagucccacaacaucgcgcugaucuggaacgucaaggacuucaugagccuguccgagcagcuccggaagcagauccgcagcgccgccaagaagaacaaccugcccuucaagcugaccugcgccaccacccgccagguggugaacgucgugacgaccaagaucgcccucaagggcggguga

SEQ ID NO: 18220 - RNA, 5841 nt, Artificial Sequence
  SARS-CoV-2__MT451466.1__non-structural protein 3 (NSP3) CDS gc
auggcccccaccaaggugaccuucggcgacgacacggucaucgaggugcagggguacaagagcgugaacaucaccuucgagcuggacgagcgcaucgacaagguccucaacgagaagugcuccgccuacaccguggagcugggcaccgaggugaacgaguucgcgugcgucgugacggacgccgugaucaagacccugcagccggucagcgagcuccugaccccccuggggaucgaccucgacgagugguccauggccaccuacuaccuguucgacgagagcggcgaguucaagcuggccucccacauguacugcagcuucuacccccccgacgaggacgaggaggagggggacugcgaggaggaggaguucgagccguccacgcaguacgaguacggcaccgaggacgacuaccagggcaagccccucgaguucggggccaccagcgcggcccugcagcccgaggaggagcaggaggaggacuggcuggacgacgacucccagcagaccgugggccagcaggacgggagcgaggacaaccagacgaccaccauccagaccaucguggagguccagccccagcucgagauggagcugacgccgguggugcagaccaucgaggucaacuccuucagcggcuaccugaagcucaccgacaacguguacaucaagaacgccgacaucguggaggaggccaagaaggucaagcccaccgugguggucaacgcggccaacguguaccugaagcacgggggcggcguggccggggcccugaacaaggccacgaacaacgcgaugcaggucgaguccgacgacuacaucgccaccaacggcccccucaagguggggggcagcugcguccuguccggccacaaccuggccaagcacugccuccacgugguggggcccaacgucaacaagggcgaggacauccagcugcugaagagcgccuacgagaacuucaaccagcacgaggugcuccuggccccgcugcucuccgcggggaucuucggcgccgaccccauccacagccugcgggugugcgucgacaccgugcgcaccaacguguaccuggccgucuucgacaagaaccucuacgacaagcugguguccagcuuccuggagaugaagagcgagaagcagguggagcagaagaucgccgagauccccaaggaggaggucaagcccuucaucacggaguccaagccgagcguggagcagcggaagcaggacgacaagaagaucaaggccugcguggaggaggucaccaccacccucgaggagacgaaguuccugaccgagaaccugcuccuguacaucgacaucaacgggaaccugcaccccgacuccgcgacccucgugagcgacaucgacaucaccuuccugaagaaggacgcccccuacaucgugggcgacgucgugcaggagggcgugcugacggccgucgugauccccaccaagaaggccgggggcaccaccgagaugcucgccaaggcgcugcgcaaggugccgacggacaacuacaucaccaccuaccccgggcagggccugaacggguacaccgucgaggaggccaagaccgugcucaagaagugcaaguccgccuucuacauccugcccagcaucaucuccaacgagaagcaggagauccugggcacggugagcuggaaccuccgggagaugcuggcccacgcggaggagacccgcaagcugaugcccgucugcguggagaccaaggccaucguguccaccauccagcggaaguacaagggcaucaagauccaggagggggucguggacuacggcgcccgcuucuacuucuacacgagcaagaccaccguggccucccugaucaacacccucaacgaccugaacgagacgcuggucaccaugccgcucggguacgugacccacggccugaaccuggaggaggccgcgcgguacaugcgcuuccucaaggugcccgccaccgucagcguguccagccccgacgccgugacggccuacaacggguaccugaccuccagcuccaagacccccgaggagcacuucaucgagaccaucagccuggccggcuccuacaaggacuggagcuacagcggccaguccacgcagcucgggaucgaguuccugaagcggggcgacaagagcgucuacuacaccuccaacccgaccaccuuccaccuggacggggaggugaucacguucgacaaccucaagacccugcugagccuccgcgaggugcggaccaucaaggucuucaccacgguggacaacaucaaccugcacacccagguggucgacauguccaugaccuacggccagcaguucggccccaccuaccuggacggggcggacgugacgaagaucaagccccacaacagccacgagggcaagaccuucuacgugcucccgaacgacgacacccugcgcgucgaggccuucgaguacuaccacaccacggaccccuccuuccuggggcgguacaugagcgcccucaaccacaccaagaaguggaaguacccccaggugaacggccugaccuccaucaagugggccgacaacaacugcuaccuggccaccgcgcuccugacgcugcagcagaucgagcucaaguucaaccccccggcccugcaggacgccuacuaccgcgcccgggcgggggaggccgccaacuucugcgcccugauccucgccuacugcaacaagaccgugggcgagcugggcgacguccgcgagaccaugagcuaccuguuccagcacgcgaaccucgacuccugcaagcgggugcugaacgucgugugcaagaccugcgggcagcagcagaccacgcugaagggcguggaggccgucauguacauggggacccucagcuacgagcaguucaagaagggcgugcagauccccugcaccugcgggaagcaggccaccaaguaccuggugcagcaggagucccccuucgucaugaugagcgcccccccggcccaguacgagcugaagcacggcacguucaccugcgcguccgaguacaccggcaacuaccagugcgggcacuacaagcacaucaccagcaaggagacgcucuacugcaucgacggcgcccugcugaccaaguccagcgaguacaaggggcccaucaccgacguguucuacaaggagaacagcuacaccacgaccaucaagcccgugaccuacaagcucgacggcgucgugugcaccgagaucgaccccaagcuggacaacuacuacaagaaggacaacuccuacuucacggagcagccgaucgaccuggugcccaaccagcccuaccccaacgccagcuucgacaacuucaaguucgucugcgacaacaucaaguucgccgacgaccucaaccagcugaccggguacaagaagccggccucccgcgagcugaaggugaccuucuuccccgaccucaacggcgacguggucgcgaucgacuacaagcacuacacccccagcuucaagaagggcgccaagcugcugcacaagcccaucguguggcacgugaacaacgccacgaacaaggccaccuacaagccgaacaccuggugcauccggugccucugguccaccaagcccgucgagacgagcaacuccuucgacgugcugaagagcgaggacgcgcaggggauggacaaccuggccugcgaggaccucaagcccguguccgaggaggucguggagaaccccaccauccagaaggacgugcuggagugcaacgucaagaccaccgagguggugggcgacaucauccugaagccggccaacaacagccucaagaucacggaggaggucgggcacaccgaccugauggccgccuacguggacaacuccagccugaccaucaagaagcccaacgagcucucccgcgugcugggccugaagacccucgcgacgcacgggcuggccgccgucaacagcgugcccugggacaccaucgccaacuacgccaagccguuccugaacaagguggucuccaccaccacgaacaucgugacccgcugccucaaccgggugugcaccaacuacaugcccuacuucuucacccugcugcuccagcugugcaccuucacgcgcagcaccaacucccggaucaaggcgagcaugcccaccaccaucgccaagaacacggucaaguccgugggcaaguucugccuggaggccagcuucaacuaccucaagagccccaacuucuccaagcugaucaacaucaucaucugguuccugcuccugagcgugugccugggcucccucaucuacagcaccgccgcccuggggguccugauguccaaccucggcaugccgagcuacugcaccggguaccgcgagggcuaccugaacuccaccaacgugacgaucgcgaccuacugcaccggcagcauccccugcuccgugugccugagcgggcucgacucccuggacaccuaccccagccuggagacgauccagaucaccaucuccagcuucaagugggaccucaccgccuucggccuggucgccgagugguuccuggccuacauccucuucacccgguucuucuacgugcuggggcuggccgcgaucaugcagcucuucuucuccuacuucgccgugcacuucaucagcaacuccuggcugauguggcugaucaucaaccugguccagauggcccccaucagcgccauggugcgcauguacaucuucuucgcguccuucuacuacguguggaagagcuacguccacgugguggacggcugcaacagcuccacgugcaugaugugcuacaagcggaaccgcgccacccgggucgagugcaccaccaucgugaacgggguccgccggagcuucuacguguacgccaacggcggcaagggguucugcaagcuccacaacuggaacugcgugaacugcgacacguucugcgccggcuccaccuucaucagcgacgaggucgcccgcgaccugucccugcaguucaagcggccgaucaaccccaccgaccagagcuccuacaucguggacagcgugaccgucaagaacggguccauccaccucuacuucgacaaggcgggccagaagacguacgagcgccacagccugucccacuucgugaaccuggacaaccuccgggccaacaacaccaaggggagccugcccaucaacgugaucgucuucgacggcaaguccaagugcgaggagagcuccgccaagagcgccuccguguacuacagccagcugaugugccagcccauccuccugcuggaccaggcccucguguccgacgucggcgacagcgcggagguggccgugaagauguucgacgccuacgucaacaccuucagcuccaccuucaacgugccgauggagaagcugaagacgcugguggccaccgccgaggcggagcucgccaagaacgucagccuggacaacgugcuguccaccuucaucagcgccgcccgccagggguucguggacuccgacgucgagaccaaggacgugguggagugccucaagcugagccaccaguccgacaucgaggucacgggcgacagcugcaacaacuacaugcugaccuacaacaagguggagaacaugaccccccgggaccucggggcgugcaucgacugcuccgcccgccacaucaacgcccagguggccaagagccacaacaucgcccugaucuggaacgucaaggacuucaugucccugagcgagcagcuccggaagcagauccgcuccgcggccaagaagaacaaccugcccuucaagcugaccugcgccacgacccgccagguggugaacgucgugaccaccaagaucgcccucaagggcggguga

SEQ ID NO: 18221 - RNA, 5841 nt, Artificial Sequence
  SARS-CoV-2__MT451470.1__non-structural protein 3 (NSP3) CDS gc
auggcccccaccaaggugaccuucggcgacgacacggucaucgaggugcagggguacaagagcgugaacaucaccuucgagcuggacgagcgcaucgacaagguccucaacgagaagugcuccgccuacaccguggagcugggcaccgaggugaacgaguucgcgugcgucguggccgacgccgugaucaagacgcugcagccggucagcgagcuccugaccccccuggggaucgaccucgacgagugguccauggccaccuacuaccuguucgacgagagcggcgaguucaagcuggccucccacauguacugcagcuucuacccccccgacgaggacgaggaggagggggacugcgaggaggaggaguucgagccguccacccaguacgaguacggcacggaggacgacuaccagggcaagccccucgaguucggggcgaccagcgccgcccugcagcccgaggaggagcaggaggaggacuggcuggacgacgacucccagcagaccgugggccagcaggacgggagcgaggacaaccagaccacgaccauccagaccaucguggagguccagccccagcucgagauggagcugaccccgguggugcagacgaucgaggucaacuccuucagcggcuaccugaagcucaccgacaacguguacaucaagaacgccgacaucguggaggaggcgaagaaggucaagcccaccgugguggucaacgccgccaacguguaccugaagcacgggggcggcguggccggggcccugaacaaggcgaccaacaacgccaugcaggucgaguccgacgacuacaucgccacgaacggcccccucaagguggggggcagcugcguccuguccggccacaaccuggccaagcacugccuccacgugguggggcccaacgucaacaagggcgaggacauccagcugcugaagagcgccuacgagaacuucaaccagcacgaggugcuccuggcgccgcugcucuccgccgggaucuucggcgccgaccccauccacagccugcgggugugcgucgacaccgugcgcaccaacguguaccuggccgucuucgacaagaaccucuacgacaagcugguguccagcuuccuggagaugaagagcgagaagcagguggagcagaagaucgccgagauccccaaggaggaggucaagcccuucaucaccgaguccaagccgagcguggagcagcggaagcaggacgacaagaagaucaaggcgugcguggaggaggucacgaccacccucgaggagaccaaguuccugacggagaaccugcuccuguacaucgacaucaacgggaaccugcaccccgacuccgccacccucgugagcgacaucgacaucaccuuccugaagaaggacgcccccuacaucgugggcgacgucgugcaggagggcgugcugaccgccgucgugauccccacgaagaaggccgggggcaccaccgagaugcucgcgaaggcccugcgcaaggugccgaccgacaacuacaucacgaccuaccccgggcagggccugaacggguacaccgucgaggaggccaagaccgugcucaagaagugcaaguccgccuucuacauccugcccagcaucaucuccaacgagaagcaggagauccugggcaccgugagcuggaaccuccgggagaugcuggcgcacgccgaggagacgcgcaagcugaugcccgucugcguggagaccaaggccaucguguccaccauccagcggaaguacaagggcaucaagauccaggagggggucguggacuacggcgcccgcuucuacuucuacaccagcaagacgaccguggccucccugaucaacacccucaacgaccugaacgagacccuggucacgaugccgcucggguacgugacccacggccugaaccuggaggaggcggcccgguacaugcgcagccucaaggugcccgccaccgucuccgugagcucccccgacgccgugaccgccuacaacggguaccugacgagcuccagcaagacccccgaggagcacuucaucgagaccaucucccuggcgggcagcuacaaggacuggagcuacuccggccagagcacccagcucgggaucgaguuccugaagcggggcgacaaguccgucuacuacacgagcaacccgaccaccuuccaccuggacggggaggugaucaccuucgacaaccucaagacgcugcugucccuccgcgaggugcggaccaucaaggucuucaccaccguggacaacaucaaccugcacacgcagguggucgacaugagcaugaccuacggccagcaguucggccccaccuaccuggacggggccgacgugaccaagaucaagccccacaacucccacgagggcaagacguucuacgugcucccgaacgacgacacccugcgcgucgaggccuucgaguacuaccacaccaccgaccccagcuuccuggggcgguacauguccgcccucaaccacacgaagaaguggaaguacccccaggugaacggccugaccagcaucaagugggccgacaacaacugcuaccuggcgaccgcccuccugacccugcagcagaucgagcucaaguucaaccccccggcccugcaggacgccuacuaccgcgcgcgggccggggaggccgccaacuucugcgcccugauccucgcguacugcaacaagacggugggcgagcugggcgacguccgcgagaccauguccuaccuguuccagcacgccaaccucgacagcugcaagcgggugcugaacgucgugugcaagaccugcgggcagcagcagaucacccugaagggcguggaggccgucauguacauggggacccucuccuacgagcaguucaagaagggcgugcagauccccugcacgugcgggaagcaggccaccaaguaccuggugcagcaggagagccccuucgucaugauguccgcccccccggcgcaguacgagcugaagcacggcaccuucaccugcgccagcgaguacacgggcaacuaccagugcgggcacuacaagcacaucaccuccaaggagacccucuacugcaucgacggcgcccugcugaccaagagcagcgaguacaaggggcccaucacggacguguucuacaaggagaacuccuacaccaccaccaucaagcccgugacguacaagcucgacggcgucgugugcaccgagaucgaccccaagcuggacaacuacuacaagaaggacaacagcuacuucaccgagcagccgaucgaccuggugcccaaccagcccuaccccaacgccuccuucgacaacuucaaguucgucugcgacaacaucaaguucgccgacgaccucaaccagcugaccggguacaagaagccggcgagccgcgagcugaaggugacguucuuccccgaccucaacggcgacguggucgccaucgacuacaagcacuacacccccuccuucaagaagggcgccaagcugcugcacaagcccaucguguggcacgugaacaacgccaccaacaaggcgaccuacaagccgaacacguggugcauccggugccucuggagcaccaagcccgucgagaccuccaacagcuucgacgugcugaaguccgaggacgcccaggggauggacaaccuggccugcgaggaccucaagcccgugagcgaggaggucguggagaaccccaccauccagaaggacgugcuggagugcaacgucaagacgaccgagguggugggcgacaucauccugaagccggccaacaacucccucaagaucaccgaggaggucgggcacaccgaccugauggccgcguacguggacaacagcucccugacgaucaagaagcccaacgagcucagccgcgugcugggccugaagacccucgccacccacgggcuggccgccgucaacuccgugcccugggacaccaucgccaacuacgcgaagccguuccugaacaagguggucagcacgaccaccaacaucgugacccgcugccucaaccgggugugcacgaacuacaugcccuacuucuucacccugcugcuccagcugugcaccuucacccgcuccaccaacagccggaucaaggccuccaugcccacgaccaucgccaagaacaccgucaagagcgugggcaaguucugccuggaggccagcuucaacuaccucaagucccccaacuucagcaagcugaucaacaucaucaucugguuccugcuccuguccgugugccugggcagccucaucuacuccaccgccgcgcuggggguccugaugagcaaccucggcaugccguccuacugcacgggguaccgcgagggcuaccugaacagcaccaacgugaccaucgccaccuacugcacgggcuccauccccugcagcgugugccuguccgggcucgacagccuggacaccuaccccucccuggagaccauccagaucaccaucagcuccuucaagugggaccucacggccuucggccuggucgccgagugguuccuggccuacauccucuucacccgguucuucuacgugcuggggcuggcggccaucaugcagcucuucuucagcuacuucgccgugcacuucaucuccaacagcuggcugauguggcugaucaucaaccugguccagauggcccccaucuccgcgauggugcgcauguacaucuucuucgccagcuucuacuacguguggaagagcuacguccacgugguggacggcugcaacuccagcaccugcaugaugugcuacaagcggaaccgcgccacccgggucgagugcacgaccaucgugaacgggguccgccgguccuucuacguguacgccaacggcggcaagggguucugcaagcuccacaacuggaacugcgugaacugcgacaccuucugcgccggcagcaccuucaucuccgacgaggucgcgcgcgaccugagccugcaguucaagcggccgaucaaccccacggaccaguccagcuacaucguggacuccgugaccgucaagaacgggagcauccaccucuacuucgacaaggccggccagaagaccuacgagcgccacucccugagccacuucgugaaccuggacaaccuccgggccaacaacaccaaggggucccugcccaucaacgugaucgucuucgacggcaagagcaagugcgaggaguccagcgccaaguccgccagcguguacuacucccagcugaugugccagcccauccuccugcuggaccaggcgcucgugagcgacgucggcgacagcgccgagguggccgugaagauguucgacgccuacgucaacacguucuccagcaccuucaacgugccgauggagaagcugaagacccugguggccaccgcggaggccgagcucgccaagaacgucucccuggacaacgugcugagcacguucaucuccgccgcgcgccagggguucguggacagcgacgucgagaccaaggacgugguggagugccucaagcugucccaccagagcgacaucgaggucaccggcgacuccugcaacaacuacaugcugaccuacaacaagguggagaacaugacgccccgggaccucggggccugcaucgacugcagcgcccgccacaucaacgcccagguggccaagucccacaacaucgcgcugaucuggaacgucaaggacuucaugagccuguccgagcagcuccggaagcagauccgcagcgccgccaagaagaacaaccugcccuucaagcugaccugcgccaccacccgccagguggugaacgucgugacgaccaagaucgcccucaagggcggguga

SEQ ID NO: 18222 - RNA, 5841 nt, Artificial Sequence
  SARS-CoV-2__MT451708.1__non-structural protein 3 (NSP3) CDS gc
auggcccccaccaaggugaccuucggcgacgacacggucaucgaggugcagggguacaagagcgugaacaucaccuucgagcuggacgagcgcaucgacaagguccucaacgagaagugcuccgccuacaccguggagcugggcaccgaggugaacgaguucgcgugcgucguggccgacgccgugaucaagacgcugcagccggucagcgagcuccugaccccccuggggaucgaccucgacgagugguccauggccaccuacuaccuguucgacgagagcggcgaguucaagcuggccucccacauguacugcagcuucuacccccccgacgaggacgaggaggagggggacugcgaggaggaggaguucgagccguccacccaguacgaguacggcacggaggacgacuaccagggcaagccccucgaguucggggcgaccagcgccgcccugcagcccgaggaggagcaggaggaggacuggcuggacgacgacucccagcagaccgugggccagcaggacgggagcgaggacaaccagaucaccacgauccagaccaucguggagguccagccccagcucgagauggagcugaccccgguggugcagaccaucgaggucaacuccuucagcggcuaccugaagcucacggacaacguguacaucaagaacgccgacaucguggaggaggcgaagaaggucaagcccaccgugguggucaacgccgccaacguguaccugaagcacgggggcggcguggccggggcccugaacaaggcgaccaacaacgccaugcaggucgaguccgacgacuacaucgccaccaacggcccccucaagguggggggcagcugcguccuguccggccacaaccuggccaagcacugccuccacgugguggggcccaacgucaacaagggcgaggacauccagcugcugaagagcgccuacgagaacuucaaccagcacgaggugcuccuggcgccgcugcucuccgccgggaucuucggcgccgaccccauccacagccugcgggugugcgucgacacggugcgcaccaacguguaccuggccgucuucgacaagaaccucuacgacaagcugguguccagcuuccuggagaugaagagcgagaagcagguggagcagaagaucgccgagauccccaaggaggaggucaagcccuucaucaccgaguccaagccgagcguggagcagcggaagcaggacgacaagaagaucaaggcgugcguggaggaggucaccacgacccucgaggagaccaaguuccugaccgagaaccugcuccuguacaucgacaucaacgggaaccugcaccccgacuccgccacgcucgugagcgacaucgacaucaccuuccugaagaaggacgcccccuacaucgugggcgacgucgugcaggagggcgugcugaccgccgucgugauccccaccaagaaggccgggggcacgaccgagaugcucgcgaaggcccugcgcaaggugccgaccgacaacuacaucaccacguaccccgggcagggccugaacggguacaccgucgaggaggccaagaccgugcucaagaagugcaaguccgccuucuacauccugcccagcaucaucuccaacgagaagcaggagauccugggcaccgugagcuggaaccuccgggagaugcuggcgcacgccgaggagacccgcaagcugaugcccgucugcguggagacgaaggccaucguguccaccauccagcggaaguacaagggcaucaagauccaggagggggucguggacuacggcgcccgcuucuacuucuacaccagcaagaccacgguggccucccugaucaacacccucaacgaccugaacgagacccuggucaccaugccgcucggguacgugacgcacggccugaaccuggaggaggcggcccgguacaugcgcagccucaaggugcccgccaccgucuccgugagcucccccgacgccgugaccgccuacaacggguaccugaccagcuccagcaagacgcccgaggagcacuucaucgagaccaucucccuggcgggcagcuacaaggacuggagcuacuccggccagagcacccagcucgggaucgaguuccugaagcggggcgacaaguccgucuacuacaccagcaacccgacgaccuuccaccuggacggggaggugaucaccuucgacaaccucaagacccugcugucccuccgcgaggugcggacgaucaaggucuucaccaccguggacaacaucaaccugcacacccagguggucgacaugagcaugacguacggccagcaguucggccccaccuaccuggacggggccgacgugaccaagaucaagccccacaacucccacgagggcaagaccuucuacgugcucccgaacgacgacacgcugcgcgucgaggccuucgaguacuaccacaccaccgaccccagcuuccuggggcgguacauguccgcccucaaccacaccaagaaguggaaguacccccaggugaacggccugacgagcaucaagugggccgacaacaacugcuaccuggcgaccgcccuccugacccugcagcagaucgagcucaaguucaaccccccggcccugcaggacgccuacuaccgcgcgcgggccggggaggccgccaacuucugcgcccugauccucgcguacugcaacaagaccgugggcgagcugggcgacguccgcgagacgauguccuaccuguuccagcacgccaaccucgacagcugcaagcgggugcugaacgucgugugcaagaccugcgggcagcagcagaccacccugaagggcguggaggccgucauguacauggggacccucuccuacgagcaguucaagaagggcgugcagauccccugcacgugcgggaagcaggccaccaaguaccuggugcagcaggagagccccuucgucaugauguccgcccccccggcgcaguacgagcugaagcacggcaccuucaccugcgccagcgaguacacgggcaacuaccagugcgggcacuacaagcacaucaccuccaaggagacccucuacugcaucgacggcgcccugcugaccaagagcagcgaguacaaggggcccaucacggacguguucuacaaggagaacuccuacaccaccaccaucaagcccgugacguacaagcucgacggcgucgugugcaccgagaucgaccccaagcuggacaacuacuacaagaaggacaacagcuacuucaccgagcagccgaucgaccuggugcccaaccagcccuaccccaacgccuccuucgacaacuucaaguucgucugcgacaacaucaaguucgccgacgaccucaaccagcugaccggguacaagaagccggcgagccgcgagcugaaggugacguucuuccccgaccucaacggcgacguggucgccaucgacuacaagcacuacacccccuccuucaagaagggcgccaagcugcugcacaagcccaucguguggcacgugaacaacgccaccaacaaggcgaccuacaagccgaacacguggugcauccggugccucuggagcaccaagcccgucgagaccuccaacagcuucgacgugcugaaguccgaggacgcccaggggauggacaaccuggccugcgaggaccucaagcccgugagcgaggaggucguggagaaccccaccauccagaaggacgugcuggagugcaacgucaagacgaccgagguggugggcgacaucauccugaagccggccaacaacucccucaagaucaccgaggaggucgggcacaccgaccugauggccgcguacguggacaacagcucccugacgaucaagaagcccaacgagcucagccgcgugcugggccugaagacccucgccacccacgggcuggccgccgucaacuccgugcccugggacaccaucgccaacuacgcgaagccguuccugaacaagguggucagcacgaccaccaacaucgugacccgcugccucaaccgggugugcacgaacuacaugcccuacuucuucacccugcugcuccagcugugcaccuucacccgcuccaccaacagccggaucaaggccuccaugcccacgaccaucgccaagaacaccgucaagagcgugggcaaguucugccuggaggccagcuucaacuaccucaagucccccaacuucagcaagcugaucaacaucaucaucugguuccugcuccuguccgugugccugggcagccucaucuacuccaccgccgcgcuggggguccugaugagcaaccucggcaugccguccuacugcacgggguaccgcgagggcuaccugaacagcaccaacgugaccaucgccaccuacugcacgggcuccauccccugcagcgugugccuguccgggcucgacagccuggacaccuaccccucccuggagaccauccagaucaccaucagcuccuucaagugggaccucacggccuucggccuggucgccgagugguuccuggccuacauccucuucacccgguucuucuacgugcuggggcuggcggccaucaugcagcucuucuucagcuacuucgccgugcacuucaucuccaacagcuggcugauguggcugaucaucaaccugguccagauggcccccaucuccgcgauggugcgcauguacaucuucuucgccagcuucuacuacguguggaagagcuacguccacgugguggacggcugcaacuccagcaccugcaugaugugcuacaagcggaaccgcgccacccgggucgagugcacgaccaucgugaacgggguccgccgguccuucuacguguacgccaacggcggcaagggguucugcaagcuccacaacuggaacugcgugaacugcgacaccuucugcgccggcagcaccuucaucuccgacgaggucgcgcgcgaccugagccugcaguucaagcggccgaucaaccccacggaccaguccagcuacaucguggacuccgugaccgucaagaacgggagcauccaccucuacuucgacaaggccggccagaagaccuacgagcgccacucccugagccacuucgugaaccuggacaaccuccgggccaacaacaccaaggggucccugcccaucaacgugaucgucuucgacggcaagagcaagugcgaggaguccagcgccaaguccgccagcguguacuacucccagcugaugugccagcccauccuccugcuggaccaggcgcucgugagcgacgucggcgacagcgccgagguggccgugaagauguucgacgccuacgucaacacguucuccagcaccuucaacgugccgauggagaagcugaagacccugguggccaccgcggaggccgagcucgccaagaacgucucccuggacaacgugcugagcacguucaucuccgccgcgcgccagggguucguggacagcgacgucgagaccaaggacgugguggagugccucaagcugucccaccagagcgacaucgaggucaccggcgacuccugcaacaacuacaugcugaccuacaacaagguggagaacaugacgccccgggaccucggggccugcaucgacugcagcgcccgccacaucaacgcccagguggccaagucccacaacaucgcgcugaucuggaacgucaaggacuucaugagccuguccgagcagcuccggaagcagauccgcagcgccgccaagaagaacaaccugcccuucaagcugaccugcgccaccacccgccagguggugaacgucgugacgaccaagaucgcccucaagggcggguga

SEQ ID NO: 18223 - RNA, 5841 nt, Artificial Sequence
  SARS-CoV-2__MT452576.1__non-structural protein 3 (NSP3) CDS gc
auggcccccaccaaggugaccuucggcgacgacacggucaucgaggugcagggguacaagagcgugaacaucaccuucgagcuggacgagcgcaucgacaagguccucaacgagaagugcuccgccuacaccguggagcugggcaccgaggugaacgaguucgcgugcgucguggccgacgccgugaucaagacgcugcagccggucagcgagcuccugaccccccuggggaucgaccucgacgagugguccauggccaccuacuaccuguucgacgagagcggcgaguucaagcuggccucccacauguacugcagcuucuacccccccgacgaggacgaggaggagggggacugcgaggaggaggaguucgagccguccacccaguacgaguacggcacggaggacgacuaccagggcaagccccucgaguucggggcgaccagcgccgcccugcagcccgaggaggagcaggaggaggacuggcuggacgacgacucccagcagaccgugggccagcaggacgggagcgaggacaaccagaccacgaccauccagaccaucguggagguccagccccagcucgagauggagcugaccccgguggugcagacgaucgaggucaacuccuucagcggcuaccugaagcucaccgacaacguguacaucaagaacgccgacaucguggaggaggcgaagaaggucaagcccaccgugguggucaacgccgccaacguguaccugaagcacgggggcggcguggccggggcccugaacaaggcgaccaacaacgccaugcaggucgaguccgacgacuacaucgccacgaacggcccccucaagguggggggcagcugcguccuguccggccacaaccuggccaagcacugccuccacgugguggggcccaacgucaacaagggcgaggacauccagcugcugaagagcgccuacgagaacuucaaccagcacgaggugcuccuggcgccgcugcucuccgccgggaucuucggcgccgaccccauccacagccugcgggugugcgucgacaccgugcgcaccaacguguaccuggccgucuucgacaagaaccucuacgacaagcugguguccagcuuccuggagaugaagagcgagaagcagguggagcagaagaucgccgagauccccaaggaggaggucaagcccuucaucaccgaguccaagccgagcguggagcagcggaagcaggacgacaagaagaucaaggcgugcguggaggaggucacgaccacccucgaggagaccaaguuccugacggagaaccugcuccuguacaucgacaucaacgggaaccugcaccccgacuccgccacccucgugagcgacaucgacaucaccuuccugaagaaggacgcccccuacaucgugggcgacgucgugcaggagggcgugcugaccgccgucgugauccccacgaagaaggccgggggcaccaccgagaugcucgcgaaggcccugcgcaaggugccgaccgacaacuacaucacgaccuaccccgggcagggccugaacggguacaccgucgacgaggccaagaccgugcucaagaagugcaaguccgccuucuacauccugcccagcaucaucuccaacgagaagcaggagauccugggcaccgugagcuggaaccuccgggagaugcuggcgcacgccgaggagacgcgcaagcugaugcccgucugcguggagaccaaggccaucguguccaccauccagcggaaguacaagggcaucaagauccaggagggggucguggacuacggcgcccgcuucuacuucuacaccagcaagacgaccguggccucccugaucaacacccucaacgaccugaacgagacccuggucacgaugccgcucggguacgugacccacggccugaaccuggaggaggcggcccgguacaugcgcagccucaaggugcccgccaccgucuccgugagcucccccgacgccgugaccgccuacaacggguaccugacgagcuccagcaagacccccgaggagcacuucaucgagaccaucucccuggcgggcagcuacaaggacuggagcuacuccggccagagcacccagcucgggaucgaguuccugaagcggggcgacaaguccgucuacuacacgagcaacccgaccaccuuccaccuggacggggaggugaucaccuucgacaaccucaagacgcugcugucccuccgcgaggugcggaccaucaaggucuucaccaccguggacaacaucaaccugcacacgcagguggucgacaugagcaugaccuacggccagcaguucggccccaccuaccuggacggggccgacgugaccaagaucaagccccacaacucccacgagggcaagacguucuacgugcucccgaacgacgacacccugcgcgucgaggccuucgaguacuaccacaccaccgaccccagcuuccuggggcgguacauguccgcccucaaccacacgaagaaguggaaguacccccaggugaacggccugaccagcaucaagugggccgacaacaacugcuaccuggcgaccgcccuccugacccugcagcagaucgagcucaaguucaaccccccggcccugcaggacgccuacuaccgcgcgcgggccggggaggccgccaacuucugcgcccugauccucgcguacugcaacaagacggugggcgagcugggcgacguccgcgagaccauguccuaccuguuccagcacgccaaccucgacagcugcaagcgggugcugaacgucgugugcaagaccugcgggcagcagcagaccacccugaagggcguggaggccgucauguacauggggacgcucuccuacgagcaguucaagaagggcgugcagauccccugcaccugcgggaagcaggccaccaaguaccuggugcagcaggagagccccuucgucaugauguccgcccccccggcgcaguacgagcugaagcacggcaccuucacgugcgccagcgaguacaccggcaacuaccagugcgggcacuacaagcacaucaccuccaaggagacccucuacugcaucgacggcgcccugcugacgaagagcagcgaguacaaggggcccaucaccgacguguucuacaaggagaacuccuacaccaccacgaucaagcccgugaccuacaagcucgacggcgucgugugcaccgagaucgaccccaagcuggacaacuacuacaagaaggacaacagcuacuucaccgagcagccgaucgaccuggugcccaaccagcccuaccccaacgccuccuucgacaacuucaaguucgucugcgacaacaucaaguucgccgacgaccucaaccagcugacgggguacaagaagccggcgagccgcgagcugaaggugaccuucuuccccgaccucaacggcgacguggucgccaucgacuacaagcacuacacccccuccuucaagaagggcgccaagcugcugcacaagcccaucguguggcacgugaacaacgccaccaacaaggcgacguacaagccgaacaccuggugcauccggugccucuggagcaccaagcccgucgagaccuccaacagcuucgacgugcugaaguccgaggacgcccaggggauggacaaccuggccugcgaggaccucaagcccgugagcgaggaggucguggagaaccccacgauccagaaggacgugcuggagugcaacgucaagaccaccgagguggugggcgacaucauccugaagccggccaacaacucccucaagaucaccgaggaggucgggcacacggaccugauggccgcguacguggacaacagcucccugaccaucaagaagcccaacgagcucagccgcgugcugggccugaagacccucgccacccacgggcuggccgccgucaacuccgugcccugggacacgaucgccaacuacgcgaagccguuccugaacaagguggucagcaccaccaccaacaucgugacgcgcugccucaaccgggugugcaccaacuacaugcccuacuucuucacccugcugcuccagcugugcaccuucacccgcuccacgaacagccggaucaaggccuccaugcccaccaccaucgccaagaacaccgucaagagcgugggcaaguucugccuggaggccagcuucaacuaccucaagucccccaacuucagcaagcugaucaacaucaucaucugguuccugcuccuguccgugugccugggcagccucaucuacuccacggccgcgcuggggguccugaugagcaaccucggcaugccguccuacugcaccggguaccgcgagggcuaccugaacagcaccaacgugaccaucgccacguacugcaccggcuccauccccugcagcgugugccuguccgggcucgacagccuggacaccuaccccucccuggagaccauccagaucacgaucagcuccuucaagugggaccucaccgccuucggccuggucgccgagugguuccuggccuacauccucuucacccgguucuucuacgugcuggggcuggcggccaucaugcagcucuucuucagcuacuucgccgugcacuucaucuccaacagcuggcugauguggcugaucaucaaccugguccagauggcccccaucuccgcgauggugcgcauguacaucuucuucgccagcuucuacuacguguggaagagcuacguccacgugguggacggcugcaacuccagcaccugcaugaugugcuacaagcggaaccgcgccacgcgggucgagugcaccaccaucgugaacgggguccgccgguccuucuacguguacgccaacggcggcaagggguucugcaagcuccacaacuggaacugcgugaacugcgacaccuucugcgccggcagcacguucaucuccgacgaggucgcgcgcgaccugagccugcaguucaagcggccgaucaaccccaccgaccaguccagcuacaucguggacuccgugaccgucaagaacgggagcauccaccucuacuucgacaaggccggccagaagaccuacgagcgccacucccugagccacuucgugaaccuggacaaccuccgggccaacaacacgaaggggucccugcccaucaacgugaucgucuucgacggcaagagcaagugcgaggaguccagcgccaaguccgccagcguguacuacucccagcugaugugccagcccauccuccugcuggaccaggcgcucgugagcgacgucggcgacagcgccgagguggccgugaagauguucgacgccuacgucaacaccuucuccagcaccuucaacgugccgauggagaagcugaagacccugguggccacggcggaggccgagcucgccaagaacgucucccuggacaacgugcugagcaccuucaucuccgccgcgcgccagggguucguggacagcgacgucgagaccaaggacgugguggagugccucaagcugucccaccagagcgacaucgaggucaccggcgacuccugcaacaacuacaugcugacguacaacaagguggagaacaugaccccccgggaccucggggccugcaucgacugcagcgcccgccacaucaacgcccagguggccaagucccacaacaucgcgcugaucuggaacgucaaggacuucaugagccuguccgagcagcuccggaagcagauccgcagcgccgccaagaagaacaaccugcccuucaagcugaccugcgccaccacgcgccagguggugaacgucgugaccaccaagaucgcccucaagggcggguga

SEQ ID NO: 18224 - RNA, 5841 nt, Artificial Sequence
  SARS-CoV-2__MT446312.1__non-structural protein 3 (NSP3) CDS gc
auggcccccaccaaggugaccuucggcgacgacacggucaucgaggugcagggguacaagagcgugaacaucaccuucgagcuggacgagcgcaucgacaagguccucaacgagaagugcuccgccuacaccguggagcugggcaccgaggugaacgaguucgcgugcgucguggccgacgccgugaucaagacgcugcagccggucagcgagcuccugaccccccuggggaucgaccucgacgagugguccauggccaccuacuaccuguucgacgagagcggcgaguucaagcuggccucccacauguacugcagcuucuacccccccgacgaggacgaggaggagggggacugcgaggaggaggaguucgagccguccacccaguacgaguacggcacggaggacgacuaccagggcaagccccucgaguucggggcgaccagcgccgcccugcagcccgaggaggagcaggaggaggacuggcuggacgacgacucccagcagaccgugggccagcaggacgggagcgaggacaaccagaccacgaccauccagaccaucguggagguccagccccagcucgagauggagcugaccccgguggugcagacgaucgaggucaacuccuucagcggcuaccugaagcucaccgacaacguguacaucaagaacgccgacaucguggaggaggcgaagaaggucaagcccaccgugguggucaacgccgccaacguguaccugaagcacgggggcggcguggccggggcccugaacaaggcgaccaacaacgccaugcaggucgaguccgacgacuacaucgccacgaacggcccccucaagguggggggcagcugcguccuguccggccacaaccuggccaagcacugccuccacgugguggggcccaacgucaacaagggcgaggacauccagcugcugaagagcgccuacgagaacuucaaccagcacgaggugcuccuggcgccgcugcucuccgccgggaucuucggcgccgaccccauccacagccugcgggugugcgucgacaccgugcgcaccaacguguaccuggccgucuucgacaagaaccucuacgacaagcugguguccagcuuccuggagaugaagagcgagaagcagguggagcagaagaucgccgagauccccaaggaggaggucaagcccuucaucaccgaguccaagccgagcguggagcagcggaagcaggacgacaagaagaucaaggcgugcguggaggaggucacgaccacccucgaggagaccaaguuccugacggagaaccugcuccuguacaucgacaucaacgggaaccugcaccccgacuccgccacccucgugagcgacaucgacaucaccuuccugaagaaggacgcccccuacaucgugggcgacgucgugcaggagggcgugcugaccgccgucgugauccccacgaagaaggccgggggcaccaccgagaugcucgcgaaggcccugcgcaaggugccgaccgacaacuacaucacgaccuaccccgggcagggccugaacggguacaccgucgaggaggccaagaccgugcucaagaagugcaaguccgccuucuacauccugcccagcaucaucuccaacgagaagcaggagauccugggcaccgugagcuggaaccuccgggagaugcuggcgcacgccgaggagacgcgcaagcugaugcccgucugcguggagaccaaggccaucguguccaccauccagcggaaguacaagggcaucaagauccaggagggggucguggacuacggcgcccgcuucuacuucuacaccagcaagacgaccguggccucccugaucaacacccucaacgaccugaacgagacccuggucacgaugccgcucggguacgugacccacggccugaaccuggaggaggcggcccgguacaugcgcagccucaaggugcccgccaccgucuccgugagcucccccgacgccgugaccgccuacaacggguaccugacgagcuccagcaagacccccgaggagcacuucaucgagaccaucucccuggcgggcagcuacaaggacuggagcuacuccggccagagcacccagcucgggaucgaguuccugaagcggggcgacaaguccgucuacuacacgagcaacccgaccaccuuccaccuggacggggaggugaucaccuucgacaaccucaagacgcugcugucccuccgcgaggugcggaccaucaaggucuucaccaccguggacaacaucaaccugcacacgcagguggucgacaugagcaugaccuacggccagcaguucggccccaccuaccuggacggggccgacgugaccaagaucaagccccacaacucccacgagggcaagacguucuacgugcucccgaacgacgacacccugcgcgucgaggccuucgaguacuaccacaccaccgaccccagcuuccuggggcgguacauguccgcccucaaccacacgaagaaguggaaguacccccaggugaacggccugaccagcaucaagugggccgacaacaacugcuaccuggcgaccgcccuccugacccugcagcagaucgagcucaaguucaaccccccggcccugcaggacgccuacuaccgcgcgcgggccggggaggccgccaacuucugcgcccugauccucgcguacugcaacaagacggugggcgagcugggcgacguccgcgagaccauguccuaccuguuccagcacgccaaccucgacagcugcaagcgggugcugaacgucgugugcaagaccugcgggcagcagcagaccacccugaagggcguggaggccgucauguacauggggacgcucuccuacgagcaguucaagaagggcgugcagauccccugcaccugcgggaagcaggccaccaaguaccuggugcagcaggagagccccuucgucaugauguccgcccccccggcgcaguacgagcugaagcacggcaccuucacgugcgccagcgaguacaccggcaacuaccagugcgggcacuacaagcacaucaccuccaaggagacccucuacugcaucgacggcgcccugcugacgaagagcagcgaguacaaggggcccaucaccgacguguucuacaaggagaacuccuacaccaccacgaucaagcccgugaccuacaagcucgacggcgucgugugcaccgagaucgaccccaagcuggacaacuacuacaagaaggacaacagcuacuucaccgagcagccgaucgaccuggugcccaaccagcccuaccccaacgccuccuucgacaacuucaaguucgucugcgacaacaucaaguucgccgacgaccucaaccagcugacgggguacaagaagccggcgagccgcgagcugaaggugaccuucuuccccgaccucaacggcgacguggucgccaucgacuacaagcacuacacccccuccuucaagaagggcgccaagcugcugcacaagcccaucguguggcacgugaacaacgccaccaacaaggcgacguacaagccgaacaccuggugcauccggugccucuggagcaccaagcccgucgagaccuccaacagcuucgacgugcugaaguccgaggacgcccaggggauggacaaccuggccugcgaggaccucaagcccgugagcgaggaggucguggagaaccccacgauccagaaggacgugcuggagugcaacgucaagaccaccgagguggugggcgacaucauccugaagccggccaacaacucccucaagaucaccgaggaggucgggcacacggaccugauggccgcguacguggacaacagcucccugaccaucaagaagcccaacgagcucagccgcgugcugggccugaagacccucgccacccacgggcuggccgccgucaacuccgugcccugggacacgaucgccaacuacgcgaagccguuccugaacaagguggucagcaccaccaccaacaucgugacgcgcugccucaaccgggugugcaccaacuacaugcccuacuucuucacccugcugcuccagcugugcaccuucacccgcaucacgaacucccggaucaaggccagcaugcccaccaccaucgccaagaacaccgucaaguccgugggcaaguucugccuggaggccagcuucaacuaccucaagagccccaacuucuccaagcugaucaacaucaucaucugguuccugcuccugagcgugugccugggcucccucacguacagcaccgccgcgcuggggguccugauguccaaccucggcaugccgagcuacugcaccggguaccgcgagggcuaccugaacuccaccaacgugacgaucgccaccuacugcaccggcagcauccccugcuccgugugccugagcgggcucgacucccuggacaccuaccccagccuggagacgauccagaucaccaucuccagcuucaagugggaccucaccgccuucggccuggucgccgagugguuccuggccuacauccucuucacccgguucuucuacgugcuggggcuggcggccaucaugcagcucuucuucuccuacuucgccgugcacuucaucagcaacuccuggcugauguggcugaucaucaaccugguccagauggcccccaucagcgcgauggugcgcauguacaucuucuucgccuccuucuacuacguguggaagagcuacguccacgugguggacggcugcaacagcuccacgugcaugaugugcuacaagcggaaccgcgccacccgggucgagugcaccaccaucgugaacgggguccgccggagcuucuacguguacgccaacggcggcaagggguucugcaagcuccacaacuggaacugcgugaacugcgacacguucugcgccggcuccaccuucaucagcgacgaggucgcgcgcgaccugucccugcaguucaagcggccgaucaaccccaccgaccagagcuccuacaucguggacagcgugaccgucaagaacggguccauccaccucuacuucgacaaggccggccagaagacguacgagcgccacagccugucccacuucgugaaccuggacaaccuccgggccaacaacaccaaggggagccugcccaucaacgugaucgucuucgacggcaaguccaagugcgaggagagcuccgccaagagcgccuccguguacuacagccagcugaugugccagcccauccuccugcuggaccaggcgcucguguccgacgucggcgacagcgccgagguggccgugaagauguucgacgccuacgucaacaccuucagcuccaccuucaacgugccgauggagaagcugaagacgcugguggccaccgcggaggccgagcucgccaagaacgucagccuggacaacgugcuguccaccuucaucagcgccgcgcgccagggguucguggacuccgacgucgagaccaaggacgugguggagugccucaagcugagccaccaguccgacaucgaggucacgggcgacagcugcaacaacuacaugcugaccuacaacaagguggagaacaugaccccccgggaccucggggccugcaucgacugcuccgcccgccacaucaacgcccagguggccaagagccacaacaucgcgcugaucuggaacgucaaggacuucaugucccugagcgagcagcuccggaagcagauccgcuccgccgccaagaagaacaaccugcccuucaagcugaccugcgccacgacccgccagguggugaacgucgugaccaccaagaucgcccucaagggcggguga

SEQ ID NO: 18225 - RNA, 5841 nt, Artificial Sequence
  SARS-CoV-2__MT446357.1__non-structural protein 3 (NSP3) CDS gc
auggcccccaccaaggugaccuucggcgacgacacggucaucgaggugcagggguacaagagcgugaacaucaccuucgagcuggacgagcgcaucgacaagguccucaacgagaagugcuccgccuacaccguggagcugggcaccgaggugaacgaguucgcgugcgucguggccgacgccgugaucaagacgcugcagccggucagcgagcuccugaccccccuggggaucgaccucgacgagugguccauggccaccuacuaccuguucgacgagagcggcgaguucaagcuggccucccacauguacugcagcuucuacccccccgacgaggacgaggaggagggggacugcgaggaggaggaguucgagccguccacccaguacgaguacggcacggaggacgacuaccagggcaagccccucgaguucggggcgaccagcgccgcccugcagcccgaggaggagcaggaggaggacuggcuggacgacgacucccagcagaccgugggccagcaggacgggagcgaggacaaccagaccacgaccauccagaccaucguggagguccagccccagcucgagauggagcugaccccgguggugcagacgaucgaggucaacuccuucagcggcuaccugaagcucaccgacaacguguacaucaagaacgccgacaucguggaggaggcgaagaaggucaagcccaccgugguggucaacgccgccaacguguaccugaagcacgggggcggcguggccggggcccugaacaaggcgaccaacaacgccaugcaggucgaguccgacgacuacaucgccacgaacggcccccucaagguggggggcagcugcguccuguccggccacaaccuggccaagcacugccuccacgugguggggcccaacgucaacaagggcgaggacauccagcugcugaagagcgccuacgagaacuucaaccagcacgaggugcuccuggcgccgcugcucuccgccgggaucuucggcgccgaccccauccacagccugcgggugugcgucgacaccgugcgcaccaacguguaccuggccgucuucgacaagaaccucuacgacaagcugguguccagcuuccuggagaugaagagcgagaagcagguggagcagaagaucgccgagauccccaaggaggaggucaagcccuucaucaccgaguccaagccgagcguggagcagcggaagcaggacgacaagaagaucaaggcgugcguggaggaggucacgaccacccucgaggagaccaaguuccugacggagaaccugcuccuguacaucgacaucaacgggaaccugcaccccgacuccgccacccucgugagcgacaucgacaucaccuuccugaagaaggacgcccccuacaucgugggcgacgucgugcaggagggcgugcugaccgccgucgugauccccacgaagaaggccgggggcaccaccgagaugcucgcgaaggcccugcgcgaggugccgaccgacaacuacaucacgaccuaccccgggcagggccugaacggguacaccgucgaggaggccaagaccgugcucaagaagugcaaguccgccuucuacauccugcccagcaucaucuccaacgagaagcaggagauccugggcaccgugagcuggaaccuccgggagaugcuggcgcacgccgaggagacgcgcaagcugaugcccgucugcguggagaccaaggccaucguguccaccauccagcggaaguacaagggcaucaagauccaggagggggucguggacuacggcgcccgcuucuacuucuacaccagcaagacgaccguggccucccugaucaacacccucaacgaccugaacgagacccuggucacgaugccgcucggguacgugacccacggccugaaccuggaggaggcggcccgguacaugcgcagccucaaggugcccgccaccgucuccgugagcucccccgacgccgugaccgccuacaacggguaccugacgagcuccagcaagacccccgaggagcacuucaucgagaccaucucccuggcgggcagcuacaaggacuggagcuacuccggccagagcacccagcucgggaucgaguuccugaagcggggcgacaaguccgucuacuacacgagcaacccgaccaccuuccaccuggacggggaggugaucaccuucgacaaccucaagacgcugcugucccuccgcgaggugcggaccaucaaggucuucaccaccguggacaacaucaaccugcacacgcagguggucgacaugagcaugaccuacggccagcaguucggccccaccuaccuggacggggccgacgugaccaagaucaagccccacaacucccacgagggcaagacguucuacgugcucccgaacgacgacacccugcgcgucgaggccuucgaguacuaccacaccaccgaccccagcuuccuggggcgguacauguccgcccucaaccacacgaagaaguggaaguacccccaggugaacggccugaccagcaucaagugggccgacaacaacugcuaccuggcgaccgcccuccugacccugcagcagaucgagcucaaguucaaccccccggcccugcaggacgccuacuaccgcgcgcgggccggggaggccgccaacuucugcgcccugauccucgcguacugcaacaagacggugggcgagcugggcgacguccgcgagaccauguccuaccuguuccagcacgccaaccucgacagcugcaagcgggugcugaacgucgugugcaagaccugcgggcagcagcagaccacccugaagggcguggaggccgucauguacauggggacgcucuccuacgagcaguucaagaagggcgugcagauccccugcaccugcgggaagcaggccaccaaguaccuggugcagcaggagagccccuucgucaugauguccgcccccccggcgcaguacgagcugaagcacggcaccuucacgugcgccagcgaguacaccggcaacuaccagugcgggcacuacaagcacaucaccuccaaggagacccucuacugcaucgacggcgcccugcugacgaagagcagcgaguacaaggggcccaucaccgacguguucuacaaggagaacuccuacaccaccacgaucaagcccgugaccuacaagcucgacggcgucgugugcaccgagaucgaccccaagcuggacaacuacuacaagaaggacaacagcuacuucaccgagcagccgaucgaccuggugcccaaccagcccuaccccaacgccuccuucgacaacuucaaguucgucugcgacaacaucaaguucgccgacgaccucaaccagcugacgggguacaagaagccggcgagccgcgagcugaaggugaccuucuuccccgaccucaacggcgacguggucgccaucgacuacaagcacuacacccccuccuucaagaagggcgccaagcugcugcacaagcccaucguguggcacgugaacaacgccaccaacaaggcgacguacaagccgaacaccuggugcauccggugccucuggagcaccaagcccgucgagaccuccaacagcuucgacgugcugaaguccgaggacgcccaggggauggacaaccuggccugcgaggaccucaagcccgugagcgaggaggucguggagaaccccacgauccagaaggacgugcuggagugcaacgucaagaccaccgagguggugggcgacaucauccugaagccggccaacaacucccucaagaucaccgaggaggucgggcacacggaccugauggccgcguacguggacaacagcucccugaccaucaagaagcccaacgagcucagccgcgugcugggccugaagacccucgccacccacgggcuggccgccgucaacuccgugcccugggacacgaucgccaacuacgcgaagccguuccugaacaagguggucagcaccaccaccaacaucgugacgcgcugccucaaccgggugugcaccaacuacaugcccuacuucuucacccugcugcuccagcugugcaccuucacccgcuccacgaacagccggaucaaggccuccaugcccaccaccaucgccaagaacaccgucaagagcgugggcaaguucugccuggaggccagcuucaacuaccucaagucccccaacuucagcaagcugaucaacaucaucaucugguuccugcuccuguccgugugccugggcagccucaucuacuccacggccgcgcuggggguccugaugagcaaccucggcaugccguccuacugcaccggguaccgcgagggcuaccugaacagcaccaacgugaccaucgccacguacugcaccggcuccauccccugcagcgugugccuguccgggcucgacagccuggacaccuaccccucccuggagaccauccagaucacgaucagcuccuucaagugggaccucaccgccuucggccuggucgccgagugguuccuggccuacauccucuucacccgguucuucuacgugcuggggcuggcggccaucaugcagcucuucuucagcuacuucgccgugcacuucaucuccaacagcuggcugauguggcugaucaucaaccugguccagauggcccccaucuccgcgauggugcgcauguacaucuucuucgccagcuucuacuacguguggaagagcuacguccacgugguggacggcugcaacuccagcaccugcaugaugugcuacaagcggaaccgcgccacgcgggucgagugcaccaccaucgugaacgggguccgccgguccuucuacguguacgccaacggcggcaagggguucugcaagcuccacaacuggaacugcgugaacugcgacaccuucugcgccggcagcacguucaucuccgacgaggucgcgcgcgaccugagccugcaguucaagcggccgaucaaccccaccgaccaguccagcuacaucguggacuccgugaccgucaagaacgggagcauccaccucuacuucgacaaggccggccagaagaccuacgagcgccacucccugagccacuucgugaaccuggacaaccuccgggccaacaacacgaaggggucccugcccaucaacgugaucgucuucgacggcaagagcaagugcgaggaguccagcgccaaguccgccagcguguacuacucccagcugaugugccagcccauccuccugcuggaccaggcgcucgugagcgacgucggcgacagcgccgagguggccgugaagauguucgacgccuacgucaacaccuucuccagcaccuucaacgugccgauggagaagcugaagacccugguggccacggcggaggccgagcucgccaagaacgucucccuggacaacgugcugagcaccuucaucuccgccgcgcgccagggguucguggacagcgacgucgagaccaaggacgugguggagugccucaagcugucccaccagagcgacaucgaggucaccggcgacuccugcaacaacuacaugcugacguacaacaagguggagaacaugaccccccgggaccucggggccugcaucgacugcagcgcccgccacaucaacgcccagguggccaagucccacaacaucgcgcugaucuggaacgucaaggacuucaugagccuguccgagcagcuccggaagcagauccgcagcgccgccaagaagaacaaccugcccuucaagcugaccugcgccaccacgcgccagguggugaacgucgugaccaccaagaucgcccucaagggcggguga

SEQ ID NO: 18226 - RNA, 5841 nt, Artificial Sequence
  SARS-CoV-2__MT447165.1__non-structural protein 3 (NSP3) CDS gc
auggcccccaccaaggugaccuucggcgacgacacggucaucgaggugcagggguacaagagcgugaacaucaccuucgagcuggacgagcgcaucgacaagguccucaacgagaagugcuccgccuacaccguggagcugggcaccgaggugaacgaguucgcgugcgucguggccgacgccgugaucaagacgcugcagccggucagcgagcuccugaccccccuggggaucgaccucgacgagugguccauggccaccuacuaccuguucgacgagagcggcgaguucaagcuggccucccacauguacugcagcuucuacccccccgacgaggacgaggaggagggggacugcgaggaggaggaguucgagccguccacccaguacgaguacggcacggaggacgacuaccagggcaagccccucgaguucggggcgaccagcgccgcccugcagcccgaggaggagcaggaggaggacuggcuggacgacgacucccagcagaccgugggccagcaggacgggagcgaggacaaccagaccacgaccauccagaccaucguggagguccagccccagcucgagauggagcugaccccgguggugcagacgaucgaggucaacuccuucagcggcuaccugaagcucaccgacaacguguacaucaagaacgccgacaucguggaggaggcgaagaaggucaagcccaccgugguggucaacgccgccaacguguaccugaagcacgggggcggcguggccggggcccugaacaaggcgaccaacaacgccaugcaggucgaguccgacgacuacaucgccacgaacggcccccucaagguggggggcagcugcguccuguccggccacaaccuggccaagcacugccuccacgugguggggcccaacgucaacaagggcgaggacauccagcugcugaagagcgccuacgagaacuucaaccagcacgaggugcuccuggcgccgcugcucuccgccgggaucuucggcgccgaccccauccacagccugcgggugugcgucgacaccgugcgcaccaacguguaccuggccgucuucgacaagaaccucuacgacaagcugguguccagcuuccuggagaugaagagcgagaagcagguggagcagaagaucgccgagauccccaaggaggaggucaagcccuucaucaccgaguccaagccgagcguggagcagcggaagcaggacgacaagaagaucaaggcgugcguggaggaggucacgaccacccucgaggagaccaaguuccugacggagaaccugcuccuguacaucgacaucaacgggaaccugcaccccgacuccgccacccucgugagcgacaucgacaucaccuuccugaagaaggacgcccccuacaucgugggcgacgucgugcaggagggcgugcugaccgccgucgugauccccacgaagaaggccgggggcaccaccgagaugcucgcgaaggcccugcgcaaggugccgaccgacaacuacaucacgaccuaccccgggcagggccugaacggguacaccgucgaggaggccaagaccgugcucaagaagugcaaguccgccuucuacauccugcccagcaucaucuccaacgagaagcaggagauccugggcaccgugagcuggaacuuccgggagaugcucgcgcacgccgaggagacgcgcaagcugaugcccgucugcguggagaccaaggccaucguguccaccauccagcggaaguacaagggcaucaagauccaggagggggucguggacuacggcgcccgcuucuacuucuacaccagcaagacgaccguggccucccugaucaacacccugaacgaccucaacgagacccuggucacgaugccgcugggguacgugacccacggccucaaccuggaggaggcggcccgguacaugcgcagccugaaggugcccgccaccgucuccgugagcucccccgacgccgugaccgccuacaacggguaccucacgagcuccagcaagacccccgaggagcacuucaucgagaccaucucccuggcgggcagcuacaaggacuggagcuacuccggccagagcacccagcuggggaucgaguuccucaagcggggcgacaaguccgucuacuacacgagcaacccgaccaccuuccaccuggacggggaggugaucaccuucgacaaccugaagacgcuccugucccugcgcgaggugcggaccaucaaggucuucaccaccguggacaacaucaaccuccacacgcagguggucgacaugagcaugaccuacggccagcaguucggccccaccuaccuggacggggccgacgugaccaagaucaagccccacaacucccacgagggcaagacguucuacgugcugccgaacgacgacacccuccgcgucgaggccuucgaguacuaccacaccaccgaccccagcuuccuggggcgguacauguccgcccugaaccacacgaagaaguggaaguacccccaggugaacggccucaccagcaucaagugggccgacaacaacugcuaccuggcgaccgcccugcucacccugcagcagaucgagcugaaguucaaccccccggcccuccaggacgccuacuaccgcgcgcgggccggggaggccgccaacuucugcgcccugauccuggcguacugcaacaagacggugggcgagcucggcgacguccgcgagaccauguccuaccuguuccagcacgccaaccuggacagcugcaagcgggugcucaacgucgugugcaagaccugcgggcagcagcagaccacccugaagggcguggaggccgucauguacauggggacgcuguccuacgagcaguucaagaagggcgugcagauccccugcaccugcgggaagcaggccaccaaguaccucgugcagcaggagagccccuucgucaugauguccgcccccccggcgcaguacgagcugaagcacggcaccuucacgugcgccagcgaguacaccggcaacuaccagugcgggcacuacaagcacaucaccuccaaggagacccuguacugcaucgacggcgcccuccugacgaagagcagcgaguacaaggggcccaucaccgacguguucuacaaggagaacuccuacaccaccacgaucaagcccgugaccuacaagcuggacggcgucgugugcaccgagaucgaccccaagcucgacaacuacuacaagaaggacaacagcuacuucaccgagcagccgaucgaccuggugcccaaccagcccuaccccaacgccuccuucgacaacuucaaguucgucugcgacaacaucaaguucgccgacgaccugaaccagcucacgggguacaagaagccggcgagccgcgagcugaaggugaccuucuuccccgaccugaacggcgacguggucgccaucgacuacaagcacuacacccccuccuucaagaagggcgccaagcuccugcacaagcccaucguguggcacgugaacaacgccaccaacaaggcgacguacaagccgaacaccuggugcauccggugccuguggagcaccaagcccgucgagaccuccaacagcuucgacgugcucaaguccgaggacgcccaggggauggacaaccuggccugcgaggaccugaagcccgugagcgaggaggucguggagaaccccacgauccagaaggacgugcucgagugcaacgucaagaccaccgagguggugggcgacaucauccugaagccggccaacaacucccugaagaucaccgaggaggucgggcacacggaccucauggccgcguacguggacaacagcucccugaccaucaagaagcccaacgagcugagccgcgugcucggccugaagacccuggccacccacgggcucgccgccgucaacuccgugcccugggacacgaucgccaacuacgcgaagccguuccugaacaagguggucagcaccaccaccaacaucgugacgcgcugccugaaccgggugugcaccaacuacaugcccuacuucuucacccuccugcugcagcucugcaccuucacccgcuccacgaacagccggaucaaggccuccaugcccaccaccaucgccaacaacaccgucaagagcgugggcaaguucugccuggaggccagcuucaacuaccugaagucccccaacuucagcaagcucaucaacaucaucaucugguuccugcugcucuccgugugccugggcagccugaucuacuccacggccgcgcucgggguccugaugagcaaccugggcaugccguccuacugcaccggguaccgcgagggcuaccucaacagcaccaacgugaccaucgccacguacugcaccggcuccauccccugcagcgugugccuguccgggcuggacagccucgacaccuaccccucccuggagaccauccagaucacgaucagcuccuucaagugggaccugaccgccuucggccucgucgccgagugguuccuggccuacauccuguucacccgguucuucuacgugcucgggcuggcggccaucaugcagcuguucuucagcuacuucgccgugcacuucaucuccaacagcuggcucauguggcugaucaucaaccugguccagauggcccccaucuccgcgauggugcgcauguacaucuucuucgccagcuucuacuacguguggaagagcuacguccacgugguggacggcugcaacuccagcaccugcaugaugugcuacaagcggaaccgcgccacgcgggucgagugcaccaccaucgugaacgggguccgccgguccuucuacguguacgccaacggcggcaagggguucugcaagcugcacaacuggaacugcgugaacugcgacaccuucugcgccggcagcacguucaucuccgacgaggucgcgcgcgaccucagccugcaguucaagcggccgaucaaccccaccgaccaguccagcuacaucguggacuccgugaccgucaagaacgggagcauccaccuguacuucgacaaggccggccagaagaccuacgagcgccacucccucagccacuucgugaaccuggacaaccugcgggccaacaacacgaaggggucccuccccaucaacgugaucgucuucgacggcaagagcaagugcgaggaguccagcgccaaguccgccagcguguacuacucccagcugaugugccagcccauccugcuccuggaccaggcgcuggugagcgacgucggcgacagcgccgagguggccgugaagauguucgacgccuacgucaacaccuucuccagcaccuucaacgugccgauggagaagcucaagacccugguggccacggcggaggccgagcuggccaagaacgucucccucgacaacgugcugagcaccuucaucuccgccgcgcgccagggguucguggacagcgacgucgagaccaaggacgugguggagugccugaagcucucccaccagagcgacaucgaggucaccggcgacuccugcaacaacuacaugcugacguacaacaagguggagaacaugaccccccgggaccugggggccugcaucgacugcagcgcccgccacaucaacgcccagguggccaagucccacaacaucgcgcucaucuggaacgucaaggacuucaugagccuguccgagcagcugcggaagcagauccgcagcgccgccaagaagaacaaccuccccuucaagcugaccugcgccaccacgcgccagguggugaacgucgugaccaccaagaucgcccugaagggcggguga

SEQ ID NO: 18227 - RNA, 5841 nt, Artificial Sequence
  SARS-CoV-2__MT447171.1__non-structural protein 3 (NSP3) CDS gc
auggcccccaccaaggugaccuucggcgacgacacggucaucgaggugcagggguacaagagcgugaacaucaccuucgagcuggacgagcgcaucgacaagguccucaacgagaagugcuccgccuacaccguggagcugggcaccgaggugaacgaguucgcgugcgucguggccgacgccgugaucaagacgcugcagccggucagcgagcuccugaccccccuggggaucgaccucgacgagugguccauggccaccuacuaccuguucgacgagagcggcgaguucaagcuggccucccacauguacugcagcuucuacccccccgacgaggacgaggaggagggggacugcgaggaggaggaguucgagccguccacccaguacgaguacggcacggaggacgacuaccagggcaagccccucgaguucggggcgaccagcgccgcccugcagcccgaggaggagcaggaggaggacuggcuggacgacgacucccagcagaccgugggccagcaggacgggagcgaggacaaccagaccacgaccauccagaccaucguggagguccagccccagcucgagauggagcugaccccgguggugcagacgaucgaggucaacuccuucagcggcuaccugaagcucaccgacaacguguacaucaagaacgccgacaucguggaggaggcgaagaaggucaagcccaccgugguggucaacgccgccaacguguaccugaagcacgggggcggcguggccggggcccugaacaaggcgaccaacaacgccaugcaggucgaguccgacgacuacaucgccacgaacggcccccucaagguggggggcagcugcguccuguccggccacaaccuggccaagcacugccuccacgugguggggcccaacgucaacaagggcgaggacauccagcugcugaagagcgccuacgagaacuucaaccagcacgaggugcuccuggcgccgcugcucuccgccgggaucuucggcgccgaccccauccacagccugcgggugugcgucgacaucgugcgcaccaacguguaccuggccgucuucgacaagaaccucuacgacaagcugguguccagcuuccuggagaugaagagcgagaagcagguggagcagaagaucgccgagauccccaaggaggaggucaagcccuucaucaccgaguccaagccgagcguggagcagcggaagcaggacgacaagaagaucaaggcgugcguggaggaggucaccacgacccucgaggagaccaaguuccugaccgagaaccugcuccuguacaucgacaucaacgggaaccugcaccccgacuccgccacgcucgugagcgacaucgacaucaccuuccugaagaaggacgcccccuacaucgugggcgacgucgugcaggagggcgugcugaccgccgucgugauccccaccaagaaggccgggggcacgaccgagaugcucgcgaaggcccugcgcaaggugccgaccgacaacuacaucaccacguaccccgggcagggccugaacggguacaccgucgaggaggccaagaccgugcucaagaagugcaaguccgccuucuacauccugcccagcaucaucuccaacgagaagcaggagauccugggcaccgugagcuggaacuuccgggagaugcucgcgcacgccgaggagacccgcaagcugaugcccgucugcguggagacgaaggccaucguguccaccauccagcggaaguacaagggcaucaagauccaggagggggucguggacuacggcgcccgcuucuacuucuacaccagcaagaccacgguggccucccugaucaacacccugaacgaccucaacgagacccuggucaccaugccgcugggguacgugacgcacggccucaaccuggaggaggcggcccgguacaugcgcagccugaaggugcccgccaccgucuccgugagcucccccgacgccgugaccgccuacaacggguaccucaccagcuccagcaagacgcccgaggagcacuucaucgagaccaucucccuggcgggcagcuacaaggacuggagcuacuccggccagagcacccagcuggggaucgaguuccucaagcggggcgacaaguccgucuacuacaccagcaacccgacgaccuuccaccuggacggggaggugaucaccuucgacaaccugaagacccuccugucccugcgcgaggugcggacgaucaaggucuucaccaccguggacaacaucaaccuccacacccagguggucgacaugagcaugacguacggccagcaguucggccccaccuaccuggacggggccgacgugaccaagaucaagccccacaacucccacgagggcaagaccuucuacgugcugccgaacgacgacacgcuccgcgucgaggccuucgaguacuaccacaccaccgaccccagcuuccuggggcgguacauguccgcccugaaccacaccaagaaguggaaguacccccaggugaacggccucacgagcaucaagugggccgacaacaacugcuaccuggcgaccgcccugcucacccugcagcagaucgagcugaaguucaaccccccggcccuccaggacgccuacuaccgcgcgcgggccggggaggccgccaacuucugcgcccugauccuggcguacugcaacaagaccgugggcgagcucggcgacguccgcgagacgauguccuaccuguuccagcacgccaaccuggacagcugcaagcgggugcucaacgucgugugcaagaccugcgggcagcagcagaccacccugaagggcguggaggccgucauguacauggggacccuguccuacgagcaguucaagaagggcgugcagauccccugcacgugcgggaagcaggccaccaaguaccucgugcagcaggagagccccuucgucaugauguccgcccccccggcgcaguacgagcugaagcacggcaccuucaccugcgccagcgaguacacgggcaacuaccagugcgggcacuacaagcacaucaccuccaaggagacccuguacugcaucgacggcgcccuccugaccaagagcagcgaguacaaggggcccaucacggacguguucuacaaggagaacuccuacaccaccaccaucaagcccgugacguacaagcuggacggcgucgugugcaccgagaucgaccccaagcucgacaacuacuacaagaaggacaacagcuacuucaccgagcagccgaucgaccuggugcccaaccagcccuaccccaacgccuccuucgacaacuucaaguucgucugcgacaacaucaaguucgccgacgaccugaaccagcucaccggguacaagaagccggcgagccgcgagcugaaggugacguucuuccccgaccugaacggcgacguggucgccaucgacuacaagcacuacacccccuccuucaagaagggcgccaagcuccugcacaagcccaucguguggcacgugaacaacgccaccaacaaggcgaccuacaagccgaacacguggugcauccggugccuguggagcaccaagcccgucgagaccuccaacagcuucgacgugcucaaguccgaggacgcccaggggauggacaaccuggccugcgaggaccugaagcccgugagcgaggaggucguggagaaccccaccauccagaaggacgugcucgagugcaacgucaagacgaccgagguggugggcgacaucauccugaagccggccaacaacucccugaagaucaccgaggaggucgggcacaccgaccucauggccgcguacguggacaacagcucccugacgaucaagaagcccaacgagcugagccgcgugcucggccugaagacccuggccacccacgggcucgccgccgucaacuccgugcccugggacaccaucgccaacuacgcgaagccguuccugaacaagguggucagcacgaccaccaacaucgugacccgcugccugaaccgggugugcacgaacuacaugcccuacuucuucacccuccugcugcagcucugcaccuucacccgcuccaccaacagccggaucaaggccuccaugcccacgaccaucgccaagaacaccgucaagagcgugggcaaguucugccuggaggccagcuucaacuaccugaagucccccaacuucagcaagcucaucaacaucaucaucugguuccugcugcucuccgugugccugggcagccugaucuacuccaccgccgcgcucgggguccugaugagcaaccugggcaugccguccuacugcacgggguaccgcgagggcuaccucaacagcaccaacgugaccaucgccaccuacugcacgggcuccauccccugcagcgugugccuguccgggcuggacagccucgacaccuaccccucccuggagaccauccagaucaccaucagcuccuucaagugggaccugacggccuucggccucgucgccgagugguuccuggccuacauccuguucacccgguucuucuacgugcucgggcuggcggccaucaugcagcuguucuucagcuacuucgccgugcacuucaucuccaacagcuggcucauguggcugaucaucaaccugguccagauggcccccaucuccgcgauggugcgcauguacaucuucuucgccagcuucuacuacguguggaagagcuacguccacgugguggacggcugcaacuccagcaccugcaugaugugcuacaagcggaaccgcgccacccgggucgagugcacgaccaucgugaacgggguccgccgguccuucuacguguacgccaacggcggcaagggguucugcaagcugcacaacuggaacugcgugaacugcgacaccuucugcgccggcagcaccuucaucuccgacgaggucgcgcgcgaccucagccugcaguucaagcggccgaucaaccccacggaccaguccagcuacaucguggacuccgugaccgucaagaacgggagcauccaccuguacuucgacaaggccggccagaagaccuacgagcgccacucccucagccacuucgugaaccuggacaaccugcgggccaacaacaccaaggggucccuccccaucaacgugaucgucuucgacggcaagagcaagugcgaggaguccagcgccaaguccgccagcguguacuacucccagcugaugugccagcccauccugcuccuggaccaggcgcuggugagcgacgucggcgacagcgccgagguggccgugaagauguucgacgccuacgucaacacguucuccagcaccuucaacgugccgauggagaagcucaagacccugguggccaccgcggaggccgagcuggccaagaacgucucccucgacaacgugcugagcacguucaucuccgccgcgcgccagggguucguggacagcgacgucgagaccaaggacgugguggagugccugaagcucucccaccagagcgacaucgaggucaccggcgacuccugcaacaacuacaugcugaccuacaacaagguggagaacaugacgccccgggaccugggggccugcaucgacugcagcgcccgccacaucaacgcccagguggccaagucccacaacaucgcgcucaucuggaacgucaaggacuucaugagccuguccgagcagcugcggaagcagauccgcagcgccgccaagaagaacaaccuccccuucaagcugaccugcgccaccacccgccagguggugaacgucgugacgaccaagaucgcccugaagggcggguga

SEQ ID NO: 18228 - RNA, 5841 nt, Artificial Sequence
  SARS-CoV-2__MT439297.1__non-structural protein 3 (NSP3) CDS gc
auggcccccaccaaggugaccuucggcgacgacacggucaucgaggugcagggguacaagagcgugaacaucaccuucgagcuggacgagcgcaucgacaagguccucaacgagaagugcuccgccuacaccguggagcugggcaccgaggugaacgaguucgcgugcgucguggccgacgccgugaucaagacgcugcagccggucagcgagcuccugaccccccuggggaucgaccucgacgagugguccauggccaccuacuaccuguucgacgagagcggcgaguucaagcuggccucccacauguacugcagcuucuacccccccgacgaggacgaggaggagggggacugcgaggaggaggaguucgagccguccacccaguacgaguacggcacggaggacgacuaccagggcaagccccucgaguucggggcgaccagcgccgcccugcagcccgaggaggagcaggaggaggacuggcuggacgacgacucccagcagaccgugggccagcaggacgggagcgaggacaaccagaccacgaccauccagaccaucguggagguccagccccagcucgagauggagcugaccccgguggugcagacgaucgaggucaacuccuucagcggcuaccugaagcucaccgacaacguguacaucaagaacgccgacaucguggaggaggcgaagaaggucaagcccaccgugguggucaacgccgccaacguguaccugaagcacgggggcggcguggccggggcccugaacaaggcgaccaacaacgccaugcaggucgaguccgacgacuacaucgccacgaacggcccccucaagguggggggcagcugcguccuguccggccacaaccuggccaagcacugccuccacgugguggggcccaacgucaacaagggcgaggacauccagcugcugaagagcgccuacgagaacuucaaccagcacgaggugcuccuggcgccgcugcucuccgccgggaucuucggcgccgaccccauccacagccugcgggugugcgucgacaccgugcgcaccaacguguaccuggccgucuucgacaagaaccucuacgacaagcugguguccagcuuccuggagaugaagagcgagaagcagguggagcagaagaucgccgagauccccaaggaggaggucaagcccuucaucaccgaguccaagccgagcguggagcagcggaagcaggacgacaagaagaucaaggcgugcguggaggaggucacgaccacccucgaggagaccaaguuccugacggagaaccugcuccuguacaucgacaucaacgggaaccugcaccccgacuccgccacccucgugagcgacaucgacaucaccuuccugaagaaggacgcccccuacaucgugggcgacgucgugcaggagggcgugcugaccgccgucgugauccccacgaagaaggccgggggcaccaccgagaugcucgcgaaggcccugcgcaaggugccgaccgacaacuacaucacgaccuaccccgggcagggccugaacggguacaccgucgaggaggccaagaccgugcucaagaagugcaaguccgccuucuacauccugcccagcaucaucuccaacgagaagcaggagauccugggcaccgugagcuggaaccuccgggagaugcuggcgcacgccgaggagacgcgcaagcugaugcccgucugcguggagaccaaggccaucguguccaccauccagcggaaguacaagggcaucaagauccaggagggggucguggacuacggcgcccgcuucuacuucuacaccagcaagacgaccguggccucccugaucaacacccucaacgaccugaacgagacccuggucacgaugccgcucggguacgugacccacggccugaaccuggaggaggcggcccgguacaugcgcagccucaaggugcccgccaccgucuccgugagcucccccgacgccgugaccgccuacaacggguaccugacgagcuccagcaagacccccgaggagcacuucaucgagaccaucucccuggcgggcagcuacaaggacuggagcuacuccggccagagcacccagcucgggaucgaguuccugaagcggggcgacaaguccgucuacuacacgagcaacccgaccaccuuccaccuggacggggaggugaucaccuucgacaaccucaagacgcugcugucccuccgcgaggugcggaccaucaaggucuucaccaccguggacaacaucaaccugcacacgcagguggucgacaugagcaugaccuacggccagcaguucggccccaccuaccuggacggggccgacgugaccaagaucaagccccacaacucccacgagggcaagacguucuacgugcucccgaacgacgacacccugcgcgucgaggccuucgaguacuaccacaccaccgaccccagcuuccuggggcgguacauguccgcccucaaccacacgaagaaguggaaguacccccaggugaacggccugaccagcaucaagugggccgacaacaacugcuaccuggcgaccgcccuccugacccugcagcagaucgagcucaaguucaaccccccggcccugcaggacgccuacuaccgcgcgcgggccggggaggccgccaacuucugcgcccugauccucgcguacugcaacaagacggugggcgagcugggcgacguccgcgagaccauguccuaccuguuccagcacgccaaccucgacagcugcaagcgggugcugaacgucgugugcaagaccugcgggcagcagcagaccacccugaagggcguggaggccgucauguacauggggacgcucuccuacgagcaguucaagaagggcgugcagauccccugcaccugcgggaagcaggccaccaaguaccuggugcagcaggagagccccuucgucaugauguccgcccccccggcgcaguacgagcugaagcacggcaccuucacgugcgccagcgaguacaccggcaacuaccagugcgggcacuacaagcacaucaccuccaaggagacccucuacugcaucgacggcgcccugcugacgaagagcagcgaguacaaggggcccaucaccgacguguucuacaaggagaacuccuacaccaccacgaucaagcccgugaccuacaagcucgacggcgucgugugcaccgagaucgaccccaagcuggacaacuacuacaagaaggacaacagcuacuucaccgagcagccgaucgaccuggugcccaaccagcccuaccccaacgccuccuucgacaacuucaaguucgucugcgacaacaucaaguucgccgacgaccucaaccagcugacgggguacaagaagccggcgagccgcgagcugaaggugaccuucuuccccgaccucaacggcgacguggucgccaucgacuacaagcacuacacccccuccuucaagaagggcgccaagcugcugcacaagcccaucguguggcacgugaacaacgccaccaacaaggcgacguacaagccgaacaccuggugcauccggugccucuggagcaccaagcccgucgagaccuccaacagcuucgacgugcugaaguccgaggacgcccaggggauggacaaccuggccugcgaggaccucaagcccgugagcgaggaggucguggagaaccccacgauccagaaggacgugcuggagugcaacgucaagaccaccgagguggugggcgacaucauccugaagccggccaacaacucccucaagaucaccgaggaggucgggcacacggaccugauggccgcguacguggacaacagcucccugaccaucaagaagcccaacgagcucagccgcgugcugggccugaagacccucgccacccacgggcuggccgccgucaacuccgugcccugggacacgaucgccaacuacgcgaagccguuccugaacaagguggucagcaccaccaccaacaucgugacgcgcugccucaaccgggugugcaccaacuacaugcccuacuucuucacccugcugcuccagcugugcaccuucacccgcuccacgaacagccggaucaaggccuccaugcccaccaccaucgccaagaacaccgucaagagcgugggcaaguucugccuggaggccgccuucaacuaccucaagagccccaacuucuccaagcugaucaacaucaucaucugguuccugcuccugagcgugugccugggcucccucaucuacagcacggcggcccuggggguccugauguccaaccucggcaugccgagcuacugcaccggguaccgcgagggcuaccugaacuccaccaacgugaccaucgccacguacugcaccggcagcauccccugcuccgugugccugagcgggcucgacucccuggacaccuaccccagccuggagaccauccagaucacgaucuccagcuucaagugggaccucaccgccuucggccuggucgccgagugguuccuggcguacauccucuucacccgguucuucuacgugcuggggcuggccgccaucaugcagcucuucuucuccuacuucgccgugcacuucaucagcaacuccuggcugauguggcugaucaucaaccugguccagauggcgcccaucagcgccauggugcgcauguacaucuucuucgccuccuucuacuacguguggaagagcuacguccacgugguggacggcugcaacagcuccaccugcaugaugugcuacaagcggaaccgcgccacgcgggucgagugcaccaccaucgugaacgggguccgccggagcuucuacguguacgccaacggcggcaagggguucugcaagcuccacaacuggaacugcgugaacugcgacaccuucugcgcgggcuccacguucaucagcgacgaggucgcccgcgaccugucccugcaguucaagcggccgaucaaccccaccgaccagagcuccuacaucguggacagcgugaccgucaagaacggguccauccaccucuacuucgacaaggccggccagaagaccuacgagcgccacagccugucccacuucgugaaccuggacaaccuccgggccaacaacacgaaggggagccugcccaucaacgugaucgucuucgacggcaaguccaagugcgaggagagcuccgccaagagcgcguccguguacuacagccagcugaugugccagcccauccuccugcuggaccaggcccucguguccgacgucggcgacagcgccgagguggccgugaagauguucgacgccuacgucaacaccuucagcuccaccuucaacgugccgauggagaagcugaagacccugguggcgacggccgaggccgagcucgccaagaacgucagccuggacaacgugcuguccaccuucaucagcgcggcccgccagggguucguggacuccgacgucgagaccaaggacgugguggagugccucaagcugagccaccaguccgacaucgaggucaccggcgacagcugcaacaacuacaugcugacguacaacaagguggagaacaugaccccccgggaccucggggccugcaucgacugcuccgcccgccacaucaacgcccagguggcgaagagccacaacaucgcccugaucuggaacgucaaggacuucaugucccugagcgagcagcuccggaagcagauccgcuccgccgccaagaagaacaaccugcccuucaagcugaccugcgccaccacgcgccagguggugaacgucgugaccaccaagaucgcgcucaagggcggguga

SEQ ID NO: 18229 - RNA, 5841 nt, Artificial Sequence
  SARS-CoV-2__MT434786.1__non-structural protein 3 (NSP3) CDS gc
auggcccccaccaaggugaccuucggcgacgacacggucaucgaggugcagggguacaagagcgugaacaucaccuucgagcuggacgagcgcaucgacaagguccucaacgagaagugcuccgccuacaccguggagcugggcaccgaggugaacgaguucgcgugcgucguggccgacgccgugaucaagacgcugcagccggucagcgagcuccugaccccccuggggaucgaccucgacgagugguccauggccaccuacuaccuguucgacgagagcggcgaguucaagcuggccucccacauguacugcagcuucuacccccccgacgaggacgaggaggagggggacugcgaggaggaggaguucgagccguccacccaguacgaguacggcacggaggacgacuaccagggcaagccccucgaguucggggcgaccagcgccgcccugcagcccgaggaggagcaggaggaggacuggcuggacgacgacucccagcagaccgugggccagcaggacgggagcgaggacaaccagaccacgaccauccagaccaucguggagguccagccccagcucgagauggagcugaccccgguggugcagacgaucgaggucaacuccuucagcggcuaccugaagcucaccgacaacguguacaucaagaacgccgacaucguggaggaggcgaagaaggucaagcccaccgugguggucaacgccgccaacguguaccugaagcacgggggcggcguggccggggcccugaacaaggcgaccaacaacgccaugcaggucgaguccgacgacuacaucgccacgaacggcccccucaagguggggggcagcugcguccuguccggccacaaccuggccaagcacugccuccacgugguggggcccaacgucaacaagggcgaggacauccagcugcugaagagcgccuacgagaacuucaaccagcacgaggugcuccuggcgccgcugcucuccgccgggaucuucggcgccgaccccauccacagccugcgggugugcgucgacaccgugcgcaccaacguguaccuggccgucuucgacaagaaccucuacgacaagcugguguccagcuuccuggagaugaagagcgagaagcagguggagcagaagaucgccgagauccccaaggaggaggucaagcccuucaucaccgaguccaagccgagcguggagcagcggaagcaggacgacaagaagaucaaggcgugcguggaggaggucacgaccacccucgaggagaccaaguuccugacggagaaccugcuccuguacaucgacaucaacgggaaccugcaccccgacuccgccacccucgugagcgacaucgacaucaccuuccugaagaaggacgcccccuacaucgugggcgacgucgugcaggagggcgugcugaccgccgucgugauccccacgaagaaggccgggggcaccaccgagaugcucgcgaaggcccugcgcaaggugccgaccgacaacuacaucacgaccuaccccgggcagggccugaacggguacaccgucgaggaggccaagaccgugcucaagaagugcaaguccgccuucuacauccugcccagcaucaucuccaacgagaagcaggagauccugggcaccgugagcuggaaccuccgggagaugcuggcgcacgccgaggagacgcgcaagcugaugcccgucugcguggagaccaaggccaucguguccaccauccagcggaaguacaagggcaucaagauccaggagggggucguggacuacggcgcccgcuucuacuucuacaccagcaagacgaccguggccucccugaucaacacccucaacgaccugaacgagacccuggucacgaugccgcucggguacgugacccacggccugaaccuggaggaggcggcccgguacaugcgcagccucaaggugcccgccaccgucuccgugagcucccccgacgccgugaccgccuacaacggguaccugacgagcuccagcaagacccccgaggagcacuucaucgagaccaucucccuggcgggcagcuacaaggacuggagcuacuccggccagagcacccagcucgggaucgaguuccugaagcggggcgacaaguccgucuacuacacgagcaacccgaccaccuuccaccuggacggggaggugaucaccuucgacaaccucaagacgcugcugucccuccgcgaggugcggaccaucaaggucuucaccaccguggacaacaucaaccugcacacgcagguggucgacaugagcaugaccuacggccagcaguucggccccaccuaccuggacggggccgacgugaccaagaucaagccccacaacucccacgagggcaagacguucuacgugcucccgaacgacgacacccugcgcgucgaggccuucgaguacuaccacaccaccgaccccagcuuccuggggcgguacauguccgcccucaaccacacgaagaaguggaaguacccccaggugaacggccugaccagcaucaagugggccgacaacaacugcuaccuggcgaccgcccuccugacccugcagcagaucgagcucaaguucaaccccccggcccugcaggacgccuacuaccgcgcgcgggccggggaggccgccaacuucugcgcccugauccucgcguacugcaacaagacggugggcgagcugggcgacguccgcgagaccauguccuaccuguuccagcacgccaaccucgacagcugcaagcgggugcugaacgucgugugcaagaccugcgggcagcagcagaccacccugaagggcguggaggccgucauguacauggggacgcucuccuacgagcaguucaagaagggcgugcagauccccugcaccugcgggaagcaggccaccaaguaccuggugcagcaggagagccccuucgucaugauguccgcccccccggcgcaguacgagcugaagcacggcaccuucacgugcgccagcgaguacaccggcaacuaccagugcgggcacuacaagcacaucaccuccaaggagacccucuacugcaucgacggcgcccugcugacgaagagcagcgaguacaaggggcccaucaccgacguguucuacaaggagaacuccuacaccaccacgaucaagcccgugaccuacaagcucgacggcgucgugugcaccgagaucgaccccaagcuggacaacuacuacaagaaggacaacagcuacuucaccgagcagccgaucgaccuggugcccaaccagcccuaccccaacgccuccuucgacaacuucaaguucgucugcgacaacaucaaguucgccgacgaccucaaccagcugacgggguacaagaagccggcgagccgcgagcugaaggugaccuucuuccccgaccucaacggcgacguggucgccaucgacuacaagcacuacacccccuccuucaagaagggcgccaagcugcugcacaagcccaucguguggcacgugaacaacgccaccaacaaggcgacguacaagccgaacaccuggugcauccggugccucuggagcaccaagcccgucgagaccuccaacagcuucgacgugcugaaguccgaggacgcccaggggauggacaaccuggccugcgaggaccucaagcccgugagcgaggaggucguggagaaccccacgauccagaaggacgugcuggagugcaacgucaagaccaccgagguggugggcgacaucauccugaagccggccaacaacucccucaagaucaccgaggaggucgggcacacggaccugauggccgcguacguggacaacagcucccugaccaucaagaagcccaacgagcucagccgcgugcugggccugaagacccucgccacccgcgggcuggccgccgucaacuccgugcccugggacacgaucgccaacuacgcgaagccguuccugaacaagguggucagcaccaccaccaacaucgugacgcggugccucaaccgcgugugcaccaacuacaugcccuacuucuucacccugcugcuccagcugugcaccuucacccgguccacgaacagccgcaucaaggccuccaugcccaccaccaucgccaagaacaccgucaagagcgugggcaaguucugccuggaggccagcuucaacuaccucaagucccccaacuucagcaagcugaucaacaucaucaucugguuccugcuccuguccgugugccugggcagccucaucuacuccacggccgcgcuggggguccugaugagcaaccucggcaugccguccuacugcaccggguaccgggagggcuaccugaacagcaccaacgugaccaucgccacguacugcaccggcuccauccccugcagcgugugccuguccgggcucgacagccuggacaccuaccccucccuggagaccauccagaucacgaucagcuccuucaagugggaccucaccgccuucggccuggucgccgagugguuccuggccuacauccucuucacccgcuucuucuacgugcuggggcuggcggccaucaugcagcucuucuucagcuacuucgccgugcacuucaucuccaacagcuggcugauguggcugaucaucaaccugguccagauggcccccaucuccgcgauggugcggauguacaucuucuucgccagcuucuacuacguguggaagagcuacguccacgugguggacggcugcaacuccagcaccugcaugaugugcuacaagcgcaaccgggccacgcgcgucgagugcaccaccaucgugaacgggguccggcgcuccuucuacguguacgccaacggcggcaagggguucugcaagcuccacaacuggaacugcgugaacugcgacaccuucugcgccggcagcacguucaucuccgacgaggucgcgcgggaccugagccugcaguucaagcgcccgaucaaccccaccgaccaguccagcuacaucguggacuccgugaccgucaagaacgggagcauccaccucuacuucgacaaggccggccagaagaccuacgagcggcacucccugagccacuucgugaaccuggacaaccuccgcgccaacaacacgaaggggucccugcccaucaacgugaucgucuucgacggcaagagcaagugcgaggaguccagcgccaaguccgccagcguguacuacucccagcugaugugccagcccauccuccugcuggaccaggcgcucgugagcgacgucggcgacagcgccgagguggccgugaagauguucgacgccuacgucaacaccuucuccagcaccuucaacgugccgauggagaagcugaagacccugguggccacggcggaggccgagcucgccaagaacgucucccuggacaacgugcugagcaccuucaucuccgccgcgcggcagggguucguggacagcgacgucgagaccaaggacgugguggagugccucaagcugucccaccagagcgacaucgaggucaccggcgacuccugcaacaacuacaugcugacguacaacaagguggagaacaugaccccccgcgaccucggggccugcaucgacugcagcgcccggcacaucaacgcccagguggccaagucccacaacaucgcgcugaucuggaacgucaaggacuucaugagccuguccgagcagcuccgcaagcagauccgcagcgccgccaagaagaacaaccugcccuucaagcugaccugcgccaccacgcggcagguggugaacgucgugaccaccaagaucgcccucaagggcggguga

SEQ ID NO: 18230 - RNA, 5841 nt, Artificial Sequence
  SARS-CoV-2__MT365032.1__non-structural protein 3 (NSP3) CDS gc
auggcccccaccaaggugaccuucggcgacgacacggucaucgaggugcagggguacaagagcgugaacaucaccuucgagcuggacgagcgcaucgacaagguccucaacgagaagugcuccgccuacaccguggagcugggcaccgaggugaacgaguucgcgugcgucguggccgacgccgugaucaagacgcugcagccggucagcgagcuccugaccccccuggggaucgaccucgacgagugguccauggccaccuacuaccuguucgacgagagcggcgaguucaagcuggccucccacauguacugcagcuucuacccccccgacgaggacgaggaggagggggacugcgaggaggaggaguucgagccguccacccaguacgaguacggcacggaggacgacuaccagggcaagccccucgaguucggggcgaccagcgccgcccugcagcccgaggaggagcaggaggaggacuggcuggacgacgacucccagcagaccgugggccagcaggacgggagcgaggacaaccagaccacgaccauccagaccaucguggagguccagccccagcucgagauggagcugaccccgguggugcagacgaucgaggucaacuccuucagcggcuaccugaagcucaccgacaacguguacaucaagaacgccgacaucguggaggaggcgaagaaggucaagcccaccgugguggucaacgccgccaacguguaccugaagcacgggggcggcguggccggggcccugaacaaggcgaccaacaacgccaugcaggucgaguccgacgacuacaucgccacgaacggcccccucaagguggggggcagcugcguccuguccggccacaaccuggccaagcacugccuccacgugguggggcccaacgucaacaagggcgaggacauccagcugcugaagagcgccuacgagaacuucaaccagcacgaggugcuccuggcgccgcugcucuccgccgggaucuucggcgccgaccccauccacagccugcgggugugcgucgacaccgugcgcaccaacguguaccuggccgucuucgacaagaaccucuacgacaagcugguguccagcuuccuggagaugaagagcgagaagcagguggagcagaagaucgccgagauccccaaggaggaggucaagcccuucaucaccgaguccaagccgagcguggagcagcggaagcaggacgacaagaagaucaaggcgugcguggaggaggucacgaccacccucgaggagaccaaguuccugacggagaaccugcuccuguacaucgacaucaacgggaaccugcaccccgacuccgccacccucgugagcgacaucgacaucaccuuccugaagaaggacgcccccuacaucgugggcgacgucgugcaggagggcgugcugaccgucguggugauccccacgaagaaggccgggggcaccaccgagaugcucgccaaggcgcugcgcaaggucccgaccgacaacuacaucacgaccuaccccgggcagggccugaacggguacaccguggaggaggccaagaccgugcucaagaagugcaaguccgccuucuacauccugcccagcaucaucuccaacgagaagcaggagauccugggcaccgucagcuggaaccuccgggagaugcuggcccacgcggaggagacgcgcaagcugaugcccgugugcguggagaccaaggccaucgucuccaccauccagcggaaguacaagggcaucaagauccaggagggggugguggacuacggcgcccgcuucuacuucuacaccagcaagacgaccgucgccucccugaucaacacccucaacgaccugaacgagacccuggugacgaugccgcucggguacgugacccacggccugaaccuggaggaggccgcgcgguacaugcgcagccucaagguccccgccaccguguccgugagcucccccgacgccgucaccgccuacaacggguaccugacgagcuccagcaagacccccgaggagcacuucaucgagaccaucucccuggccggcagcuacaaggacuggagcuacuccggccagagcacccagcucgggaucgaguuccugaagcggggcgacaaguccguguacuacacgagcaacccgaccaccuuccaccuggacggggaggugaucaccuucgacaaccucaagacgcugcugucccuccgcgagguccggaccaucaagguguucaccaccguggacaacaucaaccugcacacgcaggucguggacaugagcaugaccuacggccagcaguucggccccaccuaccuggacggggcggacgugaccaagaucaagccccacaacucccacgagggcaagacguucuacguccucccgaacgacgacacccugcgcguggaggccuucgaguacuaccacaccaccgaccccagcuuccuggggcgguacauguccgcccucaaccacacgaagaaguggaaguacccccaggugaacggccugaccagcaucaagugggccgacaacaacugcuaccuggccaccgcgcuccugacccugcagcagaucgagcucaaguucaaccccccggcccugcaggacgccuacuaccgcgcccgggcgggggaggccgccaacuucugcgcccugauccucgccuacugcaacaagacggucggcgagcugggcgacgugcgcgagaccauguccuaccuguuccagcacgcgaaccucgacagcugcaagcggguccugaacguggugugcaagaccugcgggcagcagcagaccacccugaagggcgucgaggccgugauguacauggggacgcucuccuacgagcaguucaagaagggcgugcagauccccugcaccugcgggaagcaggccaccaaguaccugguccagcaggagagccccuucgugaugauguccgcccccccggcccaguacgagcugaagcacggcaccuucacgugcgcgagcgaguacaccggcaacuaccagugcgggcacuacaagcacaucaccuccaaggagacccucuacugcaucgacggcgcccugcugacgaagagcagcgaguacaaggggcccaucaccgacguguucuacaaggagaacuccuacaccaccacgaucaagcccgucaccuacaagcucgacggcguggugugcaccgagaucgaccccaagcuggacaacuacuacaagaaggacaacagcuacuucaccgagcagccgaucgaccugguccccaaccagcccuaccccaacgccuccuucgacaacuucaaguucgugugcgacaacaucaaguucgccgacgaccucaaccagcugacgggguacaagaagccggccagccgcgagcugaaggugaccuucuuccccgaccucaacggcgacgucguggcgaucgacuacaagcacuacacccccuccuucaagaagggcgccaagcugcugcacaagcccaucguguggcacgucaacaacgccaccaacaaggccacguacaagccgaacaccuggugcauccggugccucuggagcaccaagcccguggagaccuccaacagcuucgacgugcugaaguccgaggacgcgcaggggauggacaaccuggccugcgaggaccucaagcccgucagcgaggaggugguggagaaccccacgauccagaaggacguccuggagugcaacgugaagaccaccgagguggucggcgacaucauccugaagccggccaacaacucccucaagaucaccgaggagguggggcacacggaccugauggccgccuacguggacaacagcucccugaccaucaagaagcccaacgagcucagccgcguccugggccugaagacccucgcgacccacgggcuggccgccgugaacuccgugcccugggacacgaucgccaacuacgccaagccguuccugaacaaggucgugagcaccaccaccaacaucgugacgcgcugccucaaccgggucugcaccaacuacaugcccuacuucuucacccugcugcuccagcugugcaccuucacccgcuccacgaacagccggaucaaggcguccaugcccaccaccaucgccaagaacaccgugaagagcgugggcaaguucugccuggaggccagcuucaacuaccucaagucccccaacuucagcaagcugaucaacaucaucaucugguuccugcuccuguccgucugccugggcagccucaucuacuccacggccgcccugggggugcugaugagcaaccucggcaugccguccuacugcaccggguaccgcgagggcuaccugaacagcaccaacgugaccaucgcgacguacugcaccggcuccauccccugcagcgucugccuguccgggcucgacagccuggacaccuaccccucccuggagaccauccagaucacgaucagcuccuucaagugggaccucaccgccuucggccugguggccgagugguuccuggccuacauccucuucacccgguucuucuacgugcuggggcuggccgcgaucaugcagcucuucuucagcuacuucgccguccacuucaucuccaacagcuggcugauguggcugaucaucaaccuggugcagauggcccccaucuccgccauggugcgcauguacaucuucuucgcgagcuucuacuacgucuggaagagcuacgugcacguggucgacggcugcaacuccagcaccugcaugaugugcuacaagcggaaccgcgccacgcggguggagugcaccaccaucgucaacggggugcgccgguccuucuacguguacgccaacggcggcaagggguucugcaagcuccacaacuggaacugcgucaacugcgacaccuucugcgccggcagcacguucaucuccgacgagguggcccgcgaccugagccugcaguucaagcggccgaucaaccccaccgaccaguccagcuacaucguggacuccgucaccgugaagaacgggagcauccaccucuacuucgacaaggcgggccagaagaccuacgagcgccacucccugagccacuucgugaaccuggacaaccuccgggccaacaacacgaaggggucccugcccaucaacgucaucguguucgacggcaagagcaagugcgaggaguccagcgccaaguccgccagcguguacuacucccagcugaugugccagcccauccuccugcuggaccaggcccucgucagcgacgugggcgacagcgcggagguggccgucaagauguucgacgccuacgugaacaccuucuccagcaccuucaacgugccgauggagaagcugaagacccuggucgccacggccgaggcggagcucgccaagaacgugucccuggacaacgugcugagcaccuucaucuccgccgcccgccagggguucgucgacagcgacguggagaccaaggacguggucgagugccucaagcugucccaccagagcgacaucgaggugaccggcgacuccugcaacaacuacaugcugacguacaacaagguggagaacaugaccccccgggaccucggggcgugcaucgacugcagcgcccgccacaucaacgcccaggucgccaagucccacaacaucgcccugaucuggaacgugaaggacuucaugagccuguccgagcagcuccggaagcagauccgcagcgcggccaagaagaacaaccugcccuucaagcugaccugcgccaccacgcgccagguggucaacguggugaccaccaagaucgcccucaagggcggguga

SEQ ID NO: 18231 - RNA, 5841 nt, Artificial Sequence
  SARS-CoV-2__MT428551.1__non-structural protein 3 (NSP3) CDS gc
auggcccccaccaaggugaccuucggcgacgacacggucaucgaggugcagggguacaagagcgugaacaucaccuucgagcuggacgagcgcaucgacaagguccucaacgagaagugcuccgccuacaccguggagcugggcaccgaggugaacgaguucgcgugcgucguggccgacgccgugaucaagacgcugcagccggucagcgagcuccugaccccccuggggaucgaccucgacgagugguccauggccaccuacuaccuguucgacgagagcggcgaguucaagcuggccucccacauguacugcagcuucuacccccccgacgaggacgaggaggagggggacugcgaggaggaggaguucgagccguccacccaguacgaguacggcacggaggacgacuaccagggcaagccccucgaguucggggcgaccagcgccgcccugcagcccgaggaggagcaggaggaggacuggcuggacgacgacucccagcagaccgugggccagcaggacgggagcgaggacaaccagaccacgaccauccagaccaucguggagguccagccccagcucgagauggagcugaccccgguggugcagacgaaggucaacuccuucagcggcuaccugaagcucaccgacaacguguacaucaagaacgccgacaucguggaggaggcgaagaaggucaagcccaccgugguggucaacgccgccaacguguaccugaagcacgggggcggcguggccggggcccugaacaaggcgaccaacaacgccaugcaggucgaguccgacgacuacaucgccacgaacggcccccucaagguggggggcagcugcguccuguccggccacaaccuggccaagcacugccuccacgugguggggcccaacgucaacaagggcgaggacauccagcugcugaagagcgccuacgagaacuucaaccagcacgaggugcuccuggcgccgcugcucuccgccgggaucuucggcgccgaccccauccacagccugcgggugugcgucgacaccgugcgcaccaacguguaccuggccgucuucgacaagaaccucuacgacaagcugguguccagcuuccuggagaugaagagcgagaagcagguggagcagaagaucgccgagauccccaaggaggaggucaagcccuucaucaccgaguccaagccgagcguggagcagcggaagcaggacgacaagaagaucaaggcgugcguggaggaggucacgaccacccucgaggagaccaaguuccugacggagaaccugcuccuguacaucgacaucaacgggaaccugcaccccgacuccgccacccucgugagcgacaucgacaucaccuuccugaagaaggacgcccccuacaucgugggcgacgucgugcaggagggcgugcugaccgccgucgugauccccacgaagaaggccgggggcaccaccgagaugcucgcgaaggcccugcgcaaggugccgaccgacaacuacaucacgaccuaccccgggcagggccugaacggguacaccgucgaggaggccaagaccgugcucaagaagugcaaguccgccuucuacauccugcccagcaucaucuccaacgagaagcaggagauccugggcaccgugagcuggaaccuccgggagaugcuggcgcacgccgaggagacgcgcaagcugaugcccgucugcguggagaccaaggccaucguguccaccauccagcggaaguacaagggcaucaagauccaggagggggucguggacuacggcgcccgcuucuacuucuacaccagcaagacgaccguggccucccugaucaacacccucaacgaccugaacgagacccuggucacgaugccgcucggguacgugacccacggccugaaccuggaggaggcggcccgguacaugcgcagccucaaggugcccgccaccgucuccgugagcucccccgacgccgugaccgccuacaacggguaccugacgagcuccagcaagacccccgaggagcacuucaucgagaccaucucccuggcgggcagcuacaaggacuggagcuacuccggccagagcacccagcucgggaucgaguuccugaagcggggcgacaaguccgucuacuacacgagcaacccgaccaccuuccaccuggacggggaggugaucaccuucgacaaccucaagacgcugcugucccuccgcgaggugcggaccaucaaggucuucaccaccguggacaacaucaaccugcacacgcagguggucgacaugagcaugaccuacggccagcaguucggccccaccuaccuggacggggccgacgugaccaagaucaagccccacaacucccacgagggcaagacguucuacgugcucccgaacgacgacacccugcgcgucgaggccuucgaguacuaccacaccaccgaccccagcuuccuggggcgguacauguccgcccucaaccacacgaagaaguggaaguacccccaggugaacggccugaccagcaucaagugggccgacaacaacugcuaccuggcgaccgcccuccugacccugcagcagaucgagcucaaguucaaccccccggcccugcaggacgccuacuaccgcgcgcgggccggggaggccgccaacuucugcgcccugauccucgcguacugcaacaagacggugggcgagcugggcgacguccgcgagaccauguccuaccuguuccagcacgccaaccucgacagcugcaagcgggugcugaacgucgugugcaagaccugcgggcagcagcagaccacccugaagggcguggaggccgucauguacauggggacgcucuccuacgagcaguucaagaagggcgugcagauccccugcaccugcgggaagcaggccaccaaguaccuggugcagcaggagagccccuucgucaugauguccgcccccccggcgcaguacgagcugaagcacggcaccuucacgugcgccagcgaguacaccggcaacuaccagugcgggcacuacaagcacaucaccuccaaggagacccucuacugcaucgacggcgcccugcugacgaagagcagcgaguacaaggggcccaucaccgacguguucuacaaggagaacuccuacaccaccacgaucaagcccgugaccuacaagcucgacggcgucgugugcaccgagaucgaccccaagcuggacaacuacuacaagaaggacaacagcuacuucaccgagcagccgaucgaccuggugcccaaccagcccuaccccaacgccuccuucgacaacuucaaguucgucugcgacaacaucaaguucgccgacgaccucaaccagcugacgggguacaagaagccggcgagccgcgagcugaaggugaccuucuuccccgaccucaacggcgacguggucgccaucgacuacaagcacuacacccccuccuucaagaagggcgccaagcugcugcacaagcccaucguguggcacgugaacaacgccaccaacaaggcgacguacaagccgaacaccuggugcauccggugccucuggagcaccaagcccgucgagaccuccaacagcuucgacgugcugaaguccgaggacgcccaggggauggacaaccuggccugcgaggaccucaagcccgugagcgaggaggucguggagaaccccacgauccagaaggacgugcuggagugcaacgucaagaccaccgagguggugggcgacaucauccugaagccggccaacaacucccucaagaucaccgaggaggucgggcacacggaccugauggccgcguacguggacaacagcucccugaccaucaagaagcccaacgagcucagccgcgugcugggccugaagacccucgccacccacgggcuggccgccgucaacuccgugcccugggacacgaucgccaacuacgcgaagccguuccugaacaagguggucagcaccaccaccaacaucgugacgcgcugccucaaccgggugugcaccaacuacaugcccuacuucuucacccugcugcuccagcugugcaccuucacccgcuccacgaacagccggaucaaggccuccaugcccaccaccaucgccaagaacaccgucaagagcgugggcaaguucugccuggaggccagcuucaacuaccucaagucccccaacuucagcaagcugaucaacaucaucaucugguuccugcuccuguccgugugccugggcagccucaucuacuccacggccgcgcuggggguccugaugagcaaccucggcaugccguccuacugcaccggguaccgcgagggcuaccugaacagcaccaacgugaccaucgccacguacugcaccggcuccauccccugcagcgugugccuguccgggcucgacagccuggacaccuaccccucccuggagaccauccagaucacgaucagcuccuucaagugggaccucaccgccuucggccuggucgccgagugguuccuggccuacauccucuucacccgguucuucuacgugcuggggcuggcggccaucaugcagcucuucuucagcuacuucgccgugcacuucaucuccaacagcuggcugauguggcugaucaucaaccugguccagauggcccccaucuccgcgauggugcgcauguacaucuucuucgccagcuucuacuacguguggaagagcuacguccacgugguggacggcugcaacuccagcaccugcaugaugugcuacaagcggaaccgcgccacgcgggucgagugcaccaccaucgugaacgggguccgccgguccuucuacguguacgccaacggcggcaagggguucugcaagcuccacaacuggaacugcgugaacugcgacaccuucugcgccggcagcacguucaucuccgacgaggucgcgcgcgaccugagccugcaguucaagcggccgaucaaccccaccgaccaguccagcuacaucguggacuccgugaccgucaagaacgggagcauccaccucuacuucgacaaggccggccagaagaccuacgagcgccacucccugagccacuucgugaaccuggacaaccuccgggccaacaacacgaaggggucccugcccaucaacgugaucgucuucgacggcaagagcaagugcgaggaguccagcgccaaguccgccagcguguacuacucccagcugaugugccagcccauccuccugcuggaccaggcgcucgugagcgacgucggcgacagcgccgagguggccgugaagauguucgacgccuacgucaacaccuucuccagcaccuucaacgugccgauggagaagcugaagacccugguggccacggcggaggccgagcucgccaagaacgucucccuggacaacgugcugagcaccuucaucuccgccgcgcgccagggguucguggacagcgacgucgagaccaaggacgugguggagugccucaagcugucccaccagagcgacaucgaggucaccggcgacuccugcaacaacuacaugcugacguacaacaagguggagaacaugaccccccgggaccucggggccugcaucgacugcagcgcccgccacaucaacgcccagguggccaagucccacaacaucgcgcugaucuggaacgucaaggacuucaugagccuguccgagcagcuccggaagcagauccgcagcgccgccaagaagaacaaccugcccuucaagcugaccugcgccaccacgcgccagguggugaacgucgugaccaccaagaucgcccucaagggcgggaaguga

SEQ ID NO: 18232 - RNA, 5841 nt, Artificial Sequence
  SARS-CoV-2__MT419842.1__non-structural protein 3 (NSP3) CDS gc
auggcccccaccaaggugaccuucggcgacgacacggucaucgaggugcagggguacaagagcgugaacaucaccuucgagcuggacgagcgcaucgacaagguccucaacgagaagugcuccgccuacaccguggagcugggcaccgaggugaacgaguucgcgugcgucguggccgacgccgugaucaagacgcugcagccggucagcgagcuccugaccccccuggggaucgaccucgacgagugguccauggccaccuacuaccuguucgacgagagcggcgaguucaagcuggccucccacauguacugcagcuucuacccccccgacgaggacgaggaggagggggacugcgaggaggaggaguucgagccguccacccaguacgaguacggcacggaggacgacuaccagggcaagccccucgaguucggggcgaccagcgccgcccugcagcccgaggaggagcaggaggaggacuggcuggacgacgacucccagcagaccgugggccagcaggacgggagcgaggacaaccagaccacgaccauccagaccaucguggagguccagccccagcucgagauggagcugaccccgguggugcagacgaucgaggucaacuccuucagcggcuaccugaagcucaccgacaacguguacaucaagaacgccgacaucguggaggaggcgaagaaggucaagcccaccgugguggucaacgccgccaacguguaccugaagcacgggggcggcguggccggggcccugaacaaggcgaccaacaacgccaugcaggucgaguccgacgacuacaucgccacgaacggcccccucaagguggggggcagcugcguccuguccggccacaaccuggccaagcacugccuccacgugguggggcccaacgucaacaagggcgaggacauccagcugcugaagagcgccuacgagaacuucaaccagcacgaggugcuccuggcgccgcugcucuccgccgggaucuucggcgccgaccccauccacagccugcgggugugcgucgacaccgugcgcaccaacguguaccuggccgucuucgacaagaaccucuacgacaagcugguguccagcuuccuggagaugaagagcgagaagcagguggagcagaagaucgccgagauccccaaggaggaggucaagcccuucaucaccgaguccaagccgagcguggagcagcggaagcaggacgacaagaagaucaaggcgugcguggaggaggucacgaccacccucgaggagaccaaguuccugacggagaaccugcuccuguacaucgacaucaacgggaaccugcaccccgacuccgccacccucgugagcgacaucgacaucaccuuccugaagaaggacgcccccuacaucgugggcgacgucgugcaggagggcgugcugaccgccgucgugauccccacgaagaaggccgggggcaccaccgagaugcucgcgaaggcccugcgcaaggugccgaccgacaacuacaucacgaccuaccccgggcagggccugaacggguacaccgucgaggaggccaagaccgugcucaagaagugcaaguccgccuucuacauccugcccagcaucaucuccaacgagaagcaggagauccugggcaccgugagcuggaaccuccgggagaugcuggcgcacgccgaggagacgcgcaagcugaugcccgucugcguggagaccaaggccaucguguccaccauccagcggaaguacaagggcaucaagauccaggagggggucguggacuacggcgcccgcuucuacuucuacaccagcaagacgaccguggccucccugaucaacacccucaacgaccugaacgagacccuggucacgaugccgcucggguacgugacccacggccugaaccuggaggaggcggcccgguacaugcgcagccucaaggugcccgccaccgucuccgugagcucccccgacgccgugaccgccuacaacggguaccugacgagcuccagcaagacccccgaggagcacuucaucgagaccaucucccuggcgggcagcuacaaggacuggagcuacuccggccagagcacccagcucgggaucgaguuccugaagcggggcgacaaguccgucuacuacacgagcaacccgaccaccuuccaccuggacggggaggugaucaccuucgacaaccucaagacgcugcugucccuccgcgaggugcggaccaucaaggucuucaccaccguggacaacaucaaccugcacacgcagguggucgacaugagcaugaccuacggccagcaguucggccccaccuaccuggacggggccgacgugaccaagaucaagccccacaacucccacgagggcaagacguucuacgugcucccgaacgacgacacccugcgcgucgaggccuucgaguacuaccacaccaccgaccccagcuuccuggggcgguacauguccgcccucaaccacacgaagaaguggaaguacccccaggugaacggccugaccagcaucaagugggccgacaacaacugcuaccuggcgaccgcccuccugacccugcagcagaucgagcucaaguucaaccccccggcccugcaggacgccuacuaccgcgcgcgggccggggaggccgccaacuucugcgcccugauccucgcguacugcaacaagacggugggcgagcugggcgacguccgcgagaccauguccuaccuguuccagcacgccaaccucgacagcugcaagcgggugcugaacgucgugugcaagaccugcgggcagcagcagaccacccugaagggcguggaggccgucauguacauggggacgcucuccuacgagcaguucaagaagggcgugcagauccccugcaccugcgggaagcaggccaccaaguaccuggugcagcaggagagccccuucgucaugauguccgcccccccggcgcaguacgagcugaagcacggcaccuucacgugcgccagcgaguacaccggcaacuaccagugcgggcacuacaagcacaucaccuccaaggagacccucuacugcaucgacggcgcccugcugacgaagagcagcgaguacaaggggcccaucaccgacguguucuacaaggagaacuccuacaccaccacgaucaagcccgugaccuacaagcucgacggcgucgugugcaccgagaucgaccccaagcuggacaacuacuacaagaaggacaacagcuacuucaccgagcagccgaucgaccuggugcccaaccagcccuaccccaacgccuccuucgacaacuucaaguucgucugcgacaacaucaaguucgccgacgaccucaaccagcugacgggguacaagaagccggcgagccgcgagcugaaggugaccuucuuccccgaccucaacggcgacguggucgccaucgacuacaagcacuacacccccuccuucaagaagggcgccaagcugcugcacaagcccaucguguggcacgugaacaacgccaccaacaaggcgacguacaagccgaacaccuggugcauccggugccucuggagcaccaagcccgucgagaccuccaacagcuucgacgugcugaaguccgaggacgcccaggggauggacaaccuggccugcgaggaccucaagcccgugagcgaggaggucguggagaaccccacgauccagaaggacgugcuggagugcaacgucaagaccaccgagguggugggcgacaucauccugaagccggccaacaacucccucaagaucaccgaggaggucgggcacacggaccugauggccgcguacguggacaacagcucccugaccaucaagaagcccaacgagcucagccgcgugcugggccugaagacccucgccacccacgggcuggccgccgucaacuccgugcccugggacacgaucgccaacuacgcgaagccguuccugaacaagguggucagcaccaccaccaacaucgugacgcgcugccucaaccgggugugcaccaacuacaugcccuacuucuucacccugcugcuccagcugugcaccuucacccgcuccacgaacagccggaucaaggccuccaugcccaccaccaucgccaagaacaccgucaagagcgugggcaaguucugccuggaggccagcuucaacuaccucaagucccccaacuucagcaagcugaucaacaucaucaucugguuccugcuccuguccgugugccugggcagccucaucuacuccacggccgcgcuggggguccugaugagcaaccucggcaugccguccuacugcaccggguaccgcgagggcuaccugaacagcaccaacgugaccaucgccacguacugcaccggcuccauccccugcagcgugugccuguccgggcucgacagccuggacaccuaccccucccuggagaccauccagaucacgaucagcuccuucaagugggaccucaccgccuucggccuggucgccgagugguuccuggccuacauccucuucacccgguucuucuacgugcuggggcuggcggccaucaugcagcucuucuucagcuacuucgccgugcacuucaucuccaacagcuggcugauguggcugaucaucaaccugguccagauggcccccaucuccgcgauggugcgcauguacaucuucuucgccagcuucuacuacguguggaagagcuacguccacgugguggacggcugcaacuccagcaccugcaugaugugcuacaagcggaaccgcgccacgcgggucgagugcaccaccaucgugaacgggguccgccgguccuucuacguguacgccaacggcggcaagggguucugcaagcuccacaacuggaacugcgugaacugcgacaccuucugcgccggcagcacguucaucuccgacgaggucgcgcgcgaccugagccugcaguucaagcggccgaucaaccccaccgaccaguccagcuacaucguggacuccgugaccgucaagaacgggagcauccaccucuacuucgacaaggccggccagaagaccuacgagcgccacuuccugucccacuucgugaaccuggacaaccuccgggccaacaacacgaaggggagccugcccaucaacgugaucgucuucgacggcaaguccaagugcgaggagagcuccgccaagagcgccuccguguacuacagccagcugaugugccagcccauccuccugcuggaccaggcgcucguguccgacgucggcgacagcgccgagguggccgugaagauguucgacgccuacgucaacaccuucagcuccaccuucaacgugccgauggagaagcugaagacccugguggccacggcggaggccgagcucgccaagaacgucagccuggacaacgugcuguccaccuucaucagcgccgcgcgccagggguucguggacuccgacgucgagaccaaggacgugguggagugccucaagcugagccaccaguccgacaucgaggucaccggcgacagcugcaacaacuacaugcugacguacaacaagguggagaacaugaccccccgggaccucggggccugcaucgacugcuccgcccgccacaucaacgcccagguggccaagagccacaacaucgcgcugaucuggaacgucaaggacuucaugucccugagcgagcagcuccggaagcagauccgcuccgccgccaagaagaacaaccugcccuucaagcugaccugcgccaccacgcgccagguggugaacgucgugaccaccaagaucgcccucaagggcggguga

SEQ ID NO: 18233 - RNA, 5841 nt, Artificial Sequence
  SARS-CoV-2__MT412134.1__non-structural protein 3 (NSP3) CDS gc
auggcccccaccaaggugaccuucggcgacgacacggucaucgaggugcagggguacaagagcgugaacaucaccuucgagcuggacgagcgcaucgacaagguccucaacgagaagugcuccgccuacaccguggagcugggcaccgaggugaacgaguucgcgugcgucguggccgacgccgugaucaagacgcugcagccggucagcgagcuccugaccccccuggggaucgaccucgacgagugguccauggccaccuacuaccuguucgacgagagcggcgaguucaagcuggccucccacauguacugcagcuucuacccccccgacgaggacgaggaggagggggacugcgaggaggaggaguucgagccguccacccaguacgaguacggcacggaggacgacuaccagggcaagccccucgaguucggggcgaccagcgccgcccugcagcccgaggaggagcaggaggaggacuggcuggacgacgacucccagcagaccgugggccagcaggacgggagcgaggacaaccagaccacgaccauccagaccaucguggagguccagccccagcucgagauggagcugaccccgguggugcagacgaucgaggucaacuccuucagcggcuaccugaagcucaccgacaacguguacaucaagaacgccgacaucguggaggaggcgaagaaggucaagcccaccgugguggucaacgccgccaacguguaccugaagcacgggggcggcguggccggggcccugaacaaggcgaccaacaacgccaugcaggucgaguccgacgacuacaucgccacgaacggcccccucaagguggggggcagcugcguccuguccggccacaaccuggccaagcacugccuccacgugguggggcccaacgucaacaagggcgaggacauccagcugcugaagagcgccuacgagaacuucaaccagcacgaggugcuccuggcgccgcugcucuccgccgggaucuucggcgccgaccccauccacagccugcgggugugcgucgacaccgugcgcaccaacguguaccuggccgucuucgacaagaaccucuacgacaagcugguguccagcuuccuggagaugaagagcgagaagcagguggagcagaagaucgccgagauccccaaggaggaggucaagcccuucaucaccgaguccaagccgagcguggagcagcggaagcaggacgacaagaagaucaaggcgugcguggaggaggucacgaccacccucgaggagaccaaguuccugacggagaaccugcuccuguacaucgacaucaacgggaaccugcaccccgacuccgccacccucgugagcgacaucgacaucaccuuccugaagaaggacgcccccuacaucgugggcgacgucgugcaggagggcgugcugaccgccgucgugauccccacgaagaaggccgggggcaccaccgagaugcucgcgaaggcccugcgcaaggugccgaccgacaacuacaucacgaccuaccccgggcagggccugaacggguacaccgucgaggaggccaagaccgugcucaagaagugcaaguccgccuucuacauccugcccagcaucaucuccaacgagaagcaggagauccugggcaccgugagcuggaaccuccgggagaugcuggcgcacgccgaggagacgcgcaagcugaugcccgucugcguggagaccaaggccaucguguccaccauccagcggaaguacaagggcaucaagauccaggagggggucguggacuacggcgcccgcuucuacuucuacaccagcaagacgaccguggccucccugaucaacacccucaacgaccugaacgagacccuggucacgaugccgcucggguacgugacccacggccugaaccuggaggaggcggcccgguacaugcgcagccucaaggugcccgccaccgucuccgugagcucccccgacgccgugaccgccuacaacggguaccugacgagcuccagcaagacccccgaggagcacuucaucgagaccaucucccuggcgggcagcuacaaggacuggagcuacuccggccagagcacccagcucgggaucgaguuccugaagcggggcgacaaguccgucuacuacacgagcaacccgaccaccuuccaccuggacggggaggugaucaccuucgacaaccucaagacgcugcugucccuccgcgaggugcggaccaucaaggucuucaccaccguggacaacaucaaccugcacacgcagguggucgacaugagcaugaccuacggccagcaguucggccccaccuacuucgacggggccgacgugaccaagaucaagccccacaacucccacgagggcaagacguucuacgugcugccgaacgacgacacccuccgcgucgaggccuucgaguacuaccacaccaccgaccccagcuuccuggggcgguacauguccgcccugaaccacacgaagaaguggaaguacccccaggugaacggccucaccagcaucaagugggccgacaacaacugcuaccuggcgaccgcccugcucacccugcagcagaucgagcugaaguucaaccccccggcccuccaggacgccuacuaccgcgcgcgggccggggaggccgccaacuucugcgcccugauccuggcguacugcaacaagacggugggcgagcucggcgacguccgcgagaccauguccuaccuguuccagcacgccaaccuggacagcugcaagcgggugcucaacgucgugugcaagaccugcgggcagcagcagaccacccugaagggcguggaggccgucauguacauggggacgcuguccuacgagcaguucaagaagggcgugcagauccccugcaccugcgggaagcaggccaccaaguaccucgugcagcaggagagccccuucgucaugauguccgcccccccggcgcaguacgagcugaagcacggcaccuucacgugcgccagcgaguacaccggcaacuaccagugcgggcacuacaagcacaucaccuccaaggagacccuguacugcaucgacggcgcccuccugacgaagagcagcgaguacaaggggcccaucaccgacguguucuacaaggagaacuccuacaccaccacgaucaagcccgugaccuacaagcuggacggcgucgugugcaccgagaucgaccccaagcucgacaacuacuacaagaaggacaacagcuacuucaccgagcagccgaucgaccuggugcccaaccagcccuaccccaacgccuccuucgacaacuucaaguucgucugcgacaacaucaaguucgccgacgaccugaaccagcucacgggguacaagaagccggcgagccgcgagcugaaggugaccuucuuccccgaccugaacggcgacguggucgccaucgacuacaagcacuacacccccuccuucaagaagggcgccaagcuccugcacaagcccaucguguggcacgugaacaacgccaccaacaaggcgacguacaagccgaacaccuggugcauccggugccuguggagcaccaagcccgucgagaccuccaacagcuucgacgugcucaaguccgaggacgcccaggggauggacaaccuggccugcgaggaccugaagcccgugagcgaggaggucguggagaaccccacgauccagaaggacgugcucgagugcaacgucaagaccaccgagguggugggcgacaucauccugaagccggccaacaacucccugaagaucaccgaggaggucgggcacacggaccucauggccgcguacguggacaacagcucccugaccaucaagaagcccaacgagcugagccgcgugcucggccugaagacccuggccacccacgggcucgccgccgucaacuccgugcccugggacacgaucgccaacuacgcgaagccguuccugaacaagguggucagcaccaccaccaacaucgugacgcgcugccugaaccgggugugcaccaacuacaugcccuacuucuucacccuccugcugcagcucugcaccuucacccgcuccacgaacagccggaucaaggccuccaugcccaccaccaucgccaagaacaccgucaagagcgugggcaaguucugccuggaggccagcuucaacuaccugaagucccccaacuucagcaagcucaucaacaucaucaucugguuccugcugcucuccgugugccugggcagccugaucuacuccacggccgcgcucgggguccugaugagcaaccugggcaugccguccuacugcaccggguaccgcgagggcuaccucaacagcaccaacgugaccaucgccacguacugcaccggcuccauccccugcagcgugugccuguccgggcuggacagccucgacaccuaccccucccuggagaccauccagaucacgaucagcuccuucaagugggaccugaccgccuucggccucgucgccgagugguuccuggccuacauccuguucacccgguucuucuacgugcucgggcuggcggccaucaugcagcuguucuucagcuacuucgccgugcacuucaucuccaacagcuggcucauguggcugaucaucaaccugguccagauggcccccaucuccgcgauggugcgcauguacaucuucuucgccagcuucuacuacguguggaagagcuacguccacgugguggacggcugcaacuccagcaccugcaugaugugcuacaagcggaaccgcgccacgcgggucgagugcaccaccaucgugaacgggguccgccgguccuucuacguguacgccaacggcggcaagggguucugcaagcugcacaacuggaacugcgugaacugcgacaccuucugcgccggcagcacguucaucuccgacgaggucgcgcgcgaccucagccugcaguucaagcggccgaucaaccccaccgaccaguccagcuacaucguggacuccgugaccgucaagaacgggagcauccaccuguacuucgacaaggccggccagaagaccuacgagcgccacucccucagccacuucgugaaccuggacaaccugcgggccaacaacacgaaggggucccuccccaucaacgugaucgucuucgacggcaagagcaagugcgaggaguccagcgccaaguccgccagcguguacuacucccagcugaugugccagcccauccugcuccuggaccaggcgcuggugagcgacgucggcgacagcgccgagguggccgugaagauguucgacgccuacgucaacaccuucuccagcaccuucaacgugccgauggagaagcucaagacccugguggccacggcggaggccgagcuggccaagaacgucucccucgacaacgugcugagcaccuucaucuccgccgcgcgccagggguucguggacagcgacgucgagaccaaggacgugguggagugccugaagcucucccaccagagcgacaucgaggucaccggcgacuccugcaacaacuacaugcugacguacaacaagguggagaacaugaccccccgggaccugggggccugcaucgacugcagcgcccgccacaucaacgcccagguggccaagucccacaacaucgcgcucaucuggaacgucaaggacuucaugagccuguccgagcagcugcggaagcagauccgcagcgccgccaagaagaacaaccuccccuucaagcugaccugcgccaccacgcgccagguggugaacgucgugaccaccaagaucgcccugaagggcggguga

SEQ ID NO: 18234 - RNA, 5841 nt, Artificial Sequence
  SARS-CoV-2__MT412226.1__non-structural protein 3 (NSP3) CDS gc
auggcccccaccaaggugaccuucggcgacgacacggucaucgaggugcagggguacaagagcgugaacaucaccuucgagcuggacgagcgcaucgacaagguccucaacgagaagugcuccgccuacaccguggagcugggcaccgaggugaacgaguucgcgugcgucguggccgacgccgugaucaagacgcugcagccggucagcgagcuccugaccccccuggggaucgaccucgacgagugguccauggccaccuacuaccuguucgacgagagcggcgaguucaagcuggccucccacauguacugcagcuucuacccccccgacgaggacgaggaggagggggacugcgaggaggaggaguucgagccguccacccaguacgaguacggcacggaggacgacuaccagggcaagccccucgaguucggggcgaccagcgccgcccugcagcccgaggaggagcaggaggaggacuggcuggacgacgacucccagcagaccgugggccagcaggacgggagcgaggacaaccagaccacgaccauccagaccaucguggagguccagccccagcucgagauggagcugaccccgguggugcagacgaucgaggucaacuccuucagcggcuaccugaagcucaccgacaacguguacaucaagaacgccgacaucguggaggaggcgaagaaggucaagcccaccgugguggucaacgccgccaacguguaccugaagcacgggggcggcguggccggggcccugaacaaggcgaccaacaacgccaugcaggucgaguccgacgacuacaucgccacgaacggcccccucaagguggggggcagcugcguccuguccggccacaaccuggccaagcacugccuccacgugguggggcccaacgucaacaagggcgaggacauccagcugcugaagagcgccuacgagaacuucaaccagcacgaggugcuccuggcgccgcugcucuccgccgggaucuucggcgccgaccccauccacagccugcgggugugcgucgacaccgugcgcaccaacguguaccuggccgucuucgacaagaaccucuacgacaagcugguguccagcuuccuggagaugaagagcgagaagcagguggagcagaagaucgccgagauccccaaggaggaggucaagcccuucaucaccgaguccaagccgagcguggagcagcggaagcaggacgacaagaagaucaaggcgugcguggaggaggucacgaccacccucgaggagaccaaguuccugacggagaaccugcuccuguacaucgacaucaacgggaaccugcaccccgacuccgccacccucgugagcgacaucgacaucaccuuccugaagaaggacgcccccuacaucgugggcgacgucgugcaggagggcgugcugaccgccgucgugauccccacgaagaaggccgggggcaccaccgagaugcucgcgaaggcccugcgcaaggugccgaccgacaacuacaucacgaccuaccccgggcagggccugaacggguacaccgucgaggaggccaagaccgugcucaagaagugcaaguccgccuucuacauccugcccagcaucaucuccaacgagaagcaggagauccugggcaccgugagcuggaaccuccgggagaugcuggcgcacgccgaggagacgcgcaagcugaugcccgucugcguggagaccaaggccaucguguccaccauccagcggaaguacaagggcaucaagauccaggagggggucguggacuacggcgcccgcuucuacuucuacaccagcaagacgaccguggccucccugaucaacacccucaacgaccugaacgagacccuggucacgaugccgcucggguacgugacccacggccugaaccuggaggaggcggcccgguacaugcgcagccucaaggugcccgccaccgucuccgugagcucccccgacgccgugaccgccuacaacggguaccugacgagcuccagcaagacccccgaggagcacuucaucgagaccaucucccuggcgggcagcuacaaggacuggagcuacuccggccagagcacccagcucgggaucgaguuccugaagcggggcgacaaguccgucuacuacacgagcaacccgaccaccuuccaccuggacggggaggugaucaccuucgacaaccucaagacgcugcugucccuccgcgaggugcggaccaucaaggucuucaccaccguggacaacaucaaccugcacacgcagguggucgacaugagcaugaccuacggccagcaguucggccccaccuaccuggacggggccgacgugaccaagaucaagccccacaacucccacgagggcaagacguucuacgugcucccgaacgacgacacccugcgcgucgaggccuucgaguacuaccacaccaccgaccccagcuuccuggggcgguacauguccgcccucaaccacacgaagaaguggaaguacccccaggugaacggccugaccagcaucaagugggccgacaacaacugcuaccuggcgaccgcccuccugacccugcagcagaucgagcucaaguucaaccccccggcccugcaggacgccuacuaccgcgcgcgggccggggaggccgccaacuucugcgcccugauccucgcguacugcaacaagacggugggcgagcugggcgacguccgcgagaccauguccuaccuguuccagcacgccaaccucgacagcugcaagcgggugcugaacgucgugugcaagaccugcgggcagcagcagaccacccugaagggcguggaggccgucauguacauggggacgcucuccuacgagcaguucaagaagggcgugcagauccccugcaccugcgggaagcaggccaccaaguaccuggugcagcaggagagccccuucgucaugauguccgcccccccggcgcaguacgagcugaagcacggcaccuucacgugcgccagcgaguacaccggcaacuaccagugcgggcacuacaagcacaucaccuccaaggagacccucuacugcaucgacggcgcccugcugacgaagagcagcgaguacaaggggcccaucaccgacguguucuacaaggagaacuccuacaccaccacgaucaagcccgugaccuacaagcucgacggcgucgugugcaccgagaucgaccccaagcuggacaacuacuacaagaaggacaacagcuacuucaccgagcagccgaucgaccuggugcccaaccagcccuaccccaacgccuccuucgacaacuucaaguucgucugcgacaacaucaaguucgccgacgaccucaaccagcugacgggguacaagaagccggcgagccgcgagcugaaggugaccuucuuccccgaccucaacggcgacguggucgccaucgacuacaagcacuacacccccuccuucaagaagggcgccaagcugcugcacaagcccaucguguggcacgugaacaacgccaccaacaaggcgacguacaagccgaacaccuggugcauccggugccucuggagcaccaagcccgucgagaccuccaacagcuucgacgugcugaaguccgaggacgcccaggggauggacaaccuggccugcgaggaccucaagcccgugagcgaggaggucguggagaaccccacgauccagaaggacgugcuggagugcaacgucaagaccaccgagguggugggcgacaucauccugaagccggccaacaacucccucaagaucaccgaggaggucgggcacacggaccugauggccgcguacguggacaacagcucccugaccaucaagaagcccaacgagcucagccgcgugcugggccugaagacccucgccacccacgggcuggccgccgucaacuccgugcccugggacacgaucgccaacuacgcgaagccguuccugaacaagguggucagcaccaccaccacgaucgugacccgcugccucaaccgggugugcaccaacuacaugcccuacuucuucacccugcugcuccagcugugcaccuucacgcgcuccaccaacagccggaucaaggccuccaugcccaccaccaucgccaagaacacggucaagagcgugggcaaguucugccuggaggccagcuucaacuaccucaagucccccaacuucagcaagcugaucaacaucaucaucugguuccugcuccuguccgugugccugggcagccucaucuacuccaccgccgcgcuggggguccugaugagcaaccucggcaugccguccuacugcaccggguaccgcgagggcuaccugaacagcaccaacgugacgaucgccaccuacugcaccggcuccauccccugcagcgugugccuguccgggcucgacagccuggacaccuaccccucccuggagacgauccagaucaccaucagcuccuucaagugggaccucaccgccuucggccuggucgccgagugguuccuggccuacauccucuucacccgguucuucuacgugcuggggcuggcggccaucaugcagcucuucuucagcuacuucgccgugcacuucaucuccaacagcuggcugauguggcugaucaucaaccugguccagauggcccccaucuccgcgauggugcgcauguacaucuucuucgccagcuucuacuacguguggaagagcuacguccacgugguggacggcugcaacuccagcacgugcaugaugugcuacaagcggaaccgcgccacccgggucgagugcaccaccaucgugaacgggguccgccgguccuucuacguguacgccaacggcggcaagggguucugcaagcuccacaacuggaacugcgugaacugcgacacguucugcgccggcagcaccuucaucuccgacgaggucgcgcgcgaccugagccugcaguucaagcggccgaucaaccccaccgaccaguccagcuacaucguggacuccgugaccgucaagaacgggagcauccaccucuacuucgacaaggccggccagaagacguacgagcgccacucccugagccacuucgugaaccuggacaaccuccgggccaacaacaccaaggggucccugcccaucaacgugaucgucuucgacggcaagagcaagugcgaggaguccagcgccaaguccgccagcguguacuacucccagcugaugugccagcccauccuccugcuggaccaggcgcucgugagcgacgucggcgacagcgccgagguggccgugaagauguucgacgccuacgucaacaccuucuccagcaccuucaacgugccgauggagaagcugaagacgcugguggccaccgcggaggccgagcucgccaagaacgucucccuggacaacgugcugagcaccuucaucuccgccgcgcgccagggguucguggacagcgacgucgagaccaaggacgugguggagugccucaagcugucccaccagagcgacaucgaggucacgggcgacuccugcaacaacuacaugcugaccuacaacaagguggagaacaugaccccccgggaccucggggccugcaucgacugcagcgcccgccacaucaacgcccagguggccaagucccacaacaucgcgcugaucuggaacgucaaggacuucaugagccuguccgagcagcuccggaagcagauccgcagcgccgccaagaagaacaaccugcccuucaagcugaccugcgccacgacccgccagguggugaacgucgugaccaccaagaucgcccucaagggcggguga

SEQ ID NO: 18235 - RNA, 5841 nt, Artificial Sequence
  SARS-CoV-2__MT412324.1__non-structural protein 3 (NSP3) CDS gc
auggcccccaccaaggugaccuucggcgacgacacggucaucgaggugcagggguacaagagcgugaacaucaccuucgagcuggacgagcgcaucgacaagguccucaacgagaagugcuccgccuacaccguggagcugggcaccgaggugaacgaguucgcgugcgucguggccgacgccgugaucaagacgcugcagccggucagcgagcuccugaccccccuggggaucgaccucgacgagugguccauggccaccuacuaccuguucgacgagagcggcgaguucaagcuggccucccacauguacugcagcuucuacccccccgacgaggacgaggaggagggggacugcgaggaggaggaguucgagccguccacccaguacgaguacggcacggaggacgacuaccagggcaagccccucgaguucggggcgaccagcgccgcccugcagcccgaggaggagcaggaggaggacuggcuggacgacgacucccagcagaccgugggccagcaggacgggagcgaggacaaccagaccacgaccauccagaccaucguggagguccagccccagcucgagauggagcugaccccgguggugcagacgaucgaggucaacuccuucagcggcuaccugaagcucaccgacaacguguacaucaagaacgccgacaucguggaggaggcgaagaaggucaagcccaccgugguggucaacgccgccaacguguaccugaagcacgggggcggcguggccggggcccugaacaaggcgaccaacaacgccaugcaggucgaguccgacgacuacaucgccacgaacggcccccucaagguggggggcagcugcguccuguccggccacaaccuggccaagcacugccuccacgugguggggcccaacgucaacaagggcgaggacauccagcugcugaagagcgccuacgagaacuucaaccagcacgaggugcuccuggcgccgcugcucuccgccgggaucuucggcgccgaccccauccacagccugcgggugugcgucgacaccgugcgcaccaacguguaccuggccgucuucgacaagaaccucuacgacaagcugguguccagcuuccuggagaugaagagcgagaagcagguggagcagaagaucgccgagauccccaaggaggaggucaagcccuucaucaccgaguccaagccgagcguggagcagcggaagcaggacgacaagaagaucaaggcgugcguggaggaggucacgaccacccucgaggagaccaaguuccugacggagaaccugcuccuguacaucgacaucaacgggaaccugcaccccgacuccgccacccucgugagcgacaucgacaucaccuuccugaagaaggacgcccccuacaucgugggcgacgucgugcaggagggcgugcugaccgccgucgugauccccacgaagaaggccgggggcaccaccgagaugcucgcgaaggcccugcgcaaggugccgaccgacaacuacaucacgaccuaccccgggcagggccugaacggguacaccgucgaggaggccaagaccgugcucaagaagugcaaguccgccuucuacauccugcccagcaucaucuccaacgagaagcaggagauccugggcaccgugagcuggaaccuccgggagaugcuggcgcacgccgaggagacgcgcaagcugaugcccgucugcguggagaccaaggccaucguguccaccauccagcggaaguacaagggcaucaagauccaggagggggucguggacuacggcgcccgcuucuacuucuacaccagcaagacgaccguggccucccugaucaacacccucaacgaccugaacgagacccuggucacgaugccgcucggguacgugacccacggccugaaccuggaggaggcggcccgguacaugcgcagccucaaggugcccgccaccgucuccgugagcucccccgacgccgugaccgccuacaacggguaccugacgagcuccagcaagacccccgaggagcacuucaucgagaccaucucccuggcgggcagcuacaaggacuggagcuacuccggccagagcacccagcucgggaucgaguuccugaagcggggcgacaaguccgucuacuacacgagcaacccgaccaccuuccaccuggacggggaggugaucaccuucgacaaccucaagacgcugcugucccuccgcgaggugcggaccaucaaggucuucaccaccguggacaacaucaaccugcacacgcagguggucgacaugagcaugaccuacggccagcaguucggccccaccuaccuggacggggccgacgugaccaagaucaagccccacaacucccacgagggcaagacguucuacgugcucccgaacgacgacacccugcgcgucgaggccuucgaguacuaccacaccaccgaccccagcuuccuggggcgguacauguccgcccucaaccacacgaagaaguggaaguacgcccaggugaacggccugaccagcaucaagugggcggacaacaacugcuaccuggccaccgcccuccugacccugcagcagaucgagcucaaguucaacccccccgcccugcaggacgcguacuaccgcgcccgggccggggaggccgccaacuucugcgcgcugauccucgccuacugcaacaagacggugggcgagcugggcgacguccgcgagaccauguccuaccuguuccagcacgccaaccucgacagcugcaagcgggugcugaacgucgugugcaagaccugcgggcagcagcagaccacccugaagggcguggaggccgucauguacauggggacgcucuccuacgagcaguucaagaagggcgugcagaucccgugcaccugcgggaagcaggccaccaaguaccuggugcagcaggagagccccuucgucaugauguccgcgccccccgcccaguacgagcugaagcacggcaccuucacgugcgccagcgaguacaccggcaacuaccagugcgggcacuacaagcacaucaccuccaaggagacccucuacugcaucgacggcgcccugcugacgaagagcagcgaguacaaggggccgaucaccgacguguucuacaaggagaacuccuacaccaccacgaucaagcccgugaccuacaagcucgacggcgucgugugcaccgagaucgaccccaagcuggacaacuacuacaagaaggacaacagcuacuucaccgagcagcccaucgaccuggugccgaaccagcccuaccccaacgccuccuucgacaacuucaaguucgucugcgacaacaucaaguucgcggacgaccucaaccagcugacgggguacaagaagcccgccagccgcgagcugaaggugaccuucuucccggaccucaacggcgacguggucgccaucgacuacaagcacuacacccccuccuucaagaagggcgccaagcugcugcacaagcccaucguguggcacgugaacaacgcgaccaacaaggccacguacaagcccaacaccuggugcauccggugccucuggagcaccaagccggucgagaccuccaacagcuucgacgugcugaaguccgaggacgcccaggggauggacaaccuggccugcgaggaccucaagcccgugagcgaggaggucguggagaaccccacgauccagaaggacgugcuggagugcaacgucaagaccaccgagguggugggcgacaucauccugaagcccgccaacaacucccucaagaucaccgaggaggucgggcacacggaccugauggcggccuacguggacaacagcucccugaccaucaagaagccgaacgagcucagccgcgugcugggccugaagacccucgccacccacgggcuggccgccgucaacuccgugcccugggacacgaucgcgaacuacgccaagcccuuccugaacaagguggucagcaccaccaccaacaucgugacgcgcugccucaaccgggugugcaccaacuacaugccguacuucuucacccugcugcuccagcugugcaccuucacccgcuccacgaacagccggaucaaggccuccaugcccaccaccaucgccaagaacaccgucaagagcgugggcaaguucugccuggaggccagcuucaacuaccucaagucccccaacuucagcaagcugaucaacaucaucaucugguuccugcuccuguccgugugccugggcagccucaucuacuccacggcggcccuggggguccugaugagcaaccucggcaugcccuccuacugcaccggguaccgcgagggcuaccugaacagcaccaacgugaccaucgccacguacugcaccggcuccaucccgugcagcgugugccuguccgggcucgacagccuggacaccuaccccucccuggagaccauccagaucacgaucagcuccuucaagugggaccucaccgccuucggccuggucgccgagugguuccuggcguacauccucuucacccgguucuucuacgugcuggggcuggccgccaucaugcagcucuucuucagcuacuucgccgugcacuucaucuccaacagcuggcugauguggcugaucaucaaccugguccagauggcgcccaucuccgccauggugcgcauguacaucuucuucgccagcuucuacuacguguggaagagcuacguccacgugguggacggcugcaacuccagcaccugcaugaugugcuacaagcggaaccgcgccacgcgggucgagugcaccaccaucgugaacgggguccgccgguccuucuacguguacgccaacggcggcaagggguucugcaagcuccacaacuggaacugcgugaacugcgacaccuucugcgcgggcagcacguucaucuccgacgaggucgcccgcgaccugagccugcaguucaagcggcccaucaacccgaccgaccaguccagcuacaucguggacuccgugaccgucaagaacgggagcauccaccucuacuucgacaaggccggccagaagaccuacgagcgccacucccugagccacuucgugaaccuggacaaccuccgggccaacaacacgaaggggucccugcccaucaacgugaucgucuucgacggcaagagcaagugcgaggaguccagcgccaaguccgcgagcguguacuacucccagcugaugugccagcccauccuccugcuggaccaggcccucgugagcgacgucggcgacagcgccgagguggccgugaagauguucgacgccuacgucaacaccuucuccagcaccuucaacgugcccauggagaagcugaagacccugguggcgacggccgaggccgagcucgccaagaacgucucccuggacaacgugcugagcaccuucaucuccgcggcccgccagggguucguggacagcgacgucgagaccaaggacgugguggagugccucaagcugucccaccagagcgacaucgaggucaccggcgacuccugcaacaacuacaugcugacguacaacaagguggagaacaugaccccgcgggaccucggggccugcaucgacugcagcgcccgccacaucaacgcccagguggcgaagucccacaacaucgcccugaucuggaacgucaaggacuucaugagccuguccgagcagcuccggaagcagauccgcagcgccgccaagaagaacaaccugcccuucaagcugaccugcgccaccacgcgccagguggugaacgucgugaccaccaagaucgcgcucaagggcggguga

SEQ ID NO: 18236 - RNA, 5841 nt, Artificial Sequence
  SARS-CoV-2__MT412325.1__non-structural protein 3 (NSP3) CDS gc
auggcccccaccaaggugaccuucggcgacgacacggucaucgaggugcagggguacaagagcgugaacaucaccuucgagcuggacgagcgcaucgacaagguccucaacgagaagugcuccgccuacaccguggagcugggcaccgaggugaacgaguucgcgugcgucguggccgacgccgugaucaagacgcugcagccggucagcgagcuccugaccccccuggggaucgaccucgacgagugguccauggccaccuacuaccuguucgacgagagcggcgaguucaagcuggccucccacauguacugcagcuucuacccccccgacgaggacgaggaggagggggacugcgaggaggaggaguucgagccguccacccaguacgaguacggcacggaggacgacuaccagggcaagccccucgaguucggggcgaccagcgccgcccugcagcccgaggaggagcaggaggaggacuggcuggacgacgacucccagcagaccgugggccagcaggacgggagcgaggacaaccagaccacgaccauccagaccaucguggagguccagccccagcucgagauggagcugaccccgguggugcagacgaucgaggucaacuccuucagcggcuaccugaagcucaccgacaacguguacaucaagaacgccgacaucguggaggaggcgaagaaggucaagcccaccgugguggucaacgccgccaacguguaccugaagcacgggggcggcguggccggggcccugaacaaggcgaccaacaacgccaugcaggucgaguccgacgacuacaucgccacgaacggcccccucaagguggggggcagcugcguccuguccggccacaaccuggccaagcacugccuccacgugguggggcccaacgucaacaagggcgaggacauccagcugcugaagagcgccuacgagaacuucaaccagcacgaggugcuccuggcgccgcugcucuccgccgggaucuucggcgccgaccccauccacagccugcgggugugcgucgacaccgugcgcaccaacguguaccuggccgucuucgacaagaaccucuacgacaagcugguguccagcuuccuggagaugaagagcgagaagcagguggagcagaagaucgccgagauccccaaggaggaggucaagcccuucaucaccgaguccaagccgagcguggagcagcggaagcaggacgacaagaagaucaaggcgugcguggaggaggucacgaccacccucgaggagaccaaguuccugacggagaaccugcuccuguacaucgacaucaacgggaaccugcaccccgacuccgccacccucgugagcgacaucgacaucaccuuccugaagaaggacgcccccuacaucgugggcgacgucgugcaggagggcgugcugaccgccgucgugauccccacgaagaaggccgggggcaccaccgagaugcucgcgaaggcccugcgcaaggugccgaccgacaacuacaucacgaccuaccccgggcagggccugaacggguacaccgucgaggaggccaagaccgugcucaagaagugcaaguccgccuucuacauccugcccagcaucaucuccaacgagaagcaggagauccugggcaccgugagcuggaaccuccgggagaugcuggcgcacgccgaggagacgcgcaagcugaugcccgucugcguggagaccaaggccaucguguccaccauccagcggaaguacaagggcaucaagauccaggagggggucguggacuacggcgcccgcuucuacuucuacaccagcaagacgaccguggccucccugaucaacacccucaacgaccugaacgagacccuggucacgaugccgcucggguacgugacccacggccugaaccuggaggaggcggcccgguacaugcgcagccucaaggugcccgccaccgucuccgugagcucccccgacgccgugaccgccuacaacggguaccugacgagcuccagcaagacccccgaggagcacuucaucgagaccaucucccuggcgggcagcuacaaggacuggagcuacuccggccagagcacccagcucgggaucgaguuccugaagcggggcgacaaguccgucuacuacacgagcaacccgaccaccuuccaccuggacggggaggugaucaccuucgacaaccucaagacgcugcugucccuccgcgaggugcggaccaucaaggucuucaccaccguggacaacaucaaccugcacacgcagguggucgacaugagcaugaccuacggccagcaguucggccccaccuaccuggacggggccgacgugaccaagaucaagccccacaacucccacgagggcaagacguucuacgugcucccgaacgacgacacccugcgcgucgaggccuucgaguacuaccacaccaccgaccccagcuuccuggggcgguacauguccgcccucaaccacacgaagaaguggaaguacccccaggugaacggccugaccagcaucaagugggccgacaacaacugcuaccuggcgaccgcccuccugacccugcagcagaucgagcucaaguucaaccccccggcccugcaggacgccuacuaccgcgcgcgggccggggaggccgccaacuucugcgcccugauccucgcguacugcaacaagacggugggcgagcugggcgacguccgcgagaccauguccuaccuguuccagcacgccaagcucgacagcugcaagcgggugcugaacgucgugugcaagaccugcgggcagcagcagaccacccugaagggcguggaggccgucauguacauggggacgcucuccuacgagcaguucaagaagggcgugcagauccccugcaccugcgggaagcaggccaccaaguaccuggugcagcaggagagccccuucgucaugauguccgcccccccggcgcaguacgagcugaagcacggcaccuucacgugcgccagcgaguacaccggcaacuaccagugcgggcacuacaagcacaucaccuccaaggagacccucuacugcaucgacggcgcccugcugacgaagagcagcgaguacaaggggcccaucaccgacguguucuacaaggagaacuccuacaccaccacgaucaagcccgugaccuacaagcucgacggcgucgugugcaccgagaucgaccccaagcuggacaacuacuacaagaaggacaacagcuacuucaccgagcagccgaucgaccuggugcccaaccagcccuaccccaacgccuccuucgacaacuucaaguucgucugcgacaacaucaaguucgccgacgaccucaaccagcugacgggguacaagaagccggcgagccgcgagcugaaggugaccuucuuccccgaccucaacggcgacguggucgccaucgacuacaagcacuacacccccuccuucaagaagggcgccaagcugcugcacaagcccaucguguggcacgugaacaacgccaccaacaaggcgacguacaagccgaacaccuggugcauccggugccucuggagcaccaagcccgucgagaccuccaacagcuucgacgugcugaaguccgaggacgcccaggggauggacaaccuggccugcgaggaccucaagcccgugagcgaggaggucguggagaaccccacgauccagaaggacgugcuggagugcaacgucaagaccaccgagguggugggcgacaucauccugaagccggccaacaacucccucaagaucaccgaggaggucgggcacacggaccugauggccgcguacguggacaacagcucccugaccaucaagaagcccaacgagcucagccgcgugcugggccugaagacccucgccacccacgggcuggccgccgucaacuccgugcccugggacacgaucgccaacuacgcgaagccguuccugaacaagguggucagcaccaccaccaacaucgugacgcgcugccucaaccgggugugcaccaacuacaugcccuacuucuucacccugcugcuccagcugugcaccuucacccgcuccacgaacagccggaucaaggccuccaugcccaccaccaucgccaagaacaccgucaagagcgugggcaaguucugccuggaggccagcuucaacuaccucaagucccccaacuucagcaagcugaucaacaucaucaucugguuccugcuccuguccgugugccugggcagccucaucuacuccacggccgcgcuggggguccugaugagcaaccucggcaugccguccuacugcaccggguaccgcgagggcuaccugaacagcaccaacgugaccaucgccacguacugcaccggcuccauccccugcagcgugugccuguccgggcucgacagccuggacaccuaccccucccuggagaccauccagaucacgaucagcuccuucaagugggaccucaccgccuucggccuggucgccgagugguuccuggccuacauccucuucacccgguucuucuacgugcuggggcuggcggccaucaugcagcucuucuucagcuacuucgccgugcacuucaucuccaacagcuggcugauguggcugaucaucaaccugguccagauggcccccaucuccgcgauggugcgcauguacaucuucuucgccagcuucuacuacguguggaagagcuacguccacgugguggacggcugcaacuccagcaccugcaugaugugcuacaagcggaaccgcgccacgcgggucgagugcaccaccaucgugaacgggguccgccgguccuucuacguguacgccaacggcggcaagggguucugcaagcuccacaacuggaacugcgugaacugcgacaccuucugcgccggcagcacguucaucuccgacgaggucgcgcgcgaccugagccugcaguucaagcggccgaucaaccccaccgaccaguccagcuacaucguggacuccgugaccgucaagaacgggagcauccaccucuacuucgacaaggccggccagaagaccuacgagcgccacucccugagccacuucgugaaccuggacaaccuccgggccaacaacacgaaggggucccugcccaucaacgugaucgucuucgacggcaagagcaagugcgaggaguccagcgccaaguccgccagcguguacuacucccagcugaugugccagcccauccuccugcuggaccaggcgcucgugagcgacgucggcgacagcgccgagguggccgugaagauguucgacgccuacgucaacaccuucuccagcaccuucaacgugccgauggagaagcugaagacccugguggccacggcggaggccgagcucgccaagaacgucucccuggacaacgugcugagcaccuucaucuccgccgcgcgccagggguucguggacagcgacgucgagaccaaggacgugguggagugccucaagcugucccaccagagcgacaucgaggucaccggcgacuccugcaacaacuacaugcugacguacaacaagguggagaacaugaccccccgggaccucggggccugcaucgacugcagcgcccgccacaucaacgcccagguggccaagucccacaacaucgcgcugaucuggaacgucaaggacuucaugagccuguccgagcagcuccggaagcagauccgcagcgccgccaagaagaacaaccugcccuucaagcugaccugcgccaccacgcgccagguggugaacgucgugaccaccaagaucgcccucaagggcggguga

SEQ ID NO: 18237 - RNA, 5841 nt, Artificial Sequence
  SARS-CoV-2__MT415896.1__non-structural protein 3 (NSP3) CDS gc
auggcccccaccaaggugaccuucggcgacgacacggucaucgaggugcagggguacaagagcgugaacaucaccuucgagcuggacgagcgcaucgacaagguccucaacgagaagugcuccgccuacaccguggagcugggcaccgaggugaacgaguucgcgugcgucguggccgacgccgugaucaagacgcugcagccggucagcgagcuccugaccccccuggggaucgaccucgacgagugguccauggccaccuacuaccuguucgacgagagcggcgaguucaagcuggccucccacauguacugcagcuucuacccccccgacgaggacgaggaggagggggacugcgaggaggaggaguucgagccguccacccaguacgaguacggcacggaggacgacuaccagggcaagccccucgaguucggggcgaccagcgccgcccugcagcuggaggaggagcaggaggaggacuggcucgacgacgacucccagcagaccgugggccagcaggacgggagcgaggacaaccagaccacgaccauccagaccaucguggagguccagccccagcuggagauggagcugacccccguggugcagacgaucgaggucaacuccuucagcggcuaccucaagcugaccgacaacguguacaucaagaacgccgacaucguggaggaggcgaagaaggucaagccgaccgugguggucaacgccgccaacguguaccugaagcacgggggcggcguggccggggcccucaacaaggcgaccaacaacgccaugcaggucgaguccgacgacuacaucgccacgaacggcccccugaagguggggggcagcugcguccuguccggccacaaccucgccaagcacugccugcacgugguggggcccaacgucaacaagggcgaggacauccagcugcucaagagcgccuacgagaacuucaaccagcacgaggugcugcuggcgccccuccuguccgccgggaucuucggcgccgacccgauccacagccugcgggugugcgucgacaccgugcgcaccaacguguaccucgccgucuucgacaagaaccuguacgacaagcugguguccagcuuccucgagaugaagagcgagaagcagguggagcagaagaucgccgagauccccaaggaggaggucaagcccuucaucaccgaguccaagcccagcguggagcagcggaagcaggacgacaagaagaucaaggcgugcguggaggaggucacgaccacccuggaggagaccaaguuccugacggagaaccuccugcuguacaucgacaucaacgggaaccuccacccggacuccgccacccuggugagcgacaucgacaucaccuuccugaagaaggacgcccccuacaucgugggcgacgucgugcaggagggcgugcucaccgccgucgugauccccacgaagaaggccgggggcaccaccgagaugcuggcgaaggcccugcgcaaggugcccaccgacaacuacaucacgaccuacccggggcagggccucaacggguacaccgucgaggaggccaagaccgugcugaagaagugcaaguccgccuucuacauccugcccagcaucaucuccaacgagaagcaggagauccucggcaccgugagcuggaaccugcgggagaugcuggcgcacgccgaggagacgcgcaagcugaugcccgucugcguggagaccaaggccaucguguccaccauccagcggaaguacaagggcaucaagauccaggagggggucguggacuacggcgcccgcuucuacuucuacaccagcaagacgaccguggccucccucaucaacacccugaacgaccugaacgagacccucgucacgaugccccugggguacgugacccacggccugaaccucgaggaggcggcccgguacaugcgcagccugaaggugccggccaccgucuccgugagcucccccgacgccgugaccgccuacaacggguaccugacgagcuccagcaagacccccgaggagcacuucaucgagaccaucucccucgcgggcagcuacaaggacuggagcuacuccggccagagcacccagcuggggaucgaguuccugaagcggggcgacaaguccgucuacuacacgagcaaccccaccaccuuccaccucgacggggaggugaucaccuucgacaaccugaagacgcugcucucccugcgcgaggugcggaccaucaaggucuucaccaccguggacaacaucaaccugcacacgcagguggucgacaugagcaugaccuacggccagcaguucggcccgaccuaccucgacggggccgacgugaccaagaucaagccccacaacucccacgagggcaagacguucuacgugcugcccaacgacgacacccugcgcgucgaggccuucgaguacuaccacaccaccgacccgagcuuccucgggcgguacauguccgcccugaaccacacgaagaaguggaaguacccccaggugaacggccugaccagcaucaagugggccgacaacaacugcuaccucgcgaccgcccugcugacccuccagcagaucgagcugaaguucaacucccccgcccugcaggacgccuacuaccgcgcgcgggccggggaggccgccaacuucugcgcccucauccuggcguacugcaacaagacggugggcgagcugggcgacguccgcgagaccaugagcuaccucuuccagcacgccaaccuggacuccugcaagcgggugcugaacgucgugugcaagaccugcgggcagcagcagaccacccucaagggcguggaggccgucauguacauggggacgcugagcuacgagcaguucaagaagggcgugcagauccccugcaccugcgggaagcaggccaccaaguaccuggugcagcaggaguccccguucgucaugaugagcgccccccccgcgcaguacgagcucaagcacggcaccuucacgugcgccuccgaguacaccggcaacuaccagugcgggcacuacaagcacaucaccagcaaggagacccuguacugcaucgacggcgcccugcucacgaagagcuccgaguacaaggggcccaucaccgacguguucuacaaggagaacagcuacaccaccacgaucaagccggugaccuacaagcuggacggcgucgugugcaccgagaucgaccccaagcuggacaacuacuacaagaaggacaacuccuacuucaccgagcagcccaucgaccucgugcccaaccagccguaccccaacgccagcuucgacaacuucaaguucgucugcgacaacaucaaguucgccgacgaccugaaccagcugacgggguacaagaagcccgcgucccgcgagcucaaggugaccuucuuccccgaccugaacggcgacguggucgccaucgacuacaagcacuacaccccgagcuucaagaagggcgccaagcugcuccacaagcccaucguguggcacgugaacaacgccaccaacaaggcgacguacaagcccaacaccuggugcauccggugccugugguccaccaagcccgucgagaccagcaacuccuucgacgugcugaagagcgaggacgcccaggggauggacaaccucgccugcgaggaccugaagccgguguccgaggaggucguggagaaccccacgauccagaaggacgugcuggagugcaacgucaagaccaccgagguggugggcgacaucauccucaagcccgccaacaacagccugaagaucaccgaggaggucgggcacacggaccugauggccgcguacguggacaacuccagccucaccaucaagaagcccaacgagcugucccgcgugcugggccucaagacccuggccacccacgggcuggccgccgucaacagcgugccgugggacacgaucgccaacuacgcgaagcccuuccucaacaagguggucuccaccaccaccaacaucgugacgcgcugccugaaccgggugugcaccaacuacaugcccuacuucuucacccugcuccugcagcugugcaccuucacccgcagcacgaacucccggaucaaggccagcaugccgaccaccaucgccaagaacaccgucaagagcgugggcaaguucugccucgaggccuccuucaacuaccugaagagccccaacuucuccaagcugaucaacaucaucaucugguuccuccugcugagcgugugccucggcucccugaucuacagcacggccgcgcuggggguccucauguccaaccugggcaugcccagcuacugcaccggguaccgcgagggcuaccugaacuccaccaacgugaccaucgccacguacugcaccggcagcauccccugcuccgugugccucagcgggcuggacucccuggacaccuacccgagccucgagaccauccagaucacgaucuccagcuucaagugggaccugaccgccuucggccuggucgccgagugguuccucgccuacauccuguucacccgguucuucuacgugcuggggcucgcggccaucaugcagcuguucuucuccuacuucgccgugcacuucaucagcaacuccuggcugauguggcugaucaucaaccucguccagauggcccccaucagcgcgauggugcgcauguacaucuucuucgccagcuucuacuacguguggaaguccuacguccacgugguggacggcugcaacagcuccaccugcaugaugugcuacaagcggaaccgcgccacgcgggucgagugcaccaccaucgugaacgggguccgccggagcuucuacguguacgccaacggcggcaagggguucugcaagcugcacaacuggaacugcgugaacugcgacaccuucugcgccggcuccacguucaucagcgacgaggucgcgcgcgaccugucccuccaguucaagcggcccaucaaccccaccgaccagagcuccuacaucguggacagcgugaccgucaagaacggguccauccaccuguacuucgacaaggccggccagaagaccuacgagcgccacagccugucccacuucgugaaccucgacaaccugcgggccaacaacacgaaggggagccugccgaucaacgugaucgucuucgacggcaaguccaagugcgaggagagcuccgccaagagcgccuccguguacuacagccagcucaugugccagcccauccugcugcucgaccaggcgcuggugagcgacgucggcgacuccgccgagguggccgugaagauguucgacgccuacgucaacaccuucagcuccaccuucaacgugcccauggagaagcugaagacccucguggccacggcggaggccgagcuggccaagaacgucagccuggacaacgugcucuccaccuucaucagcgccgcgcgccagggguucguggacuccgacgucgagaccaaggacgugguggagugccugaagcugagccaccaguccgacaucgaggucaccggcgacagcugcaacaacuacaugcucacguacaacaagguggagaacaugaccccccgggaccugggggccugcaucgacugcuccgcccgccacaucaacgcccagguggccaagagccacaacaucgcgcugaucuggaacgucaaggacuucaugucccucagcgagcagcugcggaagcagauccgcuccgccgccaagaagaacaaccugccguucaagcucaccugcgccaccacgcgccagguggugaacgucgugaccaccaagaucgcccugaagggcggguga

SEQ ID NO: 18238 - RNA, 5841 nt, Artificial Sequence
  SARS-CoV-2__MT385436.1__non-structural protein 3 (NSP3) CDS gc
auggcccccaccaaggugaccuucggcgacgacacggucaucgaggugcagggguacaagagcgugaacaucaccuucgagcuggacgagcgcaucgacaagguccucaacgagaagugcuccgccuacaccguggagcugggcaccgaggugaacgaguucgcgugcgucgugacggacgccgugaucaagacccugcagccggucagcgagcuccugaccccccuggggaucgaccucgacgagugguccauggccaccuacuaccuguucgacgagagcggcgaguucaagcuggccucccacauguacugcagcuucuacccccccgacgaggacgaggaggagggggacugcgaggaggaggaguucgagccguccacgcaguacgaguacggcaccgaggacgacuaccagggcaagccccucgaguucggggccaccagcgcggcccugcagcccgaggaggagcaggaggaggacuggcuggacgacgacucccagcagaccgugggccagcaggacgggagcgaggacaaccagacgaccaccauccagaccaucguggagguccagccccagcucgagauggagcugacgccgguggugcagaccaucgaggucaacuccuucagcggcuaccugaagcucaccgacaacguguacaucaagaacgccgacaucguggaggaggccaagaaggucaagcccaccgugguggucaacgcggccaacguguaccugaagcacgggggcggcguggccggggcccugaacaaggccacgaacaacgcgaugcaggucgaguccgacgacuacaucgccaccaacggcccccucaagguggggggcagcugcguccuguccggccacaaccuggccaagcacugccuccacgugguggggcccaacgucaacaagggcgaggacauccagcugcugaagagcgccuacgagaacuucaaccagcacgaggugcuccuggccccgcugcucuccgcggggaucuucggcgccgaccccauccacagccugcgggugugcgucgacaccgugcgcaccaacguguaccuggccgucuucgacaagaaccucuacgacaagcugguguccagcuuccuggagaugaagagcgagaagcagguggagcagaagaucgccgagauccccaaggaggaggucaagcccuucaucacggaguccaagccgagcguggagcagcggaagcaggacgacaagaagaucaaggccugcguggaggaggucaccaccacccucgaggagacgaaguuccugaccgagaaccugcuccuguacaucgacaucaacgggaaccugcaccccgacuccgcgacccucgugagcgacaucgacaucaccuuccugaagaaggacgcccccuacaucgugggcgacgucgugcaggagggcgugcugacggccgucgugauccccaccaagaaggccgggggcaccaccgagaugcucgccaaggcgcugcgcaaggugccgacggacaacuacaucaccaccuaccccgggcagggccugaacggguacaccgucgaggaggccaagaccgugcucaagaagugcaaguccgccuucuacauccugcccagcaucaucuccaacgagaagcaggagauccugggcacggugagcuggaaccuccgggagaugcuggcccacgcggaggagacccgcaagcugaugcccgucugcguggagaccaaggccaucguguccaccauccagcggaaguacaagggcaucaagauccaggagggggucguggacuacggcgcccgcuucuacuucuacacgagcaagaccaccguggccucccugaucaacacccucaacgaccugaacgagacgcuggucaccaugccgcucggguacgugacccacggccugaaccuggaggaggccgcgcgguacaugcgcagccucaaggugcccgccaccgucuccgugagcucccccgacgccgugacggccuacaacggguaccugaccagcuccagcaagacccccgaggagcacuucaucgagaccaucucccuggccggcagcuacaaggacuggagcuacuccggccagagcacgcagcucgggaucgaguuccugaagcggggcgacaaguccgucuacuacaccagcaacccgaccaccuuccaccuggacggggaggugaucacguucgacaaccucaagacccugcugucccuccgcgaggugcggaccaucaaggucuucaccacgguggacaacaucaaccugcacacccagguggucgacaugagcaugaccuacggccagcaguucggccccaccuaccuggacggggcggacgugacgaagaucaagccccacaacucccacgagggcaagaccuucuacgugcucccgaacgacgacacccugcgcgucgaggccuucgaguacuaccacaccacggaccccagcuuccuggggcgguacauguccgcccucaaccacaccaagaaguggaaguacccccaggugaacggccugaccagcaucaagugggccgacaacaacugcuaccuggccaccgcgcuccugacgcugcagcagaucgagcucaaguucaaccccccggcccugcaggacgccuacuaccgcgcccgggcgggggaggccgccaacuucugcgcccugauccucgccuacugcaacaagaccgugggcgagcugggcgacguccgcgagaccauguccuaccuguuccagcacgcgaaccucgacagcugcaagcgggugcugaacgucgugugcaagaccugcgggcagcagcagaccacgcugaagggcguggaggccgucauguacauggggacccucuccuacgagcaguucaagaagggcgugcagauccccugcaccugcgggaagcaggccaccaaguaccuggugcagcaggagagccccuucgucaugauguccgcccccccggcccaguacgagcugaagcacggcacguucaccugcgcgagcgaguacaccggcaacuaccagugcgggcacuacaagcacaucaccuccaaggagacgcucuacugcaucgacggcgcccugcugaccaagagcagcgaguacaaggggcccaucaccgacguguucuacaaggagaacuccuacaccacgaccaucaagcccgugaccuacaagcucgacggcgucgugugcaccgagaucgaccccaagcuggacaacuacuacaagaaggacaacagcuacuucacggagcagccgaucgaccuggugcccaaccagcccuaccccaacgccuccuucgacaacuucaaguucgucugcgacaacaucaaguucgccgacgaccucaaccagcugaccggguacaagaagccggccagccgcgagcugaaggugaccuucuuccccgaccucaacggcgacguggucgcgaucgacuacaagcacuacacccccuccuucaagaagggcgccaagcugcugcacaagcccaucguguggcacgugaacaacgccacgaacaaggccaccuacaagccgaacaccuggugcauccggugccucuggagcaccaagcccgucgagacguccaacagcuucgacgugcugaaguccgaggacgcgcaggggauggacaaccuggccugcgaggaccucaagcccgugagcgaggaggucguggagaaccccaccauccagaaggacgugcuggagugcaacgucaagaccaccgagguggugggcgacaucauccugaagccggccaacaacucccucaagaucacggaggaggucgggcacaccgaccugauggccgccuacguggacaacagcucccugaccaucaagaagcccaacgagcucagccgcgugcugggccugaagacccucgcgacgcacgggcuggccgccgucaacuccgugcccugggacaccaucgccaacuacgccaagccguuccugaacaagguggucagcaccaccacgaacaucgugacccgcugccucaaccgggugugcaccaacuacaugcccuacuucuucacccugcugcuccagcugugcaccuucacgcgcuccaccaacagccggaucaaggcguccaugcccaccaccaucgccaagaacacggucaagagcgugggcaaguucugccuggaggccagcuucaacuaccucaagucccccaacuucagcaagcuggugaacaucaucaucugguuccugcuccuguccgucugccugggcagccucaucuacuccaccgccgcccugggggugcugaugagcaaccucggcaugccguccuacugcaccggguaccgcgagggcuaccugaacagcaccaacgugacgaucgcgaccuacugcaccggcuccauccccugcagcgucugccuguccgggcucgacagccuggacaccuaccccucccuggagacgauccagaucaccaucagcuccuucaagugggaccucaccgccuucggccugguggccgagugguuccuggccuacauccucuucacccgguucuucuacgugcuggggcuggccgcgaucaugcagcucuucuucagcuacuucgccguccacuucaucuccaacagcuggcugauguggcugaucaucaaccuggugcagauggcccccaucuccgccauggugcgcauguacaucuucuucgcgagcuucuacuacgucuggaagagcuacgugcacguggucgacggcugcaacuccagcacgugcaugaugugcuacaagcggaaccgcgccacccggguggagugcaccaccaucgucaacggggugcgccgguccuucuacguguacgccaacggcggcaagggguucugcaagcuccacaacuggaacugcgucaacugcgacacguucugcgccggcagcaccuucaucuccgacgagguggcccgcgaccugagccugcaguucaagcggccgaucaaccccaccgaccaguccagcuacaucguggacuccgucaccgugaagaacgggagcauccaccucuacuucgacaaggcgggccagaagacguacgagcgccacucccugagccacuucgugaaccuggacaaccuccgggccaacaacaccaaggggucccugcccaucaacgucaucguguucgacggcaagagcaagugcgaggaguccagcgccaaguccgccagcguguacuacucccagcugaugugccagcccauccuccugcuggaccaggcccucgucagcgacgugggcgacagcgcggagguggccgucaagauguucgacgccuacgugaacaccuucuccagcaccuucaacgugccgauggagaagcugaagacgcuggucgccaccgccgaggcggagcucgccaagaacgugucccuggacaacgugcugagcaccuucaucuccgccgcccgccagggguucgucgacagcgacguggagaccaaggacguggucgagugccucaagcugucccaccagagcgacaucgaggugacgggcgacuccugcaacaacuacaugcugaccuacaacaagguggagaacaugaccccccgggaccucggggcgugcaucgacugcagcgcccgccacaucaacgcccaggucgccaagucccacaacaucgcccugaucuggaacgugaaggacuucaugagccuguccgagcagcuccggaagcagauccgcagcgcggccaagaagaacaaccugcccuucaagcugaccugcgccacgacccgccagguggucaacguggugaccaccaagaucgcccucaagggcggguga

SEQ ID NO: 18239 - RNA, 5841 nt, Artificial Sequence
  SARS-CoV-2__MT385454.1__non-structural protein 3 (NSP3) CDS gc
auggcccccaccaaggugaccuucggcgacgacacggucaucgaggugcagggguacaagagcgugaacaucaccuucgagcuggacgagcgcaucgacaagguccucaacgagaagugcuccgccuacaccguggagcugggcaccgaggugaacgaguucgcgugcgucguggccgacgccgugaucaagacgcugcagccggucagcgagcuccugaccccccuggggaucgaccucgacgagugguccauggccaccuacuaccuguucgacgagagcggcgaguucaagcuggccucccacauguacugcagcuucuacccccccgacgaggacgaggaggagggggacugcgaggaggaggaguucgagccguccacccaguacgaguacggcacggaggacgacuaccagggcaagccccucgaguucggggcgaccagcgccgcccugcagcccgaggaggagcaggaggaggacuggcuggacgacgacucccagcagaccgugggccagcaggacgggagcgaggacaaccagaccacgaccauccagaccaucguggagguccagccccagcucgagauggagcugaccccgguggugcagacgaucgaggucaacuccuucagcggcuaccugaagcucaccgacaacguguacaucaagaacgccgacaucguggaggaggcgaagaaggucaagcccaccgugguggucaacgccgccaacguguaccugaagcacgggggcggcguggccggggcccugaacaaggcgaccaacaacgccaugcaggucgaguccgacgacuacaucgccacgaacggcccccucaagguggggggcagcugcguccuguccggccacaaccuggccaagcacugccuccacgugguggggcccaacgucaacaagggcgaggacauccagcugcugaagagcgccuacgagaacuucaaccagcacgaggugcuccuggcgccgcugcucuccgccgggaucuucggcgccgaccccauccacagccugcgggugugcgucgacaccgugcgcaccaacguguaccuggccgucuucgacaagaaccucuacgacaagcugguguccagcuuccuggagaugaagagcgagaagcagguggagcagaagaucgccgagauccccaaggaggaggucaagcccuucaucaccgaguccaagccgagcguggagcaggacgacaagaagaucaaggcgugcguggaggaggucacgaccacccucgaggagaccaaguuccugacggagaaccugcuccuguacaucgacaucaacgggaaccugcaccccgacuccgccacccucgugagcgacaucgacaucaccuuccugaagaaggacgcccccuacaucgugggcgacgucgugcaggagggcgugcugaccgccgucgugauccccacgaagaaggccgggggcaccaccgagaugcucgcgaaggcccugcggaaggugccgaccgacaacuacaucacgaccuaccccgggcagggccugaacggguacaccgucgaggaggccaagaccgugcucaagaagugcaaguccgccuucuacauccugcccagcaucaucuccaacgagaagcaggagauccugggcaccgugagcuggaaccuccgcgagaugcuggcgcacgccgaggagacgcggaagcugaugcccgucugcguggagaccaaggccaucguguccaccauccagcgcaaguacaagggcaucaagauccaggagggggucguggacuacggcgcccgguucuacuucuacaccagcaagacgaccguggccucccugaucaacacccucaacgaccugaacgagacccuggucacgaugccgcucggguacgugacccacggccugaaccuggaggaggcggcccgcuacaugcggagccucaaggugcccgccaccgucuccgugagcucccccgacgccgugaccgccuacaacggguaccugacgagcuccagcaagacccccgaggagcacuucaucgagaccaucucccuggcgggcagcuacaaggacuggagcuacuccggccagagcacccagcucgggaucgaguuccugaagcgcggcgacaaguccgucuacuacacgagcaacccgaccaccuuccaccuggacggggaggugaucaccuucgacaaccucaagacgcugcugucccuccgggaggugcgcaccaucaaggucuucaccaccguggacaacaucaaccugcacacgcagguggucgacaugagcaugaccuacggccagcaguucggccccaccuaccuggacggggccgacgugaccaagaucaagccccacaacucccacgagggcaagacguucuacgugcucccgaacgacgacacccugcgggucgaggccuucgaguacuaccacaccaccgaccccagcuuccuggggcgcuacauguccgcccucaaccacacgaagaaguggaaguacccccaggugaacggccugaccagcaucaagugggccgacaacaacugcuaccuggcgaccgcccuccugacccugcagcagaucgagcucaaguucaaccccccggcccugcaggacgccuacuaccgggcgcgcgccggggaggccgccaacuucugcgcccugauccucgcguacugcaacaagacggugggcgagcugggcgacguccgggagaccauguccuaccuguuccagcacgccaaccucgacagcugcaagcgcgugcugaacgucgugugcaagaccugcgggcagcagcagaccacccugaagggcguggaggccgucauguacauggggacgcucuccuacgagcaguucaagaagggcgugcagauccccugcaccugcgggaagcaggccaccaaguaccuggugcagcaggagagccccuucgucaugauguccgcccccccggcgcaguacgagcugaagcacggcaccuucacgugcgccagcgaguacaccggcaacuaccagugcgggcacuacaagcacaucaccuccaaggagacccucuacugcaucgacggcgcccugcugacgaagagcagcgaguacaaggggcccaucaccgacguguucuacaaggagaacuccuacaccaccacgaucaagcccgugaccuacaagcucgacggcgucgugugcaccgagaucgaccccaagcuggacaacuacuacaagaaggacaacagcuacuucaccgagcagccgaucgaccuggugcccaaccagcccuaccccaacgccuccuucgacaacuucaaguucgucugcgacaacaucaaguucgccgacgaccucaaccagcugacgggguacaagaagccggcgagccgggagcugaaggugaccuucuuccccgaccucaacggcgacguggucgccaucgacuacaagcacuacacccccuccuucaagaagggcgccaagcugcugcacaagcccaucguguggcacgugaacaacgccaccaacaaggcgacguacaagccgaacaccuggugcauccgcugccucuggagcaccaagcccgucgagaccuccaacagcuucgacgugcugaaguccgaggacgcccaggggauggacaaccuggccugcgaggaccucaagcccgugagcgaggaggucguggagaaccccacgauccagaaggacgugcuggagugcaacgucaagaccaccgagguggugggcgacaucauccugaagccggccaacaacucccucaagaucaccgaggaggucgggcacacggaccugauggccgcguacguggacaacagcucccugaccaucaagaagcccaacgagcucagccgggugcugggccugaagacccucgccacccacgggcuggccgccgucaacuccgugcccugggacacgaucgccaacuacgcgaagccguuccugaacaagguggucagcaccaccaccaacaucgugacgcgcugccucaaccgcgugugcaccaacuacaugcccuacuucuucacccugcugcuccagcugugcaccuucacccgguccacgaacagccgcaucaaggccuccaugcccaccaccaucgccaagaacaccgucaagagcgugggcaaguucugccuggaggccagcuucaacuaccucaagucccccaacuucagcaagcugaucaacaucaucaucugguuccugcuccuguccgugugccugggcagccucaucuacuccacggccgcgcuggggguccugaugagcaaccucggcaugccguccuacugcaccggguaccgggagggcuaccugaacagcaccaacgugaccaucgccacguacugcaccggcuccauccccugcagcgugugccuguccgggcucgacagccuggacaccuaccccucccuggagaccauccagaucacgaucagcuccuucaagugggaccucaccgccuucggccuggucgccgagugguuccuggccuacauccucuucacccgcuucuucuacgugcuggggcuggcggccaucaugcagcucuucuucagcuacuucgccgugcacuucaucuccaacagcuggcugauguggcugaucaucaaccugguccagauggcccccaucuccgcgauggugcggauguacaucuucuucgccagcuucuacuacguguggaagagcuacguccacgugguggacggcugcaacuccagcaccugcaugaugugcuacaagcgcaaccgggccacgcgcgucgagugcaccaccaucgugaacgggguccggcgcuccuucuacguguacgccaacggcggcaagggguucugcaagcuccacaacuggaacugcgugaacugcgacaccuucugcgccggcagcacguucaucuccgacgaggucgcgcgggaccugagccugcaguucaagcgcccgaucaaccccaccgaccaguccagcuacaucguggacuccgugaccgucaagaacgggagcauccaccucuacuucgacaaggccggccagaagaccuacgagcggcacucccugagccacuucgugaaccuggacaaccuccgcgccaacaacacgaaggggucccugcccaucaacgugaucgucuucgacggcaagagcaagugcgaggaguccagcgccaaguccgccagcguguacuacucccagcugaugugccagcccauccuccugcuggaccaggcgcucgugagcgacgucggcgacagcgccgagguggccgugaagauguucgacgccuacgucaacaccuucuccagcaccuucaacgugccgauggagaagcugaagacccugguggccacggcggaggccgagcucgccaagaacgucucccuggacaacgugcugagcaccuucaucuccgccgcgcggcagggguucguggacagcgacgucgagaccaaggacgugguggagugccucaagcugucccaccagagcgacaucgaggucaccggcgacuccugcaacaacuacaugcugacguacaacaagguggagaacaugaccccccgcgaccucggggccugcaucgacugcagcgcccggcacaucaacgcccagguggccaagucccacaacaucgcgcugaucuggaacgucaaggacuucaugagccuguccgagcagcuccgcaagcagauccggagcgccgccaagaagaacaaccugcccuucaagcugaccugcgccaccacgcgccagguggugaacgucgugaccaccaagaucgcccucaagggcgggaagaucguguga

SEQ ID NO: 18240 - RNA, 5841 nt, Artificial Sequence
  SARS-CoV-2__MT385461.1__non-structural protein 3 (NSP3) CDS gc
auggcccccaccaaggugaccuucggcgacgacacggucaucgaggugcagggguacaagagcgugaacaucaccuucgagcuggacgagcgcaucgacaagguccucaacgagaagugcuccgccuacaccguggagcugggcaccgaggugaacgaguucgcgugcgucguggccgacgccgugaucaagacgcugcagccggucagcgagcuccugaccccccuggggaucgaccucgacgagugguccauggccaccuacuaccuguucgacgagagcggcgaguucaagcuggccucccacauguacugcagcuucuacccccccgacgaggacgaggaggagggggacugcgaggaggaggaguucgagccguccacccaguacgaguacggcacggaggacgacuaccagggcaagccccucgaguucggggcgaccagcgccgcccugcagcccgaggaggagcaggaggaggacuggcuggacgacgacucccagcagaccgugggccagcaggacgggagcgaggacaaccagaccacgaccauccagaccaucguggagguccagccccagcucgagauggagcugaccccgguggugcagacgaucgaggucaacuccuucagcggcuaccugaagcucaccgacaacguguacaucaagaacgccgacaucguggaggaggcgaagaaggucaagcccaccgugguggucaacgccgccaacguguaccugaagcacgggggcggcguggccggggcccugaacaaggcgaccaacaacgccaugcaggucgaguccgacgacuacaucgccacgaacggcccccucaagguggggggcagcugcguccuguccggccacaaccuggccaagcacugccuccacgugguggggcccaacgucaacaagggcgaggacauccagcugcugaagagcgccuacgagaacuucaaccagcacgaggugcuccuggcgccgcugcucuccgccgggaucuucggcgccgaccccauccacagccugcgggugugcgucgacaccgugcgcaccaacguguaccuggccgucuucgacaagaaccucuacgacaagcugguguccagcuuccuggagaugaagagcgagaagcagguggagcagaagaucgccgagauccccaaggaggaggucaagcccuucaucaccgaguccaagccgagcguggagcagcggaagcaggacgacaagaagaucaaggcgugcguggaggaggucacgaccacccucgaggagaccaaguuccugacggagaaccugcuccuguacaucgacaucaacgggaaccugcaccccgacuccgccacccucgugagcgacaucgacaucaccuuccugaagaaggacgcccccuacaucgugggcgacgucgugcaggagggcgugcugaccgccgucgugauccccacgaagaaggccgggggcaccaccgagaugcucgcgaaggcccugcgcaaggugccgaccgacaacuacaucacgaccuaccccgggcagggccugaacggguacaccgucgaggaggccaagaccgugcucaagaagugcaaguccgccuucuacauccugcccagcaucaucuccaacgagaagcaggagauccugggcaccgugagcuggaaccuccgggagaugcuggcgcacgccgaggagacgcgcaagcugaugcccgucugcguggagaccaaggccaucguguccaccauccagcggaaguacaagggcaucaagauccaggagggggucguggacuacggcgcccgcuucuacuucuacaccagcaagacgaccguggccucccugaucaacacccucaacgaccugaacgagacccuggucacgaugccgcucggguacgugacccacggccugaaccuggaggaggcggcccgguacaugcgcagccucaaggugcccgccaccgucuccgugagcucccccgacgccgugaccgccuacaacggguaccugacgagcuccagcaagacccccgaggagcacuucaucgagaccaucucccuggcgggcagcuacaaggacuggagcuacuccggccagagcacccagcucgggaucgaguuccugaagcggggcgacaaguccgucuacuacacgagcaacccgaccaccuuccaccuggacggggaggugaucaccuucgacaaccucaagacgcugcugucccuccgcgaggugcggaccaucaaggucuucaccaccguggacaacaucaaccugcacacgcagguggucgacaugagcaugaccuacggccagcaguucggccccaccuaccuggacggggccgacgugaccaagaucaagccccacaacucccacgagggcaagacguucuacgugcucccgaacgacgacacccugcgcgucgaggccuucgaguacuaccacaccaccgaccccagcuuccuggggcgguacauguccgcccucaaccacacgaagaaguggaaguacccccaggugaacggccugaccagcaucaagugggccgacaacaacugcuaccuggcgaccgcccuccugacccugcagcagaucgagcucaaguucaaccccccggcccugcaggacgccuacuaccgcgcgcgggccggggaggccgccaacuucugcgcccugauccucgcguacugcaacaagacggugggcgagcugggcgacguccgcgagaccauguccuaccuguuccagcacgccaaccucgacagcugcaagcgggugcugaacgucgugugcaagaccugcgggcagcagcagaccacccugaagggcguggaggccgucauguacauggggacgcucuccuacgagcaguucaagaagggcgugcagauccccugcaccugcgggaagcaggccaccaaguaccuggugcagcaggagagccccuucgucaugauguccgcccccccggcgcaguacgagcugaagcacggcaccuucacgugcgccagcgaguacaccggcaacuaccagugcgggcacuacaagcacaucaccuccaaggagacccucuacugcaucgacggcgcccugcugacgaagagcagcgaguacaaggggcccaucaccgacguguucuacaaggagaacuccuacaccaccacgaucaagcccgugaccuacaagcucgacggcgucgugugcaccgagaucgaccccaagcuggacaacuacuacaagaaggacaacagcuacuucaccgagcagccgaucgaccuggugcccaaccagcccuaccccaacgccuccuucgacaacuucaaguucgucugcgacaacaucaaguucgccgacgaccucaaccagcugacgggguacaagaagccggcgagccgcgagcugaaggugaccuucuuccccgaccucaacggcgacguggucgccaucgacuacaagcacuacacccccuccuucaagaagggcgccaagcugcugcacaagcccaucguguggcacgugaacaacgccaccaacaaggcgacguacaagccgaacaccuggugcauccggugccucuggagcaccaagcccgucgagaccuccaacagcuucgacgugcugaaguccgaggacgcccaggggauggacaaccuggccugcgaggaccucaagcccgugagcgaggaggucguggagaaccccacgauccagaaggacgugcuggagugcaacgucaagaccaccgagguggugggcgacaucauccugaagccggccaacaacucccucaagaucaccgaggaggucgggcacacggaccugauggccgcguacguggacaacagcucccugaccaucaagaagcccaacgagcucagccgcgugcugggccugaagacccucgccacccacgggcuggccgccgucaacuccgugcccugggacacgaucgccaacuacgcgaagccguuccugaacaagguggucagcaccaccaccaacaucgugacgcgcugccucaaccgggugugcaccaacuacaugcccuacuucuucacccugcugcuccagcugugcaccuucacccgcuccacgaacagccggaucaaggccuccaugcccaccaccaucgccaagaacaccgucaagagcgugggcaaguucugccuggaggccagcuucaacuaccucaagucccccaacuucagcaagcugaucaacaucaucaucugguuccugcuccuguccgugugccugggcagccucaucuacuccacggccgcgcuggggguccugaugagcaaccucggcaugccguccuacugcaccggguaccgcgagggcuaccugaacagcaccaacgugaccaucgccacguacugcaccggcuccauccccugcagcgugugccuguccgggcucgacagccuggacaccuaccccucccuggagaccauccagaucacgaucagcuccuucaagugggaccucaccgccuucggccuggucgccgagugguuccuggccuacauccucuucacccgguucuucuacgugcuggggcuggcggccaucaugcagcucuucuucagcuacuucgccgugcacuucaucuccaacagcuggcugauguggcugaucaucaaccugguccagauggcccccaucuccgcgauggugcgcauguacaucuucuucgccagcuucuacuacguguggaagagcuacguccacgugguggacggcugcaacuccagcaccugcaugaugugcuacaagcggaaccgcgccacgcgggucgagugcaccaccaucgugaacgggguccgccgguccuucuacguguacgccaacggcggcaagggguucugcaagcuccacaacuggaacugcgugaacugcgacaccuucugcgccggcagcacguucaucuccgacgaggucgcgcgcgaccugagccugcaguucaagcggccgaucaaccccaccgaccaguccagcuacaucguggacuccgugaccgucaagaacgggagcauccaccucuacuucgacaaggccggccagaagaccuacgagcgccacucccugagccacuucgugaaccuggacaaccuccgggccaacaacacgaaggggucccugcccaucaacgugaucgucuucgacggcgagagcaagugcgaggaguccagcgccaaguccgccagcguguacuacucccagcugaugugccagcccauccuccugcuggaccaggcgcucgugagcgacgucggcgacagcgccgagguggccgugaagauguucgacgccuacgucaacaccuucuccagcaccuucaacgugccgauggagaagcugaagacccugguggccacggcggaggccgagcucgccaagaacgucucccuggacaacgugcugagcaccuucaucuccgccgcgcgccagggguucguggacagcgacgucgagaccaaggacgugguggagugccucaagcugucccaccagagcgacaucgaggucaccggcgacuccugcaacaacuacaugcugacguacaacaagguggagaacaugaccccccgggaccucggggccugcaucgacugcagcgcccgccacaucaacgcccagguggccaagucccacaacaucgcgcugaucuggaacgucaaggacuucaugagccuguccgagcagcuccggaagcagauccgcagcgccgccaagaagaacaaccugcccuucaagcugaccugcgccaccacgcgccagguggugaacgucgugaccaccaagaucgcccucaagggcggguga

SEQ ID NO: 18241 - RNA, 5841 nt, Artificial Sequence
  SARS-CoV-2__MT385465.1__non-structural protein 3 (NSP3) CDS gc
auggcccccaccaaggugaccuucggcgacgacacggucaucgaggugcagggguacaagagcgugaacaucaccuucgagcuggacgagcgcaucgacaagguccucaacgagaagugcuccgccuacaccguggagcugggcaccgaggugaacgaguucgcgugcgucguggccgacgccgugaucaagacgcugcagccggucagcgagcuccugaccccccuggggaucgaccucgacgagugguccauggccaccuacuaccuguucgacgagagcggcgaguucaagcuggccucccacauguacugcagcuucuacccccccgacgaggacgaggaggagggggacugcgaggaggaggaguucgagccguccacccaguacgaguacggcacggaggacgacuaccagggcaagccccucgaguucggggcgaccagcgccgcccugcagcccgaggaggagcaggaggaggacuggcuggacgacgacucccagcagaccgugggccagcaggacgggagcgaggacaaccagaccacgaccauccagaccaucguggagguccagccccagcucgagauggagcugaccccgguggugcagacgaucgaggucaacuccuucagcggcuaccugaagcucaccgacaacguguacaucaagaacgccgacaucguggaggaggcgaagaaggucaagcccaccgugguggucaacgccgccaacguguaccugaagcacgggggcggcguggccggggcccugaacaaggcgaccaacaacgccaugcaggucgaguccgacgacuacaucgccacgaacggcccccucaagguggggggcagcugcguccuguccggccacaaccuggccaagcacugccuccacgugguggggcccaacgucaacaagggcgaggacauccagcugcugaagagcgccuacgagaacuucaaccagcacgaggugcuccuggcgccgcugcucuccgccgggaucuucggcgccgaccccauccacagccugcgggugugcgucgacaccgugcgcaccaacguguaccuggccgucuucgacaagaaccucuacgacaagcugguguccagcuuccuggagaugaagagcgagaagcagguggagcagaagaucgccgagauccccaaggaggaggucaagcccuucaucaccgaguccaagccgagcguggagcagcggaagcaggacgacaagaagaucaaggcgugcguggaggaggucacgaccacccucgaggagaccaaguuccugacggagaaccugcuccuguacaucgacaucaacgggaaccugcaccccgacuccgccacccucgugagcgacaucgacaucaccuuccugaagaaggacgcccccuacaucgugggcgacgucgugcaggagggcgugcugaccgccgucgugauccccacgaagaaggccgggggcaccaccgagaugcucgcgaaggcccugcgcaaggugccgaccgacaacuacaucacgaccuaccccgggcagggccugaacggguacaccgucgaggaggccaagaccgugcucaagaagugcaaguccgccuucuacauccugcccagcaucaucuccaacgagaagcaggagauccugggcaccgugagcuggaaccuccgggagaugcuggcgcacgccgaggagacgcgcaagcugaugcccgucugcguggagaccaaggccaucguguccaccauccagcggaaguacaagggcaucaagauccaggagggggucguggacuacggcgcccgcuucuacuucuacaccagcaagacgaccguggccucccugaucaacacccucaacgaccugaacgagacccuggucacgaugccgcucggguacgugacccacggccugaaccuggaggaggcggcccgguacaugcgcagccucaaggugcccgccaccgucuccgugagcucccccgacgccgugaccgccuacaacggguaccugacgagcuccagcaagacccccgaggagcacuucaucgagaccaucucccuggcgggcagcuacaaggacuggagcuacuccggccagagcacccagcucgggaucgaguuccugaagcggggcgacaaguccgucuacuacacgagcaacccgaccaccuuccaccuggacggggaggugaucaccuucgacaaccucaagacgcugcugucccuccgcgaggugcggaccaucaaggucuucaccaccguggacaacaucaaccugcacacgcagguggucgacaugagcaugaccuacggccagcaguucggccccaccuaccuggacggggccgacgugaccaagaucaagccccacaacucccacgagggcaagacguucuacgugcucccgaacgacgacacccugcgcgucgaggccuucgaguacuaccacaccaccgaccccagcuuccuggggcgguacauguccgcccucaaccacacgaagaaguggaaguacccccaggugaacggccugaccagcaucaagugggccgacaacaacugcuaccuggcgaccgcccuccugacccugcagcagaucgagcucaaguucaaccccccggcccugcaggacgccuacuaccgcgcgcgggccggggaggccgccaacuucugcgcccugauccucgcguacugcaacaagacggugggcgagcugggcgacguccgcgagaccauguccuaccuguuccagcacgccaaccucgacagcugcaagcgggugcugaacgucgugugcaagaccugcgggcagcagcagaccacccugaagggcguggaggccgucauguacauggggacgcucuccuacgagcaguucaagaagggcgugcagauccccugcaccugcgggaagcaggccaccaaguaccuggugcagcaggagagccccuucgucaugauguccgcccccccggcgcaguacgagcugaagcacggcaccuucacgugcgccagcgaguacaccggcaacuaccagugcgggcacuacaagcacaucaccuccaaggagacccucuacugcaucgacggcgcccugcugacgaagagcagcgaguacaaggggcccaucaccgacguguucuacaaggagaacuccuacaccaccacgaucaagcccgugaccuacaagcucgacggcgucgugugcaccgagaucgaccccaagcuggacaacuacuacaagaaggacaacagcuacuucaccgagcagccgaucgaccuggugcccaaccagcccuaccccaacgccuccuucgacaacuucaaguucgucugcgacaacaucaaguucgccgacgaccucaaccagcugacgggguacaagaagccggcgagccgcgagcugaaggugaccuucuuccccgaccucaacggcgacguggucgccaucgacuacaagcacuacacccccuccuucaagaagggcgccaagcugcugcacaagcccaucguguggcacgugaacaacgccaccaacaaggcgacguacaagccgaacaccuggugcauccggugccucuggagcaccaagcccgucgagaccuccaacagcuucgacgugcugaaguccgaggacgcccaggggauggacaaccuggccugcgaggaccucaagcccgugagcgaggaggucguggagaaccccacgauccagaaggacgugcuggagugcaacgucaagaccaccgagguggugggcgacaucauccugaagccggccaacaacucccucaagaucaccgaggaggucgggcacacggaccugauggccgcguacguggacaacagcucccugaccaucaagaagcccaacgagcucagccgcgugcugggccugaagacccucgccacccacgggcuggccgccgucaacuccgugcccugggacacgaucgccaacuacgcgaagccguuccugaacaagguggucagcaccaccaccaacaucgugacgcgcugccucaaccgggugugcaccaacuacaugcccuacuucuucacccugcugcuccagcugugcaccuucacccgcuccacgaacagccggaucaaggccuccaugcccaccaccaucgccaagaacaccgucaagagcgugggcaaguucugccuggaggccagcuucaacuaccucaagucccccaacuucagcaagcugaucaacaucaucaucugguuccugcuccuguccgugugccugggcagccucaucuacuccacggccgcgcuggggguccugaugagcaaccucggcaugccguccuacugcaccggguaccgcgagggcuaccugaacuucaccaacgugaccaucgccacguacugcaccggcagcauccccugcuccgugugccugagcgggcucgacucccuggacaccuaccccagccuggagaccauccagaucacgaucuccagcuucaagugggaccucaccgccuucggccuggucgccgagugguuccuggccuacauccucuucacccgguucuucuacgugcuggggcuggcggccaucaugcagcucuucuucuccuacuucgccgugcacuucaucagcaacuccuggcugauguggcugaucaucaaccugguccagauggcccccaucagcgcgauggugcgcauguacaucuucuucgccuccuucuacuacguguggaagagcuacguccacgugguggacggcugcaacagcuccaccugcaugaugugcuacaagcggaaccgcgccacgcgggucgagugcaccaccaucgugaacgggguccgccggagcuucuacguguacgccaacggcggcaagggguucugcaagcuccacaacuggaacugcgugaacugcgacaccuucugcgccggcuccacguucaucagcgacgaggucgcgcgcgaccugucccugcaguucaagcggccgaucaaccccaccgaccagagcuccuacaucguggacagcgugaccgucaagaacggguccauccaccucuacuucgacaaggccggccagaagaccuacgagcgccacagccugucccacuucgugaaccuggacaaccuccgggccaacaacacgaaggggagccugcccaucaacgugaucgucuucgacggcaaguccaagugcgaggagagcuccgccaagagcgccuccguguacuacagccagcugaugugccagcccauccuccugcuggaccaggcgcucguguccgacgucggcgacagcgccgagguggccgugaagauguucgacgccuacgucaacaccuucagcuccaccuucaacgugccgauggagaagcugaagacccugguggccacggcggaggccgagcucgccaagaacgucagccuggacaacgugcuguccaccuucaucagcgccgcgcgccagggguucguggacuccgacgucgagaccaaggacgugguggagugccucaagcugagccaccaguccgacaucgaggucaccggcgacagcugcaacaacuacaugcugacguacaacaagguggagaacaugaccccccgggaccucggggccugcaucgacugcuccgcccgccacaucaacgcccagguggccaagagccacaacaucgcgcugaucuggaacgucaaggacuucaugucccugagcgagcagcuccggaagcagauccgcuccgccgccaagaagaacaaccugcccuucaagcugaccugcgccaccacgcgccagguggugaacgucgugaccaccaagaucgcccucaagggcggguga

SEQ ID NO: 18242 - RNA, 5841 nt, Artificial Sequence
  SARS-CoV-2__MT385471.1__non-structural protein 3 (NSP3) CDS gc
auggcccccaccaaggugaccuucggcgacgacacggucaucgaggugcagggguacaagagcgugaacaucaccuucgagcuggacgagcgcaucgacaagguccucaacgagaagugcuccgccuacaccguggagcugggcaccgaggugaacgaguucgcgugcgucguggccgacgccgugaucaagacgcugcagccggucagcgagcuccugaccccccuggggaucgaccucgacgagugguccauggccaccuacuaccuguucgacgagagcggcgaguucaagcuggccucccacauguacugcagcuucuacccccccgacgaggacgaggaggagggggacugcgaggaggaggaguucgagccguccacccaguacgaguacggcacggaggacgacuaccagggcaagccccucgaguucggggcgaccagcgccgcccugcagcccgaggaggagcaggaggaggacuggcuggacgacgacucccagcagaccgugggccagcaggacgggagcgaggacaaccagaccacgaccauccagaccaucguggagguccagccccagcucgagauggagcugaccccgguggugcagacgaucgaggucaacuccuucagcggcuaccugaagcucaccgacaacguguacaucaagaacgccgacaucguggaggaggcgaagaaggucaagcccaccgugguggucaacgccgccaacguguaccugaagcacgggggcggcguggccggggcccugaacaaggcgaccaacaacgccaugcaggucgaguccgacgacuacaucgccacgaacggcccccucaagguggggggcagcugcguccuguccggccacaaccuggccaagcacugccuccacgugguggggcccaacgucaacaagggcgaggacauccagcugcugaagagcgccuacgagaacuucaaccagcacgaggugcuccuggcgccgcugcucuccgccgggaucuucggcgccgaccccauccacagccugcgggugugcgucgacaccgugcgcaccaacguguaccuggccgucuucgacaagaaccucuacgacaagcugguguccagcuuccuggagaugaagagcgagaagcagguggagcagaagaucgccgagauccccaaggaggaggucaagcccuucaucaccgaguccaagccgagcguggagcagcggaagcaggacgacaagaagaucaaggcgugcguggaggaggucacgaccacccucgaggagaccaaguuccugacggagaaccugcuccuguacaucgacaucaacgggaaccugcaccccgacuccgccacccucgugagcgacaucgacaucaccuuccugaagaaggacgcccccuacaucgugggcgacgucgugcaggagggcgugcugaccgccgucgugauccccacgaagaaggccgggggcaccaccgagaugcucgcgaaggcccugcgcaaggugccgaccgacaacuacaucacgaccuaccccgggcagggccugaacggguacaccgucgaggaggccaagaccgugcucaagaagugcaaguccgccuucuacauccugcccagcaucaucuccaacgagaagcaggagauccugggcaccgugagcuggaaccuccgggagaugcuggcgcacgccgaggagacgcgcaagcugaugcccgucugcguggagaccaaggccaucguguccaccauccagcggaaguacaagggcaucaagauccaggagggggucguggacuacggcgcccgcuucuacuucuacaccagcaagacgaccguggccucccugaucaacacccucaacgaccugaacgagacccuggucacgaugccgcucggguacgugacccacggccugaaccuggaggaggcggcccgguacaugcgcagccucaaggugcccgccaccgucuccgugagcucccccgacgccgugaccgccuacaacggguaccugacgagcuccagcaagacccccgaggagcacuucaucgagaccaucucccuggcgggcagcuacaaggacuggagcuacuccggccagagcacccagcucgggaucgaguuccugaagcggggcgacaaguccgucuacuacacgagcaacccgaccaccuuccaccuggacggggaggugaucaccuucgacaaccucaagacgcugcugucccuccgcgaggugcggaccaucaaggucuucaccaccguggacaacaucaaccugcacacgcagguggucgacaugagcaugaccuacggccagcaguucggccccaccuaccuggacggggccgacgugaccaagaucaagccccacaacucccacgagggcaagacguucuacgugcucccgaacgacgacacccugcgcgucgaggccuucgaguacuaccacaccaccgaccccagcuuccuggggcgguacauguccgcccucaaccacacgaagaaguggaaguacccccaggugaacggccugaccagcaucaagugggccgacaacaacugcuaccuggcgaccgcccuccugacccugcagcagaucgagcucaaguucaaccccccggcccugcaggacgccuacuaccgcgcgcgggccggggaggccgccaacuucugcgcccugauccucgcguacugcaacaagacggugggcgagcugggcgacguccgcgagaccauguccuaccuguuccagcacgccaaccucgacagcugcaagcgggugcugaacgucgugugcaagaccugcgggcagcagcagaccacccugaagggcguggaggccgucauguacauggggacgcucuccuacgagcaguucaagaagggcgugcagauccccugcaccugcgggaagcaggccaccaaguaccuggugcagcaggagagccccuucgucaugauguccgcccccccggcgcaguacgagcugaagcacggcaccuucacgugcgccagcgaguacaccggcaacuaccagugcgggcacuacaagcacaucaccuccaaggagacccucuacugcaucgacggcgcccugcugacgaagagcagcgaguacaaggggcccaucaccgacguguucuacaaggagaacuccuacaccaccacgaucaagcccgugaccuacaagcucgacggcgucgugugcaccgagaucgaccccaagcuggacaacuacuacaagaaggacaacagcuacuucaccgagcagccgaucgaccuggugcccaaccagcccuaccccaacgccuccuucgacaacuucaaguucgucugcgacaacaucaaguucgccgacgaccucaaccagcugacgggguacaagaagccggcgagccgcgagcugaaggugaccuucuuccccgaccucaacggcgacguggucgccaucgacuacaagcacuacacccccuccuucaagaagggcgccaagcugcugcacaagcccaucguguggcacgugaacaacgccaccaacaaggcgacguacaagccgaacaccuggugcauccggugccucuggagcaccaagcccgucgagaccuccaacagcuucgacgugcugaaguccgaggacgcccaggggauggacaaccuggccugcgaggaccucaagcccgugagcgaggaggucguggagaaccccacgauccagaaggacgugcuggagugcaacgucaagaccaccgagguggugggcgacaucauccugaagccggccaacaacucccucaagaucaccgaggaggucgggcacacggaccugauggccgcguacguggacaacagcucccugaccaucaagaagcccaacgagcucagccgcgugcugggccugaagacccucgccacccacgggcuggccgccgucaacuccgugcccugggacacgaucgccaacuacgcgaagccguuccugaacaagguggucagcaccaccaccaacaucgugacgcgcugccucaaccgggugugcaccaacuacaugcccuacuucuucacccugcugcuccagcugugcaccuucacccgcuccacgaacagccggaucaaggccuccaugcccaccaccaucgccaagaacaccgucaagagcgugggcaaguucugccuggaggccagcuucaacuaccucaagucccccaacuucagcaagcugaucaacaucaucaucugguuccugcuccuguccgugugccugggcagccucaucuacuccacggccgcgcuggggguccugaugagcaaccucggcaugccguccuacugcaccggguaccgcgagggcuaccugaacagcaccaacgugaccaucgccacguacugcaccggcuccauccccugcagcgugugccuguccgggcucgacagccuggacaccuaccccucccuggagaccauccagaucacgaucagcuccuucaagugggaccucaccgccuucggccuggucgccgagugguuccuggccuacauccucuucacccgguucuucuacauccuggggcuggcggccaucaugcagcucuucuucagcuacuucgccgugcacuucaucuccaacagcuggcugauguggcugaucaucaaccuggugcagauggcccccaucuccgcgaugguccgcauguacaucuucuucgccagcuucuacuacguguggaagagcuacgugcacgucguggacggcugcaacuccagcaccugcaugaugugcuacaagcggaaccgcgccacgcggguggagugcaccaccaucgucaacggggugcgccgguccuucuacgucuacgccaacggcggcaagggguucugcaagcuccacaacuggaacugcgugaacugcgacaccuucugcgccggcagcacguucaucuccgacgagguggcgcgcgaccugagccugcaguucaagcggccgaucaaccccaccgaccaguccagcuacaucgucgacuccgugaccgugaagaacgggagcauccaccucuacuucgacaaggccggccagaagaccuacgagcgccacucccugagccacuucgucaaccuggacaaccuccgggccaacaacacgaaggggucccugcccaucaacgugaucguguucgacggcaagagcaagugcgaggaguccagcgccaaguccgccagcgucuacuacucccagcugaugugccagcccauccuccugcuggaccaggcgcucgugagcgacgugggcgacagcgccgaggucgccgugaagauguucgacgccuacgugaacaccuucuccagcaccuucaacgucccgauggagaagcugaagacccugguggccacggcggaggccgagcucgccaagaacgugucccuggacaacguccugagcaccuucaucuccgccgcgcgccagggguucguggacagcgacguggagaccaaggacgucguggagugccucaagcugucccaccagagcgacaucgaggugaccggcgacuccugcaacaacuacaugcugacguacaacaaggucgagaacaugaccccccgggaccucggggccugcaucgacugcagcgcccgccacaucaacgcccagguggccaagucccacaacaucgcgcugaucuggaacgugaaggacuucaugagccuguccgagcagcuccggaagcagauccgcagcgccgccaagaagaacaaccugcccuucaagcugaccugcgccaccacgcgccaggucgugaacguggucaccaccaagaucgcccucaagggcggguga

SEQ ID NO: 18243 - RNA, 5841 nt, Artificial Sequence
  SARS-CoV-2__MT375458.1__non-structural protein 3 (NSP3) CDS gc
auggcccccaccaaggugaccuucggcgacgacacggucaucgaggugcagggguacaagagcgugaacaucaccuucgagcuggacgagcgcaucgacaagguccucaacgagaagugcuccgccuacaccguggagcugggcaccgaggugaacgaguucgcgugcgucguggccgacgccgugaucaagacgcugcagccggucagcgagcuccugaccccccuggggaucgaccucgacgagugguccauggccaccuacuaccuguucgacgagagcggcgaguucaagcuggccucccacauguacugcagcuucuacccccccgacgaggacgaggaggagggggacugcgaggaggaggaguucgagccguccacccaguacgaguacggcacggaggacgacuaccagggcaagccccucgaguucggggcgaccagcgccgcccugcagcccgaggaggagcaggaggaggacuggcuggacgacgacucccagcagaccgugggccagcaggacgggagcgaggacaaccagaccacgaccauccagaccaucguggagguccagccccagcucgagauggagcugaccccgguggugcagacgaucgaggucaacuccuucagcggcuaccugaagcucaccgacaacguguacaucaagaacgccgacaucguggaggaggcgaagaaggucaagcccaccgugguggucaacgccgccaacguguaccugaagcacgggggcggcguggccggggcccugaacaaggcgaccaacaacgccaugcaggucgaguccgacgacuacaucgccacgaacggcccccucaagguggggggcagcugcguccuguccggccacaaccuggccaagcacugccuccacgugguggggcccaacgucaacaagggcgaggacauccagcugcugaagagcgccuacgagaacuucaaccagcacgaggugcuccuggcgccgcugcucuccgccgggaucuucggcgccgaccccauccacagccugcgggugugcgucgacaccgugcgcaccaacguguaccuggccgucuucgacaagaaccucuacgacaagcugguguccagcuuccuggagaugaagagcgagaagcagguggagcagaagaucgccgagauccccaaggaggaggucaagcccuucaucaccgaguccaagccgagcguggagcagcggaagcaggacgacaagaagaucaaggcgugcguggaggaggucacgaccacccucgaggagaccaaguuccugacggagaaccugcuccuguacaucgacaucaacgggaaccugcaccccgacuccgccacccucgugagcgacaucgacaucaccuuccugaagaaggacgcccccuacaucgugggcgacgucgugcaggagggcgugcugaccgccgucgugauccccacgaagaaggccgggggcaccaccgagaugcucgcgaaggcccugcgcaaggugccgaccgacaacuacaucacgaccuaccccgggcagggccugaacggguacaccgucgaggaggccaagaccgugcucaagaagugcaaguccgccuucuacauccugcccagcaucaucuccaacgagaagcaggagauccugggcaccgugagcuggaaccuccgggagaugcuggcgcacgccgaggagacgcgcaagcugaugcccgucugcguggagaccaaggccaucguguccaccauccagcggaaguacaagggcaucaagauccaggagggggucguggacuacggcgcccgcuucuacuucuacaccagcaagacgaccguggccucccugaucaacacccucaacgaccugaacgagacccuggucacgaugccgcucggguacgugacccacggccugaaccuggaggaggcggcccgguacaugcgcagccucaaggugcccgccaccgucuccgugagcucccccgacgccgugaccgccuacaacggguaccugacgagcuccagcaagacccccgaggagcacuucaucgagaccaucucccuggcgggcagcuacaaggacuggagcuacuccggccagagcacccagcucgggaucgaguuccugaagcggggcgacaaguccgucuacuacacgagcaacccgaccaccuuccaccuggacggggaggugaucaccuucgacaaccucaagacgcugcugucccuccgcgaggugcggaccaucaaggucuucaccaccguggacaacaucaaccugcacacgcagguggucgacaugagcaugaccuacggccagcaguucggccccaccuaccuggacggggccgacgugaccaagaucaagccccacaacucccacgagggcaagacguucuacgugcucccgaacgacgacacccugcgcgucgaggccuucgaguacuaccacaccaccgaccccagcuuccuggggcgguacauguccgcccucaaccacacgaagaaguggaaguacccccaggugaacggccugaccagcaucaagugggccgacaacaacugcuaccuggcgaccgcccuccugacccugcagcagaucgagcucaaguucaaccccccggcccugcaggacgccuacuaccgcgcgcgggccggggaggccgccaacuucugcgcccugauccucgcguacugcaacaagacggugggcgagcugggcgacguccgcgagaccauguccuaccuguuccagcacgccaaccucgacagcugcaagcgggugcugaacgucgugugcaagaccugcgggcagcagcagaccacccugaagggcguggaggccgucauguacauggggacgcucuccuacgagcaguucaagaagggcgugcagauccccugcaccugcgggaagcaggccaccaaguaccuggugcagcaggagagccccuucgucaugauguccgcccagcccgcgcaguacgagcugaagcacggcaccuucacgugcgccagcgaguacaccggcaacuaccagugcgggcacuacaagcacaucaccuccaaggagacccucuacugcaucgacggcgcccugcugacgaagagcagcgaguacaaggggccgaucaccgacguguucuacaaggagaacuccuacaccaccacgaucaagcccgugaccuacaagcucgacggcgucgugugcaccgagaucgaccccaagcuggacaacuacuacaagaaggacaacagcuacuucaccgagcagcccaucgaccuggugccgaaccagcccuaccccaacgccuccuucgacaacuucaaguucgucugcgacaacaucaaguucgccgacgaccucaaccagcugacgggguacaagaagcccgcgagccgcgagcugaaggugaccuucuucccggaccucaacggcgacguggucgccaucgacuacaagcacuacacccccuccuucaagaagggcgccaagcugcugcacaagcccaucguguggcacgugaacaacgccaccaacaaggcgacguacaagcccaacaccuggugcauccggugccucuggagcaccaagccggucgagaccuccaacagcuucgacgugcugaaguccgaggacgcccaggggauggacaaccuggccugcgaggaccucaagcccgugagcgaggaggucguggagaaccccacgauccagaaggacgugcuggagugcaacgucaagaccaccgagguggugggcgacaucauccugaagcccgccaacaacucccucaagaucaccgaggaggucgggcacacggaccugauggccgcguacguggacaacagcucccugaccaucaagaagccgaacgagcucagccgcgugcugggccugaagacccucgccacccacgggcuggccgccgucaacuccgugcccugggacacgaucgccaacuacgcgaagcccuuccugaacaagguggucagcaccaccaccaacaucgugacgcgcugccucaaccgggugugcaccaacuacaugccguacuucuucacccugcugcuccagcugugcaccuucacccgcuccacgaacagccggaucaaggccuccaugcccaccaccaucgccaagaacaccgucaagagcgugggcaaguucugccuggaggccagcuucaacuaccucaagucccccaacuucagcaagcugaucaacaucaucaucugguuccugcuccuguccgugugccugggcagccucaucuacuccacggccgcgcuggggguccugaugagcaaccucggcaugcccuccuacugcaccggguaccgcgagggcuaccugaacagcaccaacgugaccaucgccacguacugcaccggcuccaucccgugcagcgugugccuguccgggcucgacagccuggacaccuaccccucccuggagaccauccagaucacgaucagcuccuucaagugggaccucaccgccuucggccuggucgccgagugguuccuggccuacauccucuucacccgguucuucuacgugcuggggcuggcggccaucaugcagcucuucuucagcuacuucgccgugcacuucaucuccaacagcuggcugauguggcugaucaucaaccugguccagauggcccccaucuccgcgauggugcgcauguacaucuucuucgccagcuucuacuacguguggaagagcuacguccacgugguggacggcugcaacuccagcaccugcaugaugugcuacaagcggaaccgcgccacgcgggucgagugcaccaccaucgugaacgggguccgccgguccuucuacguguacgccaacggcggcaagggguucugcaagcuccacaacuggaacugcgugaacugcgacaccuucugcgccggcagcacguucaucuccgacgaggucgcgcgcgaccugagccugcaguucaagcggcccaucaacccgaccgaccaguccagcuacaucguggacuccgugaccgucaagaacgggagcauccaccucuacuucgacaaggccggccagaagaccuacgagcgccacucccugagccacuucgugaaccuggacaaccuccgggccaacaacacgaaggggucccugcccaucaacgugaucgucuucgacggcaagagcaagugcgaggaguccagcgccaaguccgccagcguguacuacucccagcugaugugccagcccauccuccugcuggaccaggcgcucgugagcgacgucggcgacagcgccgagguggccgugaagauguucgacgccuacgucaacaccuucuccagcaccuucaacgugcccauggagaagcugaagacccugguggccacggcggaggccgagcucgccaagaacgucucccuggacaacgugcugagcaccuucaucuccgccgcgcgccagggguucguggacagcgacgucgagaccaaggacgugguggagugccucaagcugucccaccagagcgacaucgaggucaccggcgacuccugcaacaacuacaugcugacguacaacaagguggagaacaugaccccgcgggaccucggggccugcaucgacugcagcgcccgccacaucaacgcccagguggccaagucccacaacaucgcgcugaucuggaacgucaaggacuucaugagccuguccgagcagcuccggaagcagauccgcagcgccgccaagaagaacaaccugcccuucaagcugaccugcgccaccacgcgccagguggugaacgucgugaccaccaagaucgcccucaagggcggguga

SEQ ID NO: 18244 - RNA, 5841 nt, Artificial Sequence
  SARS-CoV-2__MT252702.1__non-structural protein 3 (NSP3) CDS gc
auggcccccaccaaggugaccuucggcgacgacacggucaucgaggugcagggguacaagagcgugaacaucaccuucgagcuggacgagcgcaucgacaagguccucaacgagaagugcuccgccuacaccguggagcugggcaccgaggugaacgaguucgcgugcgucguggccgacgccgugaucaagacgcugcagccggucagcgagcuccugaccccccuggggaucgaccucgacgagugguccauggccaccuacuaccuguucgacgagagcggcgaguucaagcuggccucccacauguacugcagcuucuacccccccgacgaggacgaggaggagggggacugcgaggaggaggaguucgagccguccacccaguacgaguacggcacggaggacgacuaccagggcaagccccucgaguucggggcgaccagcgccgcccugcagcccgaggaggagcaggaggaggacuggcuggacgacgacucccagcagaccgugggccagcaggacgggagcgaggacaaccagaccacgaccauccagaccaucguggagguccagccccagcucgagauggagcugaccccgguggugcagacgaucgaggucaacuccuucagcggcuaccugaagcucaccgacaacguguacaucaagaacgccgacaucguggaggaggcgaagaaggucaagcccaccgugguggucaacgccgccaacguguaccugaagcacgggggcggcguggccggggcccugaacaaggcgaccaacaacgccaugcaggucgaguccgacgacuacaucgccacgaacggcccccucaagguggggggcagcugcguccuguccggccacaaccuggccaagcacugccuccacgugguggggcccaacgucaacaagggcgaggacauccagcugcugaagagcgccuacgagaacuucaaccagcacgaggugcuccuggcgccgcugcucuccgccgggaucuucggcgccgaccccauccacagccugcgggugugcgucgacaccgugcgcaccaacguguaccuggccgucuucgacaagaaccucuacgacaagcugguguccagcuuccuggagaugaagagcgagaagcagguggagcagaagaucgccgagauccccaaggaggaggucaagcccuucaucaccgaguccaagccgagcguggagcagcggaagcaggacgacaagaagaucaaggcgugcguggaggaggucacgaccacccucgaggagaccaaguuccugacggagaaccugcuccuguacaucgacaucaacgggaaccugcaccccgacuccgccacccucgugagcgacaucgacaucaccuuccugaagaaggacgcccccuacaucgugggcgacgucgugcaggagggcgugcugaccgccgucgugauccccacgaagaaggccgggggcaccaccgagaugcucgcgaaggcccugcgcaaggugccgaccgacaacuacaucacgaccuaccccgggcagggccugaacggguacaccgucgaggaggccaagaccgugcucaagaagugcaaguccgccuucuacauccugcccagcaucaucuccaacgagaagcaggagauccugggcaccgugagcuggaaccuccgggagaugcuggcgcacgccgaggagacgcgcaagcugaugcccgucugcguggagaccaaggccaucguguccaccauccagcggaaguacaagggcaucaagauccaggagggggucguggacuacggcgcccgcuucuacuucuacaccagcaagacgaccguggccucccugaucaacacccucaacgaccugaacgagacccuggucacgaugccgcucggguacgugacccacggccugaaccuggaggaggcggcccgguacaugcgcagccucaaggugcccgccaccgucuccgugagcucccccgacgccgugaccgccuacaacggguaccugacgagcuccagcaagacccccgaggagcacuucaucgagaccaucucccuggcgggcagcuacaaggacuggagcuacuccggccagagcacccagcucgggaucgaguuccugaagcggggcgacaaguccgucuacuacacgagcaacccgaccaccuuccaccuggacggggaggugaucaccuucgacaaccucaagacgcugcugucccuccgcgaggugcggaccaucaaggucuucaccaccguggacaacaucaaccugcacacgcagguggucgacaugagcaugaccuacggccagcaguucggccccaccuaccuggacggggccgacgugaccaagaucaagccccacaacucccacgagggcaagacguucuacgugcucccgaacgacgacacccugcgcgucgaggccuucgaguacuaccacaccaccgaccccagcuuccuggggcgguacauguccgcccucaaccacacgaagaaguggaaguacccccaggugaacggccugaccagcaucaagugggccgacaacaacugcuaccuggcgaccgcccuccugacccugcagcagaucgagcucaaguucaaccccccggcccugcaggacgccuacuaccgcgcgcgggccggggaggccgccaacuucugcgcccugauccucgcguacugcaacaagacggugggcgagcugggcgacguccgcgagaccauguccuaccuguuccagcacgccaaccucgacagcugcaagcgggugcugaacgucgugugcaagaccugcgggcagcagcagaccacccugaagggcguggaggccgucauguacauggggacgcucuccuacgagcaguucaagaagggcgugcagauccccugcaccugcgggaagcaggccaccaaguaccuggugcagcaggagagccccuucgucaugauguccgcccccccggcgcaguacgagcugaagcacggcaccuucacgugcgccagcgaguacaccggcaacuaccagugcgggcacuacaagcacaucaccuccaaggagacccucuacugcaucgacggcgcccugcugacgaagagcagcgaguacaaggggcccaucaccgacguguucuacaaggagaacuccuacaccaccacgaucaagcccgugaccuacaagcucgacggcgucgugugcaccgagaucgaccccaagcuggacaacuacuacaagaaggacaacagcuacuucaccgagcagccgaucgaccuggugcccaaccagcccuaccccaacgccuccuucgacaacuucaaguucgucugcgacaacaucaaguucgccgacgaccucaaccagcugacgggguacaagaagccggcgagccgcgagcugaaggugaccuucuuccccgaccucaacggcgacguggucgccaucgacuacaagcacuacacccccuccuucaagaagggcgccaagcugcugcacaagcccaucguguggcacgugaacaacgccaccaacaaggcgacguacaagccgaacaccuggugcauccggugccucuggagcaccaagcccgucgagaccuccaacagcuucgacgugcugaaguccgaggacgcccaggggauggacaaccuggccugcgaggaccucaagcccgugagcgaggaggucguggagaaccccacgauccagaaggacgugcuggagugcaacgucaagaccaccgagguggugggcgacaucauccugaagccggccaacaacucccucaagaucaccgaggaggucgggcacacggaccugauggccgcguacguggacaacagcucccugaccaucaagaagcccaacgagcucagccgcgugcugggccugaagacccucgccacccacgggcuggccgccgucaacuccgugcccugggacacgaucgccaacuacgcgaagccguuccugaacaagguggucagcaccaccaccaacaucgugacgcgcugccucaaccgggugugcaccaacuacaugcccuacuucuucacccugcugcuccagcugugcaccuucacccgcuccacgaacagccggaucaaggccuccaugcccaccaccaucgccaagaacaccgucaagagcgugggcaaguucugccuggaggccagcuucaacuaccucaagucccccaacuucagcaagcugaucaacaucaucaucugguuccugcuccuguccgugugccugggcagccucaucuacuccacggccgcgcuggggguccugaugagcaaccucggcaugccguccuacugcaccggguaccgcgagggcuaccuggacagcaccaacgugaccaucgccacguacugcaccggcuccauccccugcagcgugugccuguccgggcucgacagccuggacaccuaccccucccuggagaccauccagaucacgaucagcuccuucaagugggaccucaccgccuucggccuggucgccgagugguuccuggccuacauccucuucacccgguucuucuacgugcuggggcuggcggccaucaugcagcucuucuucagcuacuucgccgugcacuucaucuccaacagcuggcugauguggcugaucaucaaccugguccagauggcccccaucuccgcgauggugcgcauguacaucuucuucgccagcuucuacuacguguggaagagcuacguccacgugguggacggcugcaacuccagcaccugcaugaugugcuacaagcggaaccgcgccacgcgggucgagugcaccaccaucgugaacgggguccgccgguccuucuacguguacgccaacggcggcaagggguucugcaagcuccacaacuggaacugcgugaacugcgacaccuucugcgccggcagcacguucaucuccgacgaggucgcgcgcgaccugagccugcaguucaagcggccgaucaaccccaccgaccaguccagcuacaucguggacuccgugaccgucaagaacgggagcauccaccucuacuucgacaaggccggccagaagaccuacgagcgccacucccugagccacuucgugaaccuggacaaccuccgggccaacaacacgaaggggucccugcccaucaacgugaucgucuucgacggcaagagcaagugcgaggaguccagcgccaaguccgccagcguguacuacucccagcugaugugccagcccauccuccugcuggaccaggcgcucgugagcgacgucggcgacagcgccgagguggccgugaagauguucgacgccuacgucaacaccuucuccagcaccuucaacgugccgauggagaagcugaagacccugguggccacggcggaggccgagcucgccaagaacgucucccuggacaacgugcugagcaccuucaucuccgccgcgcgccagggguucguggacagcgacgucgagaccaaggacgugguggagugccucaagcugucccaccagagcgacaucgaggucaccggcgacuccugcaacaacuacaugcugacguacaacaagguggagaacaugaccccccgggaccucggggccugcaucgacugcagcgcccgccacaucaacgcccagguggccaagucccacaacaucgcgcugaucuggaacgucaaggacuucaugagccuguccgagcagcuccggaagcagauccgcagcgccgccaagaagaacaaccugcccuucaagcugaccugcgccaccacgcgccagguggugaacgucgugaccaccaagaucgcccucaagggcggguga

SEQ ID NO: 18245 - RNA, 5841 nt, Artificial Sequence
  SARS-CoV-2__MT252708.1__non-structural protein 3 (NSP3) CDS gc
auggcccccaccaaggugaccuucggcgacgacacggucaucgaggugcagggguacaagagcgugaacaucaccuucgagcuggacgagcgcaucgacaagguccucaacgagaagugcuccgccuacaccguggagcugggcaccgaggugaacgaguucgcgugcgucguggccgacgccgugaucaagacgcugcagccggucagcgagcuccugaccccccuggggaucgaccucgacgagugguccauggccaccuacuaccuguucgacgagagcggcgaguucaagcuggccucccacauguacugcagcuucuacccccccgacgaggacgaggaggagggggacugcgaggaggaggaguucgagccguccacccaguacgaguacggcacggaggacgacuaccagggcaagccccucgaguucggggcgaccagcgccgcccugcagcccgaggaggagcaggaggaggacuggcuggacgacgacucccagcagaccgugggccagcaggacgggagcgaggacaaccagaccacgaccauccagaccaucguggagguccagccccagcucgagauggagcugaccccgguggugcagacgaucgaggucaacuccuucagcggcuaccugaagcucaccgacaacguguacaucaagaacgccgacaucguggaggaggcgaagaaggucaagcccaccgugguggucaacgccgccaacguguaccugaagcacgggggcggcguggccggggcccugaacaaggcgaccaacaacgccaugcaggucgaguccgacgacuacaucgccacgaacggcccccucaagguggggggcagcugcguccuguccggccacaacuucgccaagcacugccugcacgugguggggcccaacgucaacaagggcgaggacauccagcuccugaagagcgccuacgagaacuucaaccagcacgaggugcugcucgcgccgcugcuguccgccgggaucuucggcgccgaccccauccacagccuccgggugugcgucgacaccgugcgcaccaacguguaccuggccgucuucgacaagaaccuguacgacaagcucguguccagcuuccuggagaugaagagcgagaagcagguggagcagaagaucgccgagauccccaaggaggaggucaagcccuucaucaccgaguccaagccgagcguggagcagcggaagcaggacgacaagaagaucaaggcgugcguggaggaggucacgaccacccuggaggagaccaaguuccucacggagaaccugcugcucuacaucgacaucaacgggaaccugcaccccgacuccgccacccuggugagcgacaucgacaucaccuuccucaagaaggacgcccccuacaucgugggcgacgucgugcaggagggcgugcugaccgccgucgugauccccacgaagaaggccgggggcaccaccgagaugcuggcgaaggcccuccgcaaggugccgaccgacaacuacaucacgaccuaccccgggcagggccugaacggguacaccgucgaggaggccaagaccgugcugaagaagugcaaguccgccuucuacauccuccccagcaucaucuccaacgagaagcaggagauccugggcaccgugagcuggaaccugcgggagaugcucgcgcacgccgaggagacgcgcaagcugaugcccgucugcguggagaccaaggccaucguguccaccauccagcggaaguacaagggcaucaagauccaggagggggucguggacuacggcgcccgcuucuacuucuacaccagcaagacgaccguggccucccugaucaacacccugaacgaccucaacgagacccuggucacgaugccgcugggguacgugacccacggccucaaccuggaggaggcggcccgguacaugcgcagccugaaggugcccgucaccguguccgugagcucccccgacgccgucaccgccuacaacggguaccucacgagcuccagcaagacccccgaggagcacuucaucgagaccaccucccuggccggcagcuacaaggacuggagcuacuccggccagagcacgcagcuggggaucgaguuccucaagcggggcgacaaguccguguacuacaccagcaacccgaccaccuuccaccuggacggggaggugaucacguucgacaaccugaagacccuccugucccugcgcgagguccggaccaucaagguguucaccacgguggacaacaucaaccuccacacccaggucguggacaugagcaugaccuacggccagcaguucggccccaccuaccuggacggggcggacgugacgaagaucaagccccacaacucccacgagggcaagaccuucuacguccugccgaacgacgacacccuccgcguggaggccuucgaguacuaccacaccacggaccccagcuuccuggggcgguacauguccgcccugaaccacaccaagaaguggaaguacccccaggugaacggccucaccagcaucaagugggccgacaacaacugcuaccuggccaccgcgcugcucacgcugcagcagaucgagcugaaguucaaccccccggcccuccaggacgccuacuaccgcgcccgggcgggggaggccgccaacuucugcgcccugauccuggccuacugcaacaagaccgucggcgagcucggcgacgugcgcgagaccauguccuaccuguuccagcacgcgaaccuggacagcugcaagcggguccucaacguggugugcaagaccugcgggcagcagcagaccacgcugaagggcgucgaggccgugauguacauggggacccuguccuacgagcaguucaagaagggcgugcagauccccugcaccugcgggaagcaggccaccaaguaccucguccagcaggagagccccuucgugaugauguccgcccccccggcccaguacgagcugaagcacggcacguucaccugcgcgagcgaguacaccggcaacuaccagugcgggcacuacaagcacaucaccuccaaggagacgcuguacugcaucgacggcgcccuccugaccaagagcagcgaguacaaggggcccaucaccgacguguucuacaaggagaacuccuacaccacgaccaucaagcccgucaccuacaagcuggacggcguggugugcaccgagaucgaccccaagcucgacaacuacuacaagaaggacaacagcuacuucacggagcagccgaucgaccugguccccaaccagcccuaccccaacgccuccuucgacaacuucaaguucgugugcgacaacaucaaguucgccgacgaccugaaccagcucaccggguacaagaagccggccagccgcgagcugaaggugaccuucuuccccgaccugaacggcgacgucguggcgaucgacuacaagcacuacacccccuccuucaagaagggcgccaagcuccugcacaagcccaucguguggcacgucaacaacgccacgaacaaggccaccuacaagccgaacaccuggugcauccggugccuguggagcaccaagcccguggagacguccaacagcuucgacgugcucaaguccgaggacgcgcaggggauggacaaccuggccugcgaggaccugaagcccgucagcgaggaggugguggagaaccccaccauccagaaggacguccucgagugcaacgugaagaccaccgagguggucggcgacaucauccugaagccggccaacaacucccugaagaucacggaggagguggggcacaccgaccucauggccgccuacguggacaacagcucccugaccaucaagaagcccaacgagcugagccgcguccucggccugaagacccuggcgacgcacgggcucgccgccgugaacuccgugcccugggacaccaucgccaacuacgccaagccguuccugaacaaggucgugagcaccaccacgaacaucgugacccgcugccugaaccgggucugcaccaacuacaugcccuacuucuucacccuccugcugcagcucugcaccuucacgcgcuccaccaacagccggaucaaggcguccaugcccaccaccaucgccaagaacacggugaagagcgugggcaaguucugccuggaggccagcuucaacuaccugaagucccccaacuucagcaagcucaucaacaucaucaucugguuccugcugcucuccgucugccugggcagccugaucuacuccaccgccgcccucggggugcugaugagcaaccugggcaugccguccuacugcaccggguaccgcgagggcuaccucaacagcaccaacgugacgaucgcgaccuacugcaccggcuccauccccugcagcgucugccuguccgggcuggacagccucgacaccuaccccucccuggagacgauccagaucaccaucagcuccuucaagugggaccugaccgccuucggccucguggccgagugguuccuggccuacauccuguucacccgguucuucuacgugcucgggcuggccgcgaucaugcagcuguucuucagcuacuucgccguccacuucaucuccaacagcuggcucauguggcugaucaucaaccuggugcagauggcccccaucuccgccauggugcgcauguacaucuucuucgcgagcuucuacuacgucuggaagagcuacgugcacguggucgacggcugcaacuccagcacgugcaugaugugcuacaagcggaaccgcgccacccggguggagugcaccaccaucgucaacggggugcgccgguccuucuacguguacgccaacggcggcaagggguucugcaagcugcacaacuggaacugcgucaacugcgacacguucugcgccggcagcaccuucaucuccgacgagguggcccgcgaccucagccugcaguucaagcggccgaucaaccccaccgaccaguccagcuacaucguggacuccgucaccgugaagaacgggagcauccaccuguacuucgacaaggcgggccagaagacguacgagcgccacucccucagccacuucgugaaccuggacaaccugcgggccaacaacaccaaggggucccuccccaucaacgucaucguguucgacggcaagagcaagugcgaggaguccagcgccaaguccgccagcguguacuacucccagcugaugugccagcccauccugcuccuggaccaggcccuggucagcgacgugggcgacagcgcggagguggccgucaagauguucgacgccuacgugaacaccuucuccagcaccuucaacgugccgauggagaagcucaagacgcuggucgccaccgccgaggcggagcuggccaagaacgugucccucgacaacgugcugagcaccuucaucuccgccgcccgccagggguucgucgacagcgacguggagaccaaggacguggucgagugccugaagcucucccaccagagcgacaucgaggugacgggcgacuccugcaacaacuacaugcugaccuacaacaagguggagaacaugaccccccgggaccugggggcgugcaucgacugcagcgcccgccacaucaacgcccaggucgccaagucccacaacaucgcccucaucuggaacgugaaggacuucaugagccuguccgagcagcugcggaagcagauccgcagcgcggccaagaagaacaaccuccccuucaagcugaccugcgccacgacccgccagguggucaacguggugaccaccaagaucgcccugaagggcggguga

SEQ ID NO: 18246 - RNA, 5841 nt, Artificial Sequence
  SARS-CoV-2__MT252749.1__non-structural protein 3 (NSP3) CDS gc
auggcccccaccaaggugaccuucggcgacgacacggucaucgaggugcagggguacaagagcgugaacaucaccuucgagcuggacgagcgcaucgacaagguccucaacgagaagugcuccgccuacaccguggagcugggcaccgaggugaacgaguucgcgugcgucguggccgacgccgugaucaagacgcugcagccggucagcgagcuccugaccccccuggggaucgaccucgacgagugguccauggccaccuacuaccuguucgacgagagcggcgaguucaagcuggccucccacauguacugcagcuucuacccccccgacgaggacgaggaggagggggacugcgaggaggaggaguucgagccguccacccaguacgaguacggcacggaggacgacuaccagggcaagccccucgaguucggggcgaccagcgccgcccugcagcccgaggaggagcaggaggaggacuggcuggacgacgacucccagcagaccgugggccagcaggacgggagcgaggacaaccagaccacgaccauccagaccaucguggagguccagccccagcucgagauggagcugaccccgguggugcagacgaucgaggucaacuccuucagcggcuaccugaagcucaccgacaacguguacaucaagaacgccgacaucguggaggaggcgaagaaggucaagcccaccgugguggucaacgccgccaacguguaccugaagcacgggggcggcguggccggggcccugaacaaggcgaccaacaacgccaugcaggucgaguccgacgacuacaucgccacgaacggcccccucaagguggggggcagcugcguccuguccggccacaaccuggccaagcacugccuccacgugguggggcccaacgucaacgagggcgaggacauccagcugcugaagagcgccuacgagaacuucaaccagcacgaggugcuccuggcgccgcugcucuccgccgggaucuucggcgccgaccccauccacagccugcgggugugcgucgacaccgugcgcaccaacguguaccuggccgucuucgacaagaaccucuacgacaagcugguguccagcuuccuggagaugaagagcgagaagcagguggagcagaagaucgccgagauccccaaggaggaggucaagcccuucaucaccgaguccaagccgagcguggagcagcggaagcaggacgacaagaagaucaaggcgugcguggaggaggucacgaccacccucgaggagaccaaguuccugacggagaaccugcuccuguacaucgacaucaacgggaaccugcaccccgacuccgccacccucgugagcgacaucgacaucaccuuccugaagaaggacgcccccuacaucgugggcgacgucgugcaggagggcgugcugaccgccgucgugauccccacgaagaaggccgggggcaccaccgagaugcucgcgaaggcccugcgcaaggugccgaccgacaacuacaucacgaccuaccccgggcagggccugaacggguacaccgucgaggaggccaagaccgugcucaagaagugcaaguccgccuucuacauccugcccagcaucaucuccaacgagaagcaggagauccugggcaccgugagcuggaaccuccgggagaugcuggcgcacgccgaggagacgcgcaagcugaugcccgucugcguggagaccaaggccaucguguccaccauccagcggaaguacaagggcaucaagauccaggagggggucguggacuacggcgcccgcuucuacuucuacaccagcaagacgaccguggccucccugaucaacacccucaacgaccugaacgagacccuggucacgaugccgcucggguacgugacccacggccugaaccuggaggaggcggcccgguacaugcgcagccucaaggugcccgccaccgucuccgugagcucccccgacgccgugaccgccuacaacggguaccugacgagcuccagcaagacccccgaggagcacuucaucgagaccaucucccuggcgggcagcuacaaggacuggagcuacuccggccagagcacccagcucgggaucgaguuccugaagcggggcgacaaguccgucuacuacacgagcaacccgaccaccuuccaccuggacggggaggugaucaccuucgacaaccucaagacgcugcugucccuccgcgaggugcggaccaucaaggucuucaccaccguggacaacaucaaccugcacacgcagguggucgacaugagcaugaccuacggccagcaguucggccccaccuaccuggacggggccgacgugaccaagaucaagccccacaacucccacgagggcaagacguucuacgugcucccgaacgacgacacccugcgcgucgaggccuucgaguacuaccacaccaccgaccccagcuuccuggggcgguacauguccgcccucaaccacacgaagaaguggaaguacccccaggugaacggccugaccagcaucaagugggccgacaacaacugcuaccuggcgaccgcccuccugacccugcagcagaucgagcucaaguucaaccccccggcccugcaggacgccuacuaccgcgcgcgggccggggaggccgccaacuucugcgcccugauccucgcguacugcaacaagacggugggcgagcugggcgacguccgcgagaccauguccuaccuguuccagcacgccaaccucgacagcugcaagcgggugcugaacgucgugugcaagaccugcgggcagcagcagaccacccugaagggcguggaggccgucauguacauggggacgcucuccuacgagcaguucaagaagggcgugcagauccccugcaccugcgggaagcaggccaccaaguaccuggugcagcaggagagccccuucgucaugauguccgcccccccggcgcaguacgagcugaagcacggcaccuucacgugcgccagcgaguacaccggcaacuaccagugcgggcacuacaagcacaucaccuccaaggagacccucuacugcaucgacggcgcccugcugacgaagagcagcgaguacaaggggcccaucaccgacguguucuacaaggagaacuccuacaccaccacgaucaagcccgugaccuacaagcucgacggcgucgugugcaccgagaucgaccccaagcuggacaacuacuacaagaaggacaacagcuacuucaccgagcagccgaucgaccuggugcccaaccagcccuaccccaacgccuccuucgacaacuucaaguucgucugcgacaacaucaaguucgccgacgaccucaaccagcugacgggguacaagaagccggcgagccgcgagcugaaggugaccuucuuccccgaccucaacggcgacguggucgccaucgacuacaagcacuacacccccuccuucaagaagggcgccaagcugcugcacaagcccaucguguggcacgugaacaacgccaccaacaaggcgacguacaagccgaacaccuggugcauccggugccucuggagcaccaagcccgucgagaccuccaacagcuucgacgugcugaaguccgaggacgcccaggggauggacaaccuggccugcgaggaccucaagcccgugagcgaggaggucguggagaaccccacgauccagaaggacgugcuggagugcaacgucaagaccaccgagguggugggcgacaucauccugaagccggccaacaacucccucaagaucaccgaggaggucgggcacacggaccugauggccgcguacguggacaacagcucccugaccaucaagaagcccaacgagcucagccgcgugcugggccugaagacccucgccacccacgggcuggccgccgucaacuccgugcccugggacacgaucgccaacuacgcgaagccguuccugaacaagguggucagcaccaccaccaacaucgugacgcgcugccucaaccgggugugcaccaacuacaugcccuacuucuucacccugcugcuccagcugugcaccuucacccgcuccacgaacagccggaucaaggccuccaugcccaccaccaucgccaagaacaccgucaagagcgugggcaaguucugccuggaggccagcuucaacuaccucaagucccccaacuucagcaagcugaucaacaucaucaucugguuccugcuccuguccgugugccugggcagccucaucuacuccacggccgcgcuggggguccugaugagcaaccucggcaugccguccuacugcaccggguaccgcgagggcuaccugaacagcaccaacgugaccaucgccacguacugcaccggcuccauccccugcagcgugugccuguccgggcucgacagccuggacaccuaccccucccuggagaccauccagaucacgaucagcuccuucaagugggaccucaccgccuucggccuggucgccgagugguuccuggccuacauccucuucacccgguucuucuacgugcuggggcuggcggccaucaugcagcucuucuucagcuacuucgccgugcacuucaucuccaacagcuggcugauguggcugaucaucaaccugguccagauggcccccaucuccgcgauggugcgcauguacaucuucuucgccagcuucuacuacguguggaagagcuacguccacgugguggacggcugcaacuccagcaccugcaugaugugcuacaagcggaaccgcgccacgcgggucgagugcaccaccaucgugaacgggguccgccgguccuucuacguguacgccaacggcggcaagggguucugcaagcuccacaacuggaacugcgugaacugcgacaccuucugcgccggcagcacguucaucuccgacgaggucgcgcgcgaccugagccugcaguucaagcggccgaucaaccccaccgaccaguccagcuacaucguggacuccgugaccgucaagaacgggagcauccaccucuacuucgacaaggccggccagaagaccuacgagcgccacucccugagccacuucgugaaccuggacaaccuccgggccaacaacacgaaggggucccugcccaucaacgugaucgucuucgacggcaagagcaagugcgaggaguccagcgccaaguccgccagcguguacuacucccagcugaugugccagcccauccuccugcuggaccaggcgcucgugagcgacgucggcgacagcgccgagguggccgugaagauguucgacgccuacgucaacaccuucuccagcaccuucaacgugccgauggagaagcugaagacccugguggccacggcggaggccgagcucgccaagaacgucucccuggacaacgugcugagcaccuucaucuccgccgcgcgccagggguucguggacagcgacgucgagaccaaggacgugguggagugccucaagcugucccaccagagcgacaucgaggucaccggcgacuccugcaacaacuacaugcugacguacaacaagguggagaacaugaccccccgggaccucggggccugcaucgacugcagcgcccgccacaucaacgcccagguggccaagucccacaacaucgcgcugaucuggaacgucaaggacuucaugagccuguccgagcagcuccggaagcagauccgcagcgccgccaagaagaacaaccugcccuucaagcugaccugcgccaccacgcgccagguggugaacgucgugaccaccaagaucgcccucaagggcggguga

SEQ ID NO: 18247 - RNA, 5841 nt, Artificial Sequence
  SARS-CoV-2__MT371049.1__non-structural protein 3 (NSP3) CDS gc
auggcccccaccaaggugaccuucggcgacgacacggucaucgaggugcagggguacaagagcgugaacaucaccuucgagcuggacgagcgcaucgacaagguccucaacgagaagugcuccgccuacaccguggagcugggcaccgaggugaacgaguucgcgugcgucguggccgacgccgugaucaagacgcugcagccggucagcgagcuccugaccccccuggggaucgaccucgacgagugguccauggccaccuacuaccuguucgacgagagcggcgaguucaagcuggccucccacauguacugcagcuucuacccccccgacgaggacgaggaggagggggacugcgaggaggaggaguucgagccguccacccaguacgaguacggcacggaggacgacuaccagggcaagccccucgaguucggggcgaccagcgccgcccugcagcccgaggaggagcaggaggaggacuggcuggacgacgacucccagcagaccgugggccagcaggacgggagcgaggacaaccagaccacgaccauccagaccaucguggagguccagccccagcucgagauggagcugaccccgguggugcagacgaucgaggucaacuccuucagcggcuaccugaagcucaccgacaacguguacaucaagaacgccgacaucguggaggaggcgaagaaggucaagcccaccgugguggucaacgccgccaacguguaccugaagcacgggggcggcguggccggggcccugaacaaggcgaccaacaacgccaugcaggucgaguccgacgacuacaucgccacgaacggcccccucaagguggggggcagcugcguccuguccggccacaaccuggccaagcacugccuccacgugguggggcccaacgucaacaagggcgaggacauccagcugcugaagagcgccuacgagaacuucaaccagcacgaggugcuccuggcgccgcugcucuccgccgggaucuucggcgccgaccccauccacagccugcgggugugcgucgacaccgugcgcaccaacguguaccuggccgucuucgacaagaaccucuacgacaagcugguguccagcuuccuggagaugaagagcgagaagcagguggagcagaagaucgccgagauccccaaggaggaggucaagcccuucaucaccgaguccaagccgagcguggagcagcggaagcaggacgacaagaagaucaaggcgugcguggaggaggucacgaccacccucgaggagaccaaguuccugacggagaaccugcuccuguacaucgacaucaacgggaaccugcaccccgacuccgccacccucgugagcgacaucgacaucaccuuccugaagaaggacgcccccuacaucgugggcgacgucgugcaggagggcgugcugaccgccgucgugauccccacgaagaaggccgggggcaccaccgagauccucgcgaaggcccugcgcaaggugccgaccgacaacuacaucacgaccuaccccgggcagggccugaacggguacaccgucgaggaggccaagaccgugcucaagaagugcaaguccgccuucuacauccugcccagcaucaucuccaacgagaagcaggagauccugggcaccgugagcuggaaccuccgggagaugcuggcgcacgccgaggagacgcgcaagcugaugcccgucugcguggagaccaaggccaucguguccaccauccagcggaaguacaagggcaucaagauccaggagggggucguggacuacggcgcccgcuucuacuucuacaccagcaagacgaccguggccucccugaucaacacccucaacgaccugaacgagacccuggucacgaugccgcucggguacgugacccacggccugaaccuggaggaggcggcccgguacaugcgcagccucaaggugcccgccaccgucuccgugagcucccccgacgccgugaccgccuacaacggguaccugacgagcuccagcaagacccccgaggagcacuucaucgagaccaucucccuggcgggcagcuacaaggacuggagcuacuccggccagagcacccagcucgggaucgaguuccugaagcggggcgacaaguccgucuacuacacgagcaacccgaccaccuuccaccuggacggggaggugaucaccuucgacaaccucaagacgcugcugucccuccgcgaggugcggaccaucaaggucuucaccaccguggacaacaucaaccugcacacgcagguggucgacaugagcaugaccuacggccagcaguucggccccaccuaccuggacggggccgacgugaccaagaucaagccccacaacucccacgagggcaagacguucuacgugcucccgaacgacgacacccugcgcgucgaggccuucgaguacuaccacaccaccgaccccagcuuccuggggcgguacauguccgcccucaaccacacgaagaaguggaaguacccccaggugaacggccugaccagcaucaagugggccgacaacaacugcuaccuggcgaccgcccuccugacccugcagcagaucgagcucaaguucaaccccccggcccugcaggacgccuacuaccgcgcgcgggccggggaggccgccaacuucugcgcccugauccucgcguacugcaacaagacggugggcgagcugggcgacguccgcgagaccauguccuaccuguuccagcacgccaaccucgacagcugcaagcgggugcugaacgucgugugcaagaccugcgggcagcagcagaccacccugaagggcguggaggccgucauguacauggggacgcucuccuacgagcaguucaagaagggcgugcagauccccugcaccugcgggaagcaggccaccaaguaccuggugcagcaggagagccccuucgucaugauguccgcccccccggcgcaguacgagcugaagcacggcaccuucacgugcgccagcgaguacaccggcaacuaccagugcgggcacuacaagcacaucaccuccaaggagacccucuacugcaucgacggcgcccugcugacgaagagcagcgaguacaaggggcccaucaccgacguguucuacaaggagaacuccuacaccaccacgaucaagcccgugaccuacaagcucgacggcgucgugugcaccgagaucgaccccaagcuggacaacuacuacaagaaggacaacagcuacuucaccgagcagccgaucgaccuggugcccaaccagcccuaccccaacgccuccuucgacaacuucaaguucgucugcgacaacaucaaguucgccgacgaccucaaccagcugacgggguacaagaagccggcgagccgcgagcugaaggugaccuucuuccccgaccucaacggcgacguggucgccaucgacuacaagcacuacacccccuccuucaagaagggcgccaagcugcugcacaagcccaucguguggcacgugaacaacgccaccaacaaggcgacguacaagccgaacaccuggugcauccggugccucuggagcaccaagcccgucgagaccuccaacagcuucgacgugcugaaguccgaggacgcccaggggauggacaaccuggccugcgaggaccucaagcccgugagcgaggaggucguggagaaccccacgauccagaaggacgugcuggagugcaacgucaagaccaccgagguggugggcgacaucauccugaagccggccaacaacucccucaagaucaccgaggaggucgggcacacggaccugauggccgcguacguggacaacagcucccugaccaucaagaagcccaacgagcucagccgcgugcugggccugaagacccucgccacccacgggcuggccgccgucaacuccgugcccugggacacgaucgccaacuacgcgaagccguuccugaacaagguggucagcaccaccaccaacaucgugacgcgcugccucaaccgggugugcaccaacuacaugcccuacuucuucacccugcugcuccagcugugcaccuucacccgcuccacgaacagccggaucaaggccuccaugcccaccaccaucgccaagaacaccgucaagagcgugggcaaguucugccuggaggccagcuucaacuaccucaagucccccaacuucagcaagcugaucaacaucaucaucugguuccugcuccuguccgugugccugggcagccucaucuacuccacggccgcgcuggggguccugaugagcaaccucggcaugccguccuacugcaccggguaccgcgagggcuaccugaacagcaccaacgugaccaucgccacguacugcaccggcuccauccccugcagcgugugccuguccgggcucgacagccuggacaccuaccccucccuggagaccauccagaucacgaucagcuccuucaagugggaccucaccgccuucggccuggucgccgagugguuccuggccuacauccucuucacccgguucuucuacgugcuggggcuggcggccaucaugcagcucuucuucagcuacuucgccgugcacuucaucuccaacagcuggcugauguggcugaucaucaaccugguccagauggcccccaucuccgcgauggugcgcauguacaucuucuucgccagcuucuacuacguguggaagagcuacguccacgugguggacggcugcaacuccagcaccugcaugaugugcuacaagcggaaccgcgccacgcgggucgagugcaccaccaucgugaacgggguccgccgguccuucuacguguacgccaacggcggcaagggguucugcaagcuccacaacuggaacugcgugaacugcgacaccuucugcgccggcagcacguucaucuccgacgaggucgcgcgcgaccugagccugcaguucaagcggccgaucaaccccaccgaccaguccagcuacaucguggacuccgugaccgucaagaacgggagcauccaccucuacuucgacaaggccggccagaagaccuacgagcgccacucccugagccacuucgugaaccuggacaaccuccgggccaacaacacgaaggggucccugcccaucaacgugaucgucuucgacggcaagagcaagugcgaggaguccagcgccaaguccgccagcguguacuacucccagcugaugugccagcccauccuccugcuggaccaggcgcucgugagcgacgucggcgacagcgccgagguggccgugaagauguucgacgccuacgucaacaccuucuccagcaccuucaacgugccgauggagaagcugaagacccugguggccacggcggaggccgagcucgccaagaacgucucccuggacaacgugcugagcaccuucaucuccgccgcgcgccagggguucguggacagcgacgucgagaccaaggacgugguggagugccucaagcugucccaccagagcgacaucgaggucaccggcgacuccugcaacaacuacaugcugacguacaacaagguggagaacaugaccccccgggaccucggggccugcaucgacugcagcgcccgccacaucaacgcccagguggccaagucccacaacaucgcgcugaucuggaacgucaaggacuucaugagccuguccgagcagcuccggaagcagauccgcagcgccgccaagaagaacaaccugcccuucaagcugaccugcgccaccacgcgccagguggugaacgucgugaccaccaagaucgcccucaagggcggguga

SEQ ID NO: 18248 - RNA, 5841 nt, Artificial Sequence
  SARS-CoV-2__MT370859.1__non-structural protein 3 (NSP3) CDS gc
auggcccccaccaaggugaccuucggcgacgacacggucaucgaggugcagggguacaagagcgugaacaucaccuucgagcuggacgagcgcaucgacaagguccucaacgagaagugcuccgccuacaccguggagcugggcaccgaggugaacgaguucgcgugcgucguggccgacgccgugaucaagacgcugcagccggucagcgagcuccugaccccccuggggaucgaccucgacgagugguccauggccaccuacuaccuguucgacgagagcggcgaguucaagcuggccucccacauguacugcagcuucuacccccccgacgaggacgaggaggagggggacugcgaggaggaggaguucgagccguccacccaguacgaguacggcacggaggacgacuaccagggcaagccccucgaguucggggcgaccagcgccgcccugcagcccgaggaggagcaggaggaggacuggcuggacgacgacucccagcagaccgugggccagcaggacgggagcgaggacaaccagaccacgaccauccagaccaucguggagguccagccccagcucgagauggagcugaccccgguggugcagacgaucgaggucaacuccuucagcggcuaccugaagcucaccgacaacguguacaucaagaacgccgacaucguggaggaggcgaagaaggucaagcccaccgugguggucaacgccgccaacguguaccugaagcacgggggcggcguggccggggcccugaacaaggcgaccaacaacgccaugcaggucgaguccgacgacuacaucgccacgaacggcccccucaagguggggggcagcugcguccuguccggccacaaccuggccaagcacugccuccacgugguggggcccaacgucaacaagggcgaggacauccagcugcugaagagcgccuacgagaacuucaaccagcacgaggugcuccuggcgccgcugcucuccgccgggaucuucggcgccgaccccauccacagccugcgggugugcgucgacaccgugcgcaccaacguguaccuggccgucuucgacaagaaccucuacgacaagcugguguccagcuuccuggagaugaagagcgagaagcagguggagcagaagaucgccgagauccccaaggaggaggucaagcccuucaucaccgaguccaagccgagcguggagcagcggaagcaggacgacaagaagaucaaggcgugcguggaggaggucacgaccacccucgaggagaccaaguuccugacggagaaccugcuccuguacaucgacaucaacgggaaccugcaccccgacuccgccacccucgugagcgacaucgacaucaccuuccugaagaaggacgcccccuacaucgugggcgacgucgugcaggagggcgugcugaccgccgucgugauccccacgaagaaggccgggggcaccaccgagaugcucgcgaaggcccugcgcaaggugccgaccgacaacuacaucacgaccuaccccgggcagggccugaacggguacaccgucgaggaggccaagaccgugcucaagaagugcaaguccgccuucuacauccugcccagcaucaucuccaacgagaagcaggagauccugggcaccgugagcuggaaccuccgggagaugcuggcgcacgccgaggagacgcgcaagcugaugcccgucugcguggagaccaaggccaucguguccaccauccagcggaaguacaagggcaucaagauccaggagggggucguggacuacggcgcccgcuucuacuucuacaccagcaagacgaccguggccucccugaucaacacccucaacgaccugaacgagacccuggucacgaugccgcucggguacgugacccacggccugaaccuggaggaggcggcccgguacaugcgcagccucaaggugcccgccaccgucuccgugagcucccccgacgccgugaccgccuacaacggguaccugacgagcuccagcaagacccccgaggagcacuucaucgagaccaucucccuggcgggcagcuacaaggacuggagcuacuccggccagagcacccagcucgggaucgaguuccugaagcggggcgacaaguccgucuacuacacgagcaacccgaccaccuuccaccuggacggggaggugaucaccuucgacaaccucaagacgcugcugucccuccgcgaggugcggaccaucaaggucuucaccaccguggacaacaucaaccugcacacgcagguggucgacaugagcaugaccuacggccagcaguucggccccaccuaccuggacggggccgacgugaccaagaucaagccccacaacucccacgagggcaagacguucuacgugcucccgaacgacgacacccugcgcgucgaggccuucgaguacuaccacaccaccgaccccagcuuccuggggcgguacauguccgcccucaaccacacgaagaaguggaaguacccccaggugaacggccugaccagcaucaagugggccgacaacaacugcuaccuggcgaccgcccuccugacccugcagcagaucgagcucaaguucaaccccccggcccugcaggacgccuacuaccgcgcgcgggccggggaggccgccaacuucugcgcccugauccucgcguacugcaacaagacggugggcgagcugggcgacguccgcgagaccauguccuaccuguuccagcacgccaaccucgacagcugcaagcgggugcugaacgucgugugcaagaccugcgggcagcagcagaccacccugaagggcguggaggccgucauguacauggggacgcucuccuacgagcaguucaagaagggcgugcagauccccugcaccugcgggaagcaggccaccaaguaccuggugcagcaggagagccccuucgucaugauguccgcccccccggcgcaguacgagcugaagcacggcaccuucacgugcgccagcgaguacaccggcaacuaccagugcgggcacuacaagcacaucaccuccaaggagacccucuacugcaucgacggcgcccugcugacgaagagcagcgaguacaaggggcccaucaccgacguguucuacaaggagaacuccuacaccaccacgaucaagcccgugaccuacaagcucgacggcgucgugugcaccgagaucgaccccaagcuggacaacuacuacaagaaggacaacagcuacuucaccgagcagccgaucgaccuggugcccaaccagcccuaccccaacgccuccuucgacaacuucaaguucgucugcgacaacaucaaguucgccgacgaccucaaccagcugacgggguacaagaagccggcgagccgcgagcugaaggugaccuucuuccccgaccucaacggcgacguggucgccaucgacuacaagcacuacacccccuccuucaagaagggcgccaagcugcugcacaagcccaucguguggcacgugaacaacgccaccaacaaggcgacguacaagccgaacaccuggugcauccggugccucuggagcaccaagcccgucgagaccuccaacagcuucgacgugcugaaguccgaggacgcccaggggauggacaaccuggccugcgaggaccucaagcccgugagcgaggaggucguggagaaccccacgauccagaaggacgugcuggagugcaacgucaagaccaccgagguggugggcgacaucauccugaagccggccaacaacucccucaagaucaccgaggaggucgggcacacggaccugauggccgcguacguggacaacagcucccugaccaucaagaagcccaacgagcucagccgcgugcugggccugaagacccucgccacccacgggcuggccgccgucaacuccgugcccugggacacgaucgccaacuacgcgaagccguuccugaacaagguggucagcaccaccaccaacaucgugacgcgcugccucaaccgggugugcaccaacuacaugcccuacuucuucacccugcugcuccagcugugcaccuucacccgcuccacgaacagccggaucaaggccuccaugcccaccaccaucgccaagaacaccgucaagagcgugggcaaguucugccuggaggccagcuucaacuaccucaagucccccaacuucagcaagcugaucaacaucaucaucugguuccugcuccuguccgugugccugggcagccucaucuacuccacggccgcgcuggggguccugaugagcaaccucggcaugccguccuacugcaccggguaccgcgagggcuaccugaacagcaccaacgugaccaucgccacguacugcaccggcuccauccccugcagcgugugccuguccgggcucgacagccuggacaccuaccccucccuggagaccauccagaucacgaucagcuccuucaagugggaccucaccgccuucggccuggucgccgagugguuccuggccuacauccucuucacccgguucuucuacgugcuggggcuggcggccaucaugcagcucuucuucagcuacuucgccgugcacuucaucuccaacagcuggcugauguggcugaucaucaaccugguccagauggcccccaucuccgcgauggugcgcauguacaucuucuucgccagcuucuacuacguguggaagagcuacguccacgugguggacggcugcaacuccagcaccugcaugaugugcuacaagcggaaccgcgccacgcgggucgagugcaccaccaucgugaacgggguccgccgguccuucuacguguacgccaacggcggcaagggguucugcaagcuccacaacuggaacugcgugaacugcgacaccuucugcgccggcagcacguucaucuccgacgaggucgcgcgcgaccugagccugcaguucaagcggccgaucaaccccaccgaccaguccagcuacaucguggacuccgugaccgucaagaacgggagcauccgccucuacuucgacaaggccggccagaagaccuacgagcggcacucccugagccacuucgugaaccuggacaaccuccgcgccaacaacacgaaggggucccugcccaucaacgugaucgucuucgacggcaagagcaagugcgaggaguccagcgccaaguccgccagcguguacuacucccagcugaugugccagcccauccuccugcuggaccaggcgcucgugagcgacgucggcgacagcgccgagguggccgugaagauguucgacgccuacgucaacaccuucuccagcaccuucaacgugccgauggagaagcugaagacccugguggccacggcggaggccgagcucgccaagaacgucucccuggacaacgugcugagcaccuucaucuccgccgcgcggcagggguucguggacagcgacgucgagaccaaggacgugguggagugccucaagcugucccaccagagcgacaucgaggucaccggcgacuccugcaacaacuacaugcugacguacaacaagguggagaacaugaccccccgcgaccucggggccugcaucgacugcagcgcccggcacaucaacgcccagguggccaagucccacaacaucgcgcugaucuggaacgucaaggacuucaugagccuguccgagcagcuccgcaagcagauccgcagcgccgccaagaagaacaaccugcccuucaagcugaccugcgccaccacgcggcagguggugaacgucgugaccaccaagaucgcccucaagggcggguga

SEQ ID NO: 18249 - RNA, 5841 nt, Artificial Sequence
  SARS-CoV-2__MT370862.1__non-structural protein 3 (NSP3) CDS gc
auggcccccaccaaggugaccuucggcgacgacacggucaucgaggugcagggguacaagagcgugaacaucaccuucgagcuggacgagcgcaucgacaagguccucaacgagaagugcuccgccuacaccguggagcugggcaccgaggugaacgaguucgcgugcgucguggccgacgccgugaucaagacgcugcagccggucagcgagcuccugaccccccuggggaucgaccucgacgagugguccauggccaccuacuaccuguucgacgagagcggcgaguucaagcuggccucccacauguacugcagcuucuacccccccgacgaggacgaggaggagggggacugcgaggaggaggaguucgagccguccacccaguacgaguacggcacggaggacgacuaccagggcaagccccucgaguucggggcgaccagcgccgcccugcagcccgaggaggagcaggaggaggacuggcuggacgacgacucccagcagaccgugggccagcaggacgggagcgaggacaaccagaccacgaccauccagaccaucguggagguccagccccagcucgagauggagcugaccccgguggugcagacgaucgaggucaacuccuucagcggcuaccugaagcucaccgacaacguguacaucaagaacgccgacaucguggaggaggcgaagaaggucaagcccaccgugguggucaacgccgccaacguguaccugaagcacgggggcggcguggccggggcccugaacaaggcgaccaacaacgccaugcaggucgaguccgacgacuacaucgccacgaacggcccccucaagguggggggcagcugcguccuguccggccacaaccuggccaagcacugccuccacgugguggggcccaacgucaacaagggcgaggacauccagcugcugaagagcgccuacgagaacuucaaccagcacgaggugcuccuggcgccgcugcucuccgccgggaucuucggcgccgaccccauccacagccugcgggugugcgucgacaccgugcgcaccaacguguaccuggccgucuucgacaagaaccucuacgacaagcugguguccagcuuccuggagaugaagagcgagaagcagguggagcagaagaucgccgagauccccaaggaggaggucaagcccuucaucaccgaguccaagccgagcguggagcagcggaagcaggacgacaagaagaucaaggcgugcguggaggaggucacgaccacccucgaggagaccaaguuccugacggagaaccugcuccuguacaucgacaucaacgggaaccugcaccccgacuccgccacccucgugagcgacaucgacaucaccuuccugaagaaggacgcccccuacaucgugggcgacgucgugcaggagggcgugcugaccgccgucgugauccccacgaagaaggccgggggcaccaccgagaugcucgcgaaggcccugcgcaaggugccgaccgacaacuacaucacgaccuaccccgggcagggccugaacggguacaccgucgaggaggccaagaccgugcucaagaagugcaaguccgccuucuacauccugcccagcaucaucuccaacgagaagcaggagauccugggcaccgugagcuggaaccuccgggagaugcuggcgcacgccgaggagacgcgcaagcugaugcccgucugcguggagaccaaggccaucguguccaccauccagcggaaguacaagggcaucaagauccaggagggggucguggacuacggcgcccgcuucuacuucuacaccagcaagacgaccguggccucccugaucaacacccucaacgaccugaacgagacccuggucacgaugccgcucggguacgugacccacggccugaaccuggaggaggcggcccgguacaugcgcagccucaaggugcccgccaccgucuccgugagcucccccgacgccgugaccgccuacaacggguaccugacgagcuccagcaagacccccgaggagcacuucaucgagaccaucucccuggcgggcagcuacaaggacuggagcuacuccggccagagcacccagcucgggaucgaguuccugaagcggggcgacaaguccgucuacuacacgagcaacccgaccaccuuccaccuggacggggaggugaucaccuucgacaaccucaagacgcugcugucccuccgcgaggugcggaccaucaaggucuucaccaccguggacaacaucaaccugcacacgcagguggucgacaugagcaugaccuacggccagcaguucggccccaccuaccuggacggggccgacgugaccaagaucaagccccacaacucccacgagggcaagacguucuacgugcucccgaacgacgacacccugcgcgucgaggccuucgaguacuaccacaccaccgaccccagcuuccuggggcgguacauguccgcccucaaccacacgaagaaguggaaguacccccaggugaacggccugaccagcaucaagugggccgacaacaacugcuaccuggcgaccgcccuccugacccugcagcagaucgagcucaaguucaaccccccggcccugcaggacgccuacuaccgcgcgcgggccggggaggccgccaacuucugcgcccugauccucgcguacugcaacaagacggugggcgagcugggcgacguccgcgagaccauguccuaccuguuccagcacgccaaccucgacagcugcaagcgggugcugaacgucgugugcaagaccugcgggcagcagcagaccacccugaagggcguggaggccgucauguacauggggacgcucuccuacgagcaguucaagaagggcgugcagauccccugcaccugcgggaagcaggccaccaaguaccuggugcagcaggagagccccuucgucaugauguccgcccccccggcgcaguacgagcugaagcacggcaccuucacgugcgccagcgaguacaccggcaacuaccagugcgggcacuacaagcacaucaccuccaaggagacccucuacugcaucgacggcgcccugcugacgaagagcagcgaguacaaggggcccaucaccgacguguucuacaaggagaacuccuacaccaccacgaucaagcccgugaccuacaagcucgacggcgucgugugcaccgagaucgaccccaagcuggacaacuacuacaagaaggacaacagcuacuucaccgagcagccgaucgaccuggugcccaaccagcccuaccccaacgccuccuucgacaacuucaaguucgucugcgacaacaucaaguucgccgacgaccucaaccagcugacgggguacaagaagccggcgagccgcgagcugaaggugaccuucuuccccgaccucaacggcgacguggucgccaucgacuacaagcacuacacccccuccuucaagaagggcgccaagcugcugcacaagcccaucguguggcacgugaacaacgccaccaacaaggcgacguacaagccgaacaccuggugcauccggugccucuggagcaccaagcccgucgggaccuccaacagcuucgacgugcugaaguccgaggacgcccagggcauggacaaccuggccugcgaggaccucaagcccgugagcgaggaggucguggagaaccccacgauccagaaggacgugcuggagugcaacgucaagaccaccgagguggugggggacaucauccugaagccggccaacaacucccucaagaucaccgaggaggucggccacacggaccugauggccgcguacguggacaacagcucccugaccaucaagaagcccaacgagcucagccgcgugcuggggcugaagacccucgccacccacggccuggccgccgucaacuccgugcccugggacacgaucgccaacuacgcgaagccguuccugaacaagguggucagcaccaccaccaacaucgugacgcgcugccucaaccgggugugcaccaacuacaugcccuacuucuucacccugcugcuccagcugugcaccuucacccgcuccacgaacagccggaucaaggccuccaugcccaccaccaucgccaagaacaccgucaagagcgugggcaaguucugccuggaggccagcuucaacuaccucaagucccccaacuucagcaagcugaucaacaucaucaucugguuccugcuccuguccgugugccuggggagccucaucuacuccacggccgcgcugggcguccugaugagcaaccucgggaugccguccuacugcaccggcuaccgcgagggcuaccugaacagcaccaacgugaccaucgccacguacugcaccggguccauccccugcagcgugugccuguccggccucgacagccuggacaccuaccccucccuggagaccauccagaucacgaucagcuccuucaagugggaccucaccgccuucgggcuggucgccgagugguuccuggccuacauccucuucacccgguucuucuacgugcugggccuggcggccaucaugcagcucuucuucagcuacuucgccgugcacuucaucuccaacagcuggcugauguggcugaucaucaaccugguccagauggcccccaucuccgcgauggugcgcauguacaucuucuucgccagcuucuacuacguguggaagagcuacguccacgugguggacgggugcaacuccagcaccugcaugaugugcuacaagcggaaccgcgccacgcgggucgagugcaccaccaucgugaacggcguccgccgguccuucuacguguacgccaacggcgggaagggcuucugcaagcuccacaacuggaacugcgugaacugcgacaccuucugcgccgggagcacguucaucuccgacgaggucgcgcgcgaccugagccugcaguucaagcggccgaucaaccccaccgaccaguccagcuacaucguggacuccgugaccgucaagaacggcagcauccaccucuacuucgacaaggccgggcagaagaccuacgagcgccacucccugagccacuucgugaaccuggacaaccuccgggccaacaacacgaagggcucccugcccaucaacgugaucgucuucgacggcaagagcaagugcgaggaguccagcgccaaguccgccagcguguacuacucccagcugaugugccagcccauccuccugcuggaccaggcgcucgugagcgacgucggggacagcgccgagguggccgugaagauguucgacgccuacgucaacaccuucuccagcaccuucaacgugccgauggagaagcugaagacccugguggccacggcggaggccgagcucgccaagaacgucucccuggacaacgugcugagcaccuucaucuccgccgcgcgccagggcuucguggacagcgacgucgagaccaaggacgugguggagugccucaagcugucccaccagagcgacaucgaggucaccggggacuccugcaacaacuacaugcugacguacaacaagguggagaacaugaccccccgggaccucggcgccugcaucgacugcagcgcccgccacaucaacgcccagguggccaagucccacaacaucgcgcugaucuggaacgucaaggacuucaugagccuguccgagcagcuccggaagcagauccgcagcgccgccaagaagaacaaccugcccuucaagcugaccugcgccaccacgcgccagguggugaacgucgugaccaccaagaucgcccucaaggggggcuga

SEQ ID NO: 18250 - RNA, 5841 nt, Artificial Sequence
  SARS-CoV-2__MT370908.1__non-structural protein 3 (NSP3) CDS gc
auggcccccaccaaggugaccuucggcgacgacacggucaucgaggugcagggguacaagagcgugaacaucaccuucgagcuggacgagcgcaucgacaagguccucaacgagaagugcuccgccuacaccguggagcugggcaccgaggugaacgaguucgcgugcgucguggccgacgccgugaucaagacgcugcagccggucagcgagcuccugaccccccuggggaucgaccucgacgagugguccauggccaccuacuaccuguucgacgagagcggcgaguucaagcuggccucccacauguacugcagcuucuacccccccgacgaggacgaggaggagggggacugcgaggaggaggaguucgagccguccacccaguacgaguacggcacggaggacgacuaccagggcaagccccucgaguucggggcgaccagcgccgugcugcagcccgaggaggagcaggaggaggacuggcuggacgacgacucccagcagaccgugggccagcaggacgggagcgaggacaaccagaccacgaccauccagaccaucgucgaggugcagccccagcucgagauggagcugaccccggugguccagacgaucgaggugaacuccuucagcggcuaccugaagcucaccgacaacguguacaucaagaacgccgacaucgucgaggaggccaagaaggugaagcccaccguggucgugaacgcggccaacguguaccugaagcacgggggcggcgucgccggggcccugaacaaggccaccaacaacgcgaugcagguggaguccgacgacuacaucgccacgaacggcccccucaaggucgggggcagcugcgugcuguccggccacaaccuggccaagcacugccuccacguggucgggcccaacgugaacaagggcgaggacauccagcugcugaagagcgccuacgagaacuucaaccagcacgaggugcuccuggccccgcugcucuccgcggggaucuucggcgccgaccccauccacagccugcgggucugcguggacaccgugcgcaccaacgucuaccuggccguguucgacaagaaccucuacgacaagcugguguccagcuuccuggagaugaagagcgagaagcaggucgagcagaagaucgccgagauccccaaggaggaggugaagcccuucaucaccgaguccaagccgagcguggagcagcggaagcaggacgacaagaagaucaaggccugcgucgaggaggugacgaccacccucgaggagaccaaguuccugacggagaaccugcuccuguacaucgacaucaacgggaaccugcaccccgacuccgcgacccucgugagcgacaucgacaucaccuuccugaagaaggacgcccccuacaucgucggcgacguggugcaggagggcguccugaccgccguggugauccccacgaagaaggccgggggcaccaccgagaugcucgccaaggcgcugcgcaaggucccgaccgacaacuacaucacgaccuaccccgggcagggccugaacggguacaccguggaggaggccaagaccgugcucaagaagugcaaguccgccuucuacauccugcccagcaucaucuccaacgagaagcaggagauccugggcaccgucagcuggaaccuccgggagaugcuggcccacgcggaggagacgcgcaagcugaugcccgugugcguggagaccaaggccaucgucuccaccauccagcggaaguacaagggcaucaagauccaggagggggugguggacuacggcgcccgcuucuacuucuacaccagcaagacgaccgucgccucccugaucaacacccucaacgaccugaacgagacccuggugacgaugccgcucggguacgugacccacggccugaaccuggaggaggccgcgcgguacaugcgcagccucaagguccccgccaccguguccgugagcucccccgacgccgucaccgccuacaacggguaccugacgagcuccagcaagacccccgaggagcacuucaucgagaccaucucccuggccggcagcuacaaggacuggagcuacuccggccagagcacccagcucgggaucgaguuccugaagcggggcgacaaguccguguacuacacgagcaacccgaccaccuuccaccuggacggggaggugaucaccuucgacaaccucaagacgcugcugucccuccgcgagguccggaccaucaagguguucaccaccguggacaacaucaaccugcacacgcaggucguggacaugagcaugaccuacggccagcaguucggccccaccuaccuggacggggcggacgugaccaagaucaagccccacaacucccacgagggcaagacguucuacguccucccgaacgacgacacccugcgcguggaggccuucgaguacuaccacaccaccgaccccagcuuccuggggcgguacauguccgcccucaaccacacgaagaaguggaaguacccccaggugaacggccugaccagcaucaagugggccgacaacaacugcuaccuggccaccgcgcuccugacccugcagcagaucgagcucaaguucaaccccccggcccugcaggacgccuacuaccgcgcccgggcgggggaggccgccaacuucugcgcccugauccucgccuacugcaacaagacggucggcgagcugggcgacgugcgcgagaccauguccuaccuguuccagcacgcgaaccucgacagcugcaagcggguccugaacguggugugcaagaccugcgggcagcagcagaccacccugaagggcgucgaggccgugauguacauggggacgcucuccuacgagcaguucaagaagggcgugcagauccccugcaccugcgggaagcaggccaccaaguaccugguccagcaggagagccccuucgugaugauguccgcccccccggcccaguacgagcugaagcacggcaccuucacgugcgcgagcgaguacaccggcaacuaccagugcgggcacuacaagcacaucaccuccaaggagacccucuacugcaucgacggcgcccugcugacgaagagcagcgaguacaaggggcccaucaccgacguguucuacaaggagaacuccuacaccaccacgaucaagcccgucaccuacaagcucgacggcguggugugcaccgagaucgaccccaagcuggacaacuacuacaagaaggacaacagcuacuucaccgagcagccgaucgaccugguccccaaccagcccuaccccaacgccuccuucgacaacuucaaguucgugugcgacaacaucaaguucgccgacgaccucaaccagcugacgggguacaagaagccggccagccgcgagcugaaggugaccuucuuccccgaccucaacggcgacgucguggcgaucgacuacaagcacuacacccccuccuucaagaagggcgccaagcugcugcacaagcccaucguguggcacgucaacaacgccaccaacaaggccacguacaagccgaacaccuggugcauccggugccucuggagcaccaagcccguggagaccuccaacagcuucgacgugcugaaguccgaggacgcgcaggggauggacaaccuggccugcgaggaccucaagcccgucagcgaggaggugguggagaaccccacgauccagaaggacguccuggagugcaacgugaagaccaccgagguggucggcgacaucauccugaagccggccaacaacucccucaagaucaccgaggagguggggcacacggaccugauggccgccuacguggacaacagcucccugaccaucaagaagcccaacgagcucagccgcguccugggccugaagacccucgcgacccacgggcuggccgccgugaacuccgugcccugggacacgaucgccaacuacgccaagccguuccugaacaaggucgugagcaccaccaccaacaucgugacgcgcugccucaaccgggucugcaccaacuacaugcccuacuucuucacccugcugcuccagcugugcaccuucacccgcuccacgaacagccggaucaaggcguccaugcccaccaccaucgccaagaacaccgugaagagcgugggcaaguucugccuggaggccagcuucaacuaccucaagucccccaacuucagcaagcugaucaacaucaucaucugguuccugcuccuguccgucugccugggcagccucaucuacuccacggccgcccugggggugcugaugagcaaccucggcaugccguccuacugcaccggguaccgcgagggcuaccugaacagcaccaacgugaccaucgcgacguacugcaccggcuccauccccugcagcgucugccuguccgggcucgacagccuggacaccuaccccucccuggagaccauccagaucacgaucagcuccuucaagugggaccucaccgccuucggccugguggccgagugguuccuggccuacauccucuucacccgguucuucuacgugcuggggcuggccgcgaucaugcagcucuucuucagcuacuucgccguccacuucaucuccaacagcuggcugauguggcugaucaucaaccuggugcagauggcccccaucuccgccauggugcgcauguacaucuucuucgcgagcuucuacuacgucuggaagagcuacgugcacguggucgacggcugcaacuccagcaccugcaugaugugcuacaagcggaaccgcgccacgcggguggagugcaccaccaucgucaacggggugcgccgguccuucuacguguacgccaacggcggcaagggguucugcaagcuccacaacuggaacugcgucaacugcgacaccuucugcgccggcagcacguucaucuccgacgagguggcccgcgaccugagccugcaguucaagcggccgaucaaccccaccgaccaguccagcuacaucguggacuccgucaccgugaagaacgggagcauccaccucuacuucgacaaggcgggccagaagaccuacgagcgccacucccugagccacuucgugaaccuggacaaccuccgggccaacaacacgaaggggucccugcccaucaacgucaucguguucgacggcaagagcaagugcgaggaguccagcgccaaguccgccagcguguacuacucccagcugaugugccagcccauccuccugcuggaccaggcccucgucagcgacgugggcgacagcgcggagguggccgucaagauguucgacgccuacgugaacaccuucuccagcaccuucaacgugccgauggagaagcugaagacccuggucgccacggccgaggcggagcucgccaagaacgugucccuggacaacgugcugagcaccuucaucuccgccgcccgccagggguucgucgacagcgacguggagaccaaggacguggucgagugccucaagcugucccaccagagcgacaucgaggugaccggcgacuccugcaacaacuacaugcugacguacaacaagguggagaacaugaccccccgggaccucggggcgugcaucgacugcagcgcccgccacaucaacgcccaggucgccaagucccacaacaucgcccugaucuggaacgugaaggacuucaugagccuguccgagcagcuccggaagcagauccgcagcgcggccaagaagaacaaccugcccuucaagcugaccugcgccaccacgcgccagguggucaacguggugaccaccaagaucgcccucaagggcggguga

SEQ ID NO: 18251 - RNA, 5841 nt, Artificial Sequence
  SARS-CoV-2__MT370953.1__non-structural protein 3 (NSP3) CDS gc
auggcccccaccaaggugaccuucggcgacgacacggucaucgaggugcagggguacaagagcgugaacaucaccuucgagcuggacgagcgcaucgacaagguccucaacgagaagugcuccgccuacaccguggagcugggcaccgaggugaacgaguucgcgugcgucguggccgacgccgugaucaagacgcugcagccggucagcgagcuccugaccccccuggggaucgaccucgacgagugguccauggccaccuacuaccuguucgacgagagcggcgaguucaagcuggccucccacauguacugcagcuucuacccccccgacgaggacgaggaggagggggacugcgaggaggaggaguucgagccguccacccaguacgaguacggcacggaggacgacuaccagggcaagccccucgaguucggggcgaccagcgccgcccugcagcccgaggaggagcaggaggaggacuggcuggacgacgacucccagcagaccgugggccagcaggacgggagcgaggacaaccagaccacgaccauccagaccaucguggagguccagccccagcucgagauggagcugaccccgguggugcagacgaucgaggucaacuccuucagcggcuaccugaagcucaccgacaacguguacaucaagaacgccgacaucguggaggaggcgaagaaggucaagcccaccgugguggucaacgccgccaacguguaccugaagcacgggggcggcguggccggggcccugaacaaggcgaccaacaacgccaugcaggucgaguccgacgacuacaucgccacgaacggcccccucaagguggggggcagcugcguccuguccggccacaaccuggccaagcacugccuccacgugguggggcccaacgucaacaagggcgaggacauccagcugcugaagagcgccuacgagaacuucaaccagcacgaggugcuccuggcgccgcugcucuccgccgggaucuucggcgccgaccccauccacagccugcgggugugcgucgacaccgugcgcaccaacguguaccuggccgucuucgacaagaaccucuacgacaagcugguguccagcuuccuggagaugaagagcgagaagcagguggagcagaagaucgccgagauccccaaggaggaggucaagcccuucaucaccgaguccaagccgagcguggagcagcggaagcaggacgacaagaagaucaaggcgugcguggaggaggucacgaccacccucgaggagaccaaguuccugacggagaaccugcuccuguacaucgacaucaacgggaaccugcaccccgacuccgccacccucgugagcgacaucgacaucaccuuccugaagaaggacgcccccuacaucgugggcgacgucgugcaggagggcgugcugaccgccgucgugauccccacgaagaaggccgggggcaccaccgagaugcucgcgaaggcccugcgcaaggugccgaccgacaacuacaucacgaccuaccccgggcagggccugaacggguacaccgucgaggaggccaagaccgugcucaagaagugcaaguccgccuucuacauccugcccagcaucaucuccaacgagaagcaggagauccugggcaccgugagcuggaaccuccgggagaugcuggcgcacgccgaggagacgcgcaagcugaugcccgucugcguggagaccaaggccaucguguccaccauccagcggaaguacaagggcaucaagauccaggagggggucguggacuacggcgcccgcuucuacuucuacaccugcaagacgaccguggccagccugaucaacacccucaacgaccugaacgagacccuggucacgaugccgcucggguacgugacccacggccugaaccuggaggaggcggcccgguacaugcgcucccucaaggugcccgccaccgucagcguguccagccccgacgccgugaccgccuacaacggguaccugacguccagcuccaagacccccgaggagcacuucaucgagaccaucagccuggcgggcuccuacaaggacuggagcuacagcggccaguccacccagcucgggaucgaguuccugaagcggggcgacaagagcgucuacuacacguccaacccgaccaccuuccaccuggacggggaggugaucaccuucgacaaccucaagacgcugcugagccuccgcgaggugcggaccaucaaggucuucaccaccguggacaacaucaaccugcacacgcagguggucgacauguccaugaccuacggccagcaguucggccccaccuaccuggacggggccgacgugaccaagaucaagccccacaacagccacgagggcaagacguucuacgugcucccgaacgacgacacccugcgcgucgaggccuucgaguacuaccacaccaccgaccccuccuuccuggggcgguacaugagcgcccucaaccacacgaagaaguggaaguacccccaggugaacggccugaccuccaucaagugggccgacaacaacugcuaccuggcgaccgcccuccugacccugcagcagaucgagcucaaguucaaccccccggcccugcaggacgccuacuaccgcgcgcgggccggggaggccgccaacuucugcgcccugauccucgcguacugcaacaagacggugggcgagcugggcgacguccgcgagaccaugagcuaccuguuccagcacgccaaccucgacuccugcaagcgggugcugaacgucgugugcaagaccugcgggcagcagcagaccacccugaagggcguggaggccgucauguacauggggacgcucagcuacgagcaguucaagaagggcgugcagauccccugcaccugcgggaagcaggccaccaaguaccuggugcagcaggagucccccuucgucaugaugagcgcccccccggcgcaguacgagcugaagcacggcaccuucacgugcgccuccgaguacaccggcaacuaccagugcgggcacuacaagcacaucaccagcaaggagacccucuacugcaucgacggcgcccugcugacgaaguccagcgaguacaaggggcccaucaccgacguguucuacaaggagaacagcuacaccaccacgaucaagcccgugaccuacaagcucgacggcgucgugugcaccgagaucgaccccaagcuggacaacuacuacaagaaggacaacuccuacuucaccgagcagccgaucgaccuggugcccaaccagcccuaccccaacgccagcuucgacaacuucaaguucgucugcgacaacaucaaguucgccgacgaccucaaccagcugacgggguacaagaagccggcgucccgcgagcugaaggugaccuucuuccccgaccucaacggcgacguggucgccaucgacuacaagcacuacacccccagcuucaagaagggcgccaagcugcugcacaagcccaucguguggcacgugaacaacgccaccaacaaggcgacguacaagccgaacaccuggugcauccggugccucugguccaccaagcccgucgagaccagcaacuccuucgacgugcugaagagcgaggacgcccaggggauggacaaccuggccugcgaggaccucaagcccguguccgaggaggucguggagaaccccacgauccagaaggacgugcuggagugcaacgucaagaccaccgagguggugggcgacaucauccugaagccggccaacaacagccucaagaucaccgaggaggucgggcacacggaccugauggccgcguacguggacaacuccagccugaccaucaagaagcccaacgagcucucccgcgugcugggccugaagacccucgccacccacgggcuggccgccgucaacagcgugcccugggacacgaucgccaacuacgcgaagccguuccugaacaagguggucuccaccaccaccaacaucgugacgcgcugccucaaccgggugugcaccaacuacaugcccuacuucuucacccugcugcuccagcugugcaccuucacccgcagcacgaacucccggaucaaggccagcaugcccaccaccaucgccaagaacaccgucaaguccgugggcaaguucugccuggaggccagcuucaacuaccucaagagccccaacuucuccaagcugaucaacaucaucaucugguuccugcuccugagcgugugccugggcucccucaucuacagcacggccgcgcuggggguccugauguccaaccucggcaugccgagcuacugcaccggguaccgcgagggcuaccugaacuccaccaacgugaccaucgccacguacugcaccggcagcauccccugcuccgugugccugagcgggcucgacucccuggacaccuaccccagccuggagaccauccagaucacgaucuccagcuucaagugggaccucaccgccuucggccuggucgccgagugguuccuggccuacauccucuucacccgguucuucuacgugcuggggcuggcggccaucaugcagcucuucuucuccuacuucgccgugcacuucaucagcaacuccuggcugauguggcugaucaucaaccugguccagauggcccccaucagcgcgauggugcgcauguacaucuucuucgccuccuucuacuacguguggaagagcuacguccacgugguggacggcugcaacagcuccaccugcaugaugugcuacaagcggaaccgcgccacgcgggucgagugcaccaccaucgugaacgggguccgccggagcuucuacguguacgccaacggcggcaagggguucugcaagcuccacaacuggaacugcgugaacugcgacaccuucugcgccggcuccacguucaucagcgacgaggucgcgcgcgaccugucccugcaguucaagcggccgaucaaccccaccgaccagagcuccuacaucguggacagcgugaccgucaagaacggguccauccaccucuacuucgacaaggccggccagaagaccuacgagcgccacagccugucccacuucgugaaccuggacaaccuccgggccaacaacacgaaggggagccugcccaucaacgugaucgucuucgacggcaaguccaagugcgaggagagcuccgccaagagcgccuccguguacuacagccagcugaugugccagcccauccuccugcuggaccaggcgcucguguccgacgucggcgacagcgccgagguggccgugaagauguucgacgccuacgucaacaccuucagcuccaccuucaacgugccgauggagaagcugaagacccugguggccacggcggaggccgagcucgccaagaacgucagccuggacaacgugcuguccaccuucaucagcgccgcgcgccagggguucguggacuccgacgucgagaccaaggacgugguggagugccucaagcugagccaccaguccgacaucgaggucaccggcgacagcugcaacaacuacaugcugacguacaacaagguggagaacaugaccccccgggaccucggggccugcaucgacugcuccgcccgccacaucaacgcccagguggccaagagccacaacaucgcgcugaucuggaacgucaaggacuucaugucccugagcgagcagcuccggaagcagauccgcuccgccgccaagaagaacaaccugcccuucaagcugaccugcgccaccacgcgccagguggugaacgucgugaccaccaagaucgcccucaagggcggguga

SEQ ID NO: 18252 - RNA, 5841 nt, Artificial Sequence
  SARS-CoV-2__MT370987.1__non-structural protein 3 (NSP3) CDS gc
auggcccccaccaaggugaccuucggcgacgacacggucaucgaggugcagggguacaagagcgugaacaucaccuucgagcuggacgagcgcaucgacaagguccucaacgagaagugcuccgccuacaccguggagcugggcaccgaggugaacgaguucgcgugcgucguggccgacgccgugaucaagacgcugcagccggucagcgagcuccugaccccccuggggaucgaccucgacgagugguccauggccaccuacuaccuguucgacgagagcggcgaguucaagcuggccucccacauguacugcagcuucuacccccccgacgaggacgaggaggagggggacugcgaggaggaggaguucgagccguccacccaguacgaguacggcacggaggacgacuaccagggcaagccccucgaguucggggcgaccagcgccgcccugcagcccgaggaggagcaggaggaggacuggcuggacgacgacucccagcagaccgugggccagcaggacgggagcgaggacaaccagaccacgaccauccagaccaucguggagguccagccccagcucgagauggagcugaccccgguggugcagacgaucgaggucaacuccuucagcggcuaccugaagcucaccgacaacguguacaucaagaacgccgacaucguggaggaggcgaagaaggucaagcccaccgugguggucaacgccgccaacguguaccugaagcacgggggcggcguggccggggcccugaacaaggcgaccaacaacgccaugcaggucgaguccgacgacuacaucgccacgaacggcccccucaagguggggggcagcugcguccuguccggccacaaccuggccaagcacugccuccacgugguggggcccaacgucaacaagggcgaggacauccagcugcugaagagcgccuacgagaacuucaaccagcacgaggugcuccuggcgccgcugcucuccgccgggaucuucggcgccgaccccauccacagccugcgggugugcgucgacaccgugcgcaccaacguguaccuggccgucuucgacaagaaccucuacgacaagcugguguccagcuuccuggagaugaagagcgagaagcagguggagcagaagaucgccgagauccccaaggaggaggucaagcccuucaucaccgaguccaagccgagcguggagcagcggaagcaggacgacaagaagaucaaggcgugcguggaggaggucacgaccacccucgaggagaccaaguuccugacggagaaccugcuccuguacaucgacaucaacgggaaccugcaccccgacuccgccacccucgugagcgacaucgacaucaccuuccugaagaaggacgcccccuacaucgugggcgacgucgugcaggagggcgugcugaccgccgucgugauccccacgaagaaggccgggggcaccaccgagaugcucgcgaaggcccugcgcaaggugccgaccgacaacuacaucacgaccuaccccgggcagggccugaacggguacaccgucgaggaggccaagaccgugcucaagaagugcaaguccgccuucuacauccugcccagcaucaucuccaacgagaagcaggagauccugggcaccgugagcuggaaccuccgggagaugcuggcgcacgccgaggagacgcgcaagcugaugcccgucugcguggagaccaaggccaucguguccaccauccagcggaaguacaagggcaucaagauccaggagggggucguggacuacggcgcccgcuucuacuucuacaccagcaagacgaccguggccucccugaucaacacccucaacgaccugaacgagacccuggucacgaugccgcucggguacgugacccacggccugaaccuggaggaggcggcccgguacaugcgcagccucaaggugcccgccaccgucuccgugagcucccccgacgccgugaccgccuacaacggguaccugacgagcuccagcaagacccccgaggagcacuucaucgagaccaucucccuggcgggcagcuacaaggacuggagcuacuccggccagagcacccagcucgggaucgaguuccugaagcggggcgacaaguccgucuacuacacgagcaacccgaccaccuuccaccuggacggggaggugaucaccuucgacaaccucaagacgcugcugucccuccgcgaggugcggaccaucaaggucuucaccaccguggacaacaucaaccugcacacgcagguggucgacaugagcaugaccuacggccagcaguucggccccaccuaccuggacggggccgacgugaccaagaucaagccccacaacucccacgagggcaagacguucuacgugcucccgaacgacgacacccugcgcgucgaggccuucgaguacuaccacaccaccgaccccagcuuccuggggcgguacauguccgcccucaaccacacgaagaaguggaaguacccccaggugaacggccugaccagcaucaagugggccgacaacaacugcuaccuggcgaccgcccuccugacccugcagcagaucgagcucaaguucaaccccccggcccugcaggacgccuacuaccgcgcgcgggccggggaggccgccaacuucugcgcccugauccucgcguacugcaacaagacggugggcgagcugggcgacguccgcgagaccauguccuaccuguuccagcacgccaaccucgacagcugcaagcgggugcugaacgucgugugcaagaccugcgggcagcagcagaccacccugaagggcguggaggccgucauguacauggggacgcucuccuacgagcaguucaagaagggcgugcagauccccugcaccugcgggaagcaggccaccaaguaccuggugcagcaggagagccccuucgucaugauguccgcccccccggcgcaguacgagcugaagcacggcaccuucacgugcgccagcgaguacaccggcaacuaccagugcgggcacuacaagcacaucaccuccaaggagacccucuacugcaucgacggcgcccugcugacgaagagcagcgaguacaaggggcccaucaccgacguguucuacaaggagaacuccuacaccaccacgaucaagcccgugaccuacaagcucgacggcgucgugugcaccgagaucgaccccaagcuggacaacuacuacaagaaggacaacagcuacuucaccgagcagccgaucgaccuggugcccaaccagcccuaccccaacgccuccuucgacaacuucaaguucgucugcgacaacaucaaguucgccgacgaccucaaccagcugacgggguacaagaagccggcgagccgcgagcugaaggugaccuucuuccccgaccucaacggcgacguggucgccaucgacuacaagcacuacacccccuccuucaagaagggcgccaagcugcugcacaagcccaucguguggcacgugaacaacgccaccaacaaggcgacguacaagccgaacaccuggugcauccggugccucuggagcaccaagcccgucgagaccuccaacagcuucgacgugcugaaguccgaggacgcccaggggauggacaaccuggccugcgaggaccucaagcccgugagcgaggaggucguggagaaccccacgauccagaaggacgugcuggagugcaacgucaagaccaccgagguggugggcgacaucauccugaagccggccaacaacucccucaagaucaccgaggaggucgggcacacggaccugauggccgcguacguggacaacagcucccugaccaucaagaagcccaacgagcucagccgcgugcugggccugaagacccucgccacccacgggcuggccgccgucaacuccgugcccugggacacgaucgccaacuacgcgaagccguuccugaacaagguggucagcaccaccaccaacaucgugacgcgcugccucaaccgggugugcaccaacuacaugcccuacuucuucacccugcugcuccagcugugcaccuucacccgcuccacgaacagccggaucaaggccuccaugcccaccaccaucgccaagaacaccgucaagagcgugggcaaguucugccuggaggccagcuucaacuaccucaagucccccaacuucagcaagcugaucaacaucaucaucugguuccugcuccuguccgugugccugggcagccucaucuacuccacggccgcgcuggggguccugaugagcaaccucggcaugccguccuacugcaccggguaccgcgagggcuaccugaacagcaccaacgugaccaucgccacguacugcaccggcuccauccccugcagcgugugccuguccgggcucgacagccuggacaccuaccccucccuggagaccauccagaucacgaucagcuccuucaagugggaccucaccgccuucggccuggucgccgagugguuccuggccuacauccucuucacccgguucuucuacgugcuggggcuggcggccaucaugcagcucuucuucagcuacuucgccgugcacuucaucuccaacagcuggcugauguggcugaucaucaaccugguccagauggcccccaucuccgcgauggugcgcauguacaucuucuucgccagcuucuacuacguguggaagagcuacguccacgugguggacggcugcaacuccagcaccugcaugaugugcuacaagcggaaccgcgccacgcgggucgagugcaccaccaucgugaacgggguccgccgguccuucuacguguacgccaacggcggcaagggguucugcaagcuccacaacuggaacugcgugaacugcgacaccuucugcgccggcagcacguucaucuccgacgaggucgcgcgcgaccugagccugcaguucaagcggccgaucaaccccaucgaccaguccagcuacaucguggacuccgugaccgucaagaacgggagcauccaccucuacuucgacaaggccggccagaagaccuacgagcgccacucccugagccacuucgugaaccuggacaaccuccgggccaacaacaccaaggggucccugcccaucaacgugaucgucuucgacggcaagagcaagugcgaggaguccagcgccaaguccgccagcguguacuacucccagcugaugugccagcccauccuccugcuggaccaggcgcucgugagcgacgucggcgacagcgccgagguggccgugaagauguucgacgccuacgucaacacguucuccagcaccuucaacgugccgauggagaagcugaagacccugguggccaccgcggaggccgagcucgccaagaacgucucccuggacaacgugcugagcacguucaucuccgccgcgcgccagggguucguggacagcgacgucgagaccaaggacgugguggagugccucaagcugucccaccagagcgacaucgaggucaccggcgacuccugcaacaacuacaugcugaccuacaacaagguggagaacaugacgccccgggaccucggggccugcaucgacugcagcgcccgccacaucaacgcccagguggccaagucccacaacaucgcgcugaucuggaacgucaaggacuucaugagccuguccgagcagcuccggaagcagauccgcagcgccgccaagaagaacaaccugcccuucaagcugaccugcgccaccacccgccagguggugaacgucgugacgaccaagaucgcccucaagggcggguga

SEQ ID NO: 18253 - RNA, 5841 nt, Artificial Sequence
  SARS-CoV-2__MT371002.1__non-structural protein 3 (NSP3) CDS gc
auggcccccaccaaggugaccuucggcgacgacacggucaucgaggugcagggguacaagagcgugaacaucaccuucgagcuggacgagcgcaucgacaagguccucaacgagaagugcuccgccuacaccguggagcugggcaccgaggugaacgaguucgcgugcgucguggccgacgccgugaucaagacgcugcagccggucagcgagcuccugaccccccuggggaucgaccucgacgagugguccauggccaccuacuaccuguucgacgagagcggcgaguucaagcuggccucccacauguacugcagcuucuacccccccgacgaggacgaggaggagggggacugcgaggaggaggaguucgagccguccacccaguacgaguacggcacggaggacgacuaccagggcaagccccucgaguucggggcgaccagcgccgcccugcagcccgaggaggagcaggaggaggacuggcuggacgacgacucccagcagaccgugggccagcaggacgggagcgaggacaaccagaccacgaccauccagaccaucguggagguccagccccagcucgagauggagcugaccccgguggugcagacgaucgaggucaacuccuucagcggcuaccugaagcucaccgacaacguguacaucaagaacgccgacaucguggaggaggcgaagaaggucaagcccaccgugguggucaacgccgccaacguguaccugaagcacgggggcggcguggccggggcccugaacaaggcgaccaacaacgccaugcaggucgaguccgacgacuacaucgccacgaacggcccccucaagguggggggcagcugcguccuguccggccacaaccuggccaagcacugccuccacgugguggggcccaacgucaacaagggcgaggacauccagcugcugaagagcgccuacgagaacuucaaccagcacgaggugcuccuggcgccgcugcucuccgccgggaucuucggcgccgaccccauccacagccugcgggugugcgucgacaccgugcgcaccaacguguaccuggccgucuucgacaagaaccucuacgacaagcugguguccagcuuccuggagaugaagagcgagaagcagguggagcagaagaucgccgagauccccaaggaggaggucaagcccuucaucaccgaguccaagccgagcguggagcagcggaagcaggacgacaagaagaucaaggcgugcguggaggaggucacgaccacccucgaggagaccaaguuccugacggagaaccugcuccuguacaucgacaucaacgggaaccugcaccccgacuccgccacccucgugagcgacaucgacaucaccuuccugaagaaggacgcccccuacaucgugggcgacgucgugcaggagggcgugcugaccgccgucgugauccccacgaagaaggccgggggcaccaccgagaugcucgcgaaggcccugcgcaaggugccgaccgacaacuacaucacgaccuaccccgggcagggccugaacggguacaccgucgaggaggccaagaccgugcucaagaagugcaaguccgccuucuacauccugcccagcaucaucuccaacgagaagcaggagauccugggcaccgugagcuggaaccuccgggagaugcuggcgcacgccgaggagacgcgcaagcugaugcccgucugcguggagaccaaggccaucguguccaccauccagcggaaguacaagggcaucaagauccaggagggggucguggacuacggcgcccgcuucuacuucuacaccagcaagacgaccguggccucccugaucaacauccucaacgaccugaacgagacccuggucaccaugccgcucggguacgugacgcacggccugaaccuggaggaggcggcccgguacaugcgcagccucaaggugcccgccaccgucuccgugagcucccccgacgccgugaccgccuacaacggguaccugaccagcuccagcaagacgcccgaggagcacuucaucgagaccaucucccuggcgggcagcuacaaggacuggagcuacuccggccagagcacccagcucgggaucgaguuccugaagcggggcgacaaguccgucuacuacaccagcaacccgacgaccuuccaccuggacggggaggugaucaccuucgacaaccucaagacccugcugucccuccgcgaggugcggacgaucaaggucuucaccaccguggacaacaucaaccugcacacccagguggucgacaugagcaugacguacggccagcaguucggccccaccuaccuggacggggccgacgugaccaagaucaagccccacaacucccacgagggcaagaccuucuacgugcucccgaacgacgacacgcugcgcgucgaggccuucgaguacuaccacaccaccgaccccagcuuccuggggcgguacauguccgcccucaaccacaccaagaaguggaaguacccccaggugaacggccugacgagcaucaagugggccgacaacaacugcuaccuggcgaccgcccuccugacccugcagcagaucgagcucaaguucaaccccccggcccugcaggacgccuacuaccgcgcgcgggccggggaggccgccaacuucugcgcccugauccucgcguacugcaacaagaccgugggcgagcugggcgacguccgcgagacgauguccuaccuguuccagcacgccaaccucgacagcugcaagcgggugcugaacgucgugugcaagaccugcgggcagcagcagaccacccugaagggcguggaggccgucauguacauggggacccucuccuacgagcaguucaagaagggcgugcagauccccugcacgugcgggaagcaggccaccaaguaccuggugcagcaggagagccccuucgucaugauguccgcccccccggcgcaguacgagcugaagcacggcaccuucaccugcgccagcgaguacacgggcaacuaccagugcgggcacuacaagcacaucaccuccaaggagacccucuacugcaucgacggcgcccugcugaccaagagcagcgaguacaaggggcccaucacggacguguucuacaaggagaacuccuacaccaccaccaucaagcccgugacguacaagcucgacggcgucgugugcaccgagaucgaccccaagcuggacaacuacuacaagaaggacaacagcuacuucaccgagcagccgaucgaccuggugcccaaccagcccuaccccaacgccuccuucgacaacuucaaguucgucugcgacaacaucaaguucgccgacgaccucaaccagcugaccggguacaagaagccggcgagccgcgagcugaaggugacguucuuccccgaccucaacggcgacguggucgccaucgacuacaagcacuacacccccuccuucaagaagggcgccaagcugcugcacaagcccaucguguggcacgugaacaacgccaccaacaaggcgaccuacaagccgaacacguggugcauccggugccucuggagcaccaagcccgucgagaccuccaacagcuucgacgugcugaaguccgaggacgcccaggggauggacaaccuggccugcgaggaccucaagcccgugagcgaggaggucguggagaaccccaccauccagaaggacgugcuggagugcaacgucaagacgaccgagguggugggcgacaucauccugaagccggccaacaacucccucaagaucaccgaggaggucgggcacaccgaccugauggccgcguacguggacaacagcucccugacgaucaagaagcccaacgagcucagccgcgugcugggccugaagacccucgccacccacgggcuggccgccgucaacuccgugcccugggacaccaucgccaacuacgcgaagccguuccugaacaagguggucagcacgaccaccaacaucgugacccgcugccucaaccgggugugcacgaacuacaugcccuacuucuucacccugcugcuccagcugugcaccuucacccgcuccaccaacagccggaucaaggccuccaugcccacgaccaucgccaagaacaccgucaagagcgugggcaaguucugccuggaggccagcuucaacuaccucaagucccccaacuucagcaagcugaucaacaucaucaucugguuccugcuccuguccgugugccugggcagccucaucuacuccaccgccgcgcuggggguccugaugagcaaccucggcaugccguccuacugcacgggguaccgcgagggcuaccugaacagcaccaacgugaccaucgccaccuacugcacgggcuccauccccugcagcgugugccuguccgggcucgacagccuggacaccuaccccucccuggagaccauccagaucaccaucagcuccuucaagugggaccucacggccuucggccuggucgccgagugguuccuggccuacauccucuucacccgguucuucuacgugcuggggcuggcggccaucaugcagcucuucuucagcuacuucgccgugcacuucaucuccaacagcuggcugauguggcugaucaucaaccugguccagauggcccccaucuccgcgauggugcgcauguacaucuucuucgccagcuucuacuacguguggaagagcuacguccacgugguggacggcugcaacuccagcaccugcaugaugugcuacaagcggaaccgcgccacccgggucgagugcacgaccaucgugaacgggguccgccgguccuucuacguguacgccaacggcggcaagggguucugcaagcuccacaacuggaacugcgugaacugcgacaccuucugcgccggcagcaccuucaucuccgacgaggucgcgcgcgaccugagccugcaguucaagcggccgaucaaccccacggaccaguccagcuacaucguggacuccgugaccgucaagaacgggagcauccaccucuacuucgacaaggccggccagaagaccuacgagcgccacucccugagccacuucgugaaccuggacaaccuccgggccaacaacaccaaggggucccugcccaucaacgugaucgucuucgacggcaagagcaagugcgaggaguccagcgccaaguccgccagcguguacuacucccagcugaugugccagcccauccuccugcuggaccaggcgcucgugagcgacgucggcgacagcgccgagguggccgugaagauguucgacgccuacgucaacacguucuccagcaccuucaacgugccgauggagaagcugaagacccugguggccaccgcggaggccgagcucgccaagaacgucucccuggacaacgugcugagcacguucaucuccgccgcgcgccagggguucguggacagcgacgucgagaccaaggacgugguggagugccucaagcugucccaccagagcgacaucgaggucaccggcgacuccugcaacaacuacaugcugaccuacaacaagguggagaacaugacgccccgggaccucggggccugcaucgacugcagcgcccgccacaucaacgcccagguggccaagucccacaacaucgcgcugaucuggaacgucaaggacuucaugagccuguccgagcagcuccggaagcagauccgcagcgccgccaagaagaacaaccugcccuucaagcugaccugcgccaccacccgccagguggugaacgucgugacgaccaagaucgcccucaagggcggguga

SEQ ID NO: 18254 - RNA, 5841 nt, Artificial Sequence
  SARS-CoV-2__MT358672.1__non-structural protein 3 (NSP3) CDS gc
auggcccccaccaaggugaccuucggcgacgacacggucaucgaggugcagggguacaagagcgugaacaucaccuucgagcuggacgagcgcaucgacaagguccucaacgagaagugcuccgccuacaccguggagcugggcaccgaggugaacgaguucgcgugcgucguggccgacgccgugaucaagacgcugcagccggucagcgagcuccugaccccccuggggaucgaccucgacgagugguccauggccaccuacuaccuguucgacgagagcggcgaguucaagcuggccucccacauguacugcagcuucuacccccccgacgaggacgaggaggagggggacugcgaggaggaggaguucgagccguccacccaguacgaguacggcacggaggacgacuaccagggcaagccccucgaguucggggcgaccagcgccgcccugcagcccgaggaggagcaggaggaggacuggcuggacgacgacucccagcagaccgugggccagcaggacgggagcgaggacaaccagaccacgaccauccagaccaucguggagguccagccccagcucgagauggagcugaccccgguggugcagacgaucgaggucaacuccuucagcggcuaccugaagcucaccgacaacguguacaucaagaacgccgacaucguggaggaggcgaagaaggucaagcccaccgugguggucaacgccgccaacguguaccugaagcacgggggcggcguggccggggcccugaacaaggcgaccaacaacgccaugcaggucgaguccgacgacuacaucgccacgaacggcccccucaagguggggggcagcugcguccuguccggccacaaccuggccaagcacugccuccacgugguggggcccaacgucaacaagggcgaggacauccagcugcugaagagcgccuacgagaacuucaaccagcacgaggugcuccuggcgccgcugcucuccgccgggaucuucggcgccgaccccauccacagccugcgggugugcgucgacaccgugcgcaccaacguguaccuggccgucuucgacaagaaccucuacgacaagcugguguccagcuuccuggagaugaagagcgagaagcagguggagcagaagaucgccgagauccccaaggaggaggucaagcccuucaucaccgaguccaagccgagcguggagcagcggaagcaggacgacaagaagaucaaggcgugcguggaggaggucacgaccacccucgaggagaccaaguuccugacggagaaccugcuccuguacaucgacaucaacgggaaccugcaccccgacuccgccacccucgugagcgacaucgacaucaccuuccugaagaaggacgcccccuacaucgugggcgacgucgugcaggagggcgugcugaccgccgucgugauccccacgaagaaggccgggggcaccaccgagaugcucgcgaaggcccugcgcaaggugccgaccgacaacuacaucacgaccuaccccgggcagggccugaacggguacaccgucgaggaggccaagaccgugcucaagaagugcaaguccgccuucuacauccugcccagcaucaucuccaacgagaagcaggagauccugggcaccgugagcuggaaccuccgggagaugcuggcgcacgccgaggagacgcgcaagcugaugcccgucugcguggagaccaaggccaucguguccaccauccagcggaaguacaagggcaucaagauccaggagggggucguggacuacggcgcccgcuucuacuucuacaccagcaagacgaccguggccucccugaucaacacccucaacgaccugaacgagacccuggucacgaugccgcucggguacgugacccacggccugaaccuggaggaggcggcccgguacaugcgcagccucaaggugcccgccaccgucuccgugagcucccccgacgccgugaccgccuacaacggguaccugacgagcuccagcaagacccccgaggagcacuucaucgagaccaucucccuggcgggcagcuacaaggacuggagcuacuccggccagagcacccagcucgggaucgaguuccugaagcggggcgacaaguccgucuacuacacgagcaacccgaccaccuuccaccuggacggggaggugaucaccuucgacaaccucaagacgcugcugucccuccgcgaggugcggaccaucaaggucuucaccaccguggacaacaucaaccugcacacgcagguggucgacaugagcaugaccuacggccagcaguucggccccaccuaccuggacggggccgacgugaccaagaucaagccccacaacucccacgagggcaagacguucuacgugcucccgaacgacgacacccugcgcgucgaggccuucgagcacuaccacaccaccgaccccagcuuccuggggcgguacauguccgcccucaaccacacgaagaaguggaaguacccccaggugaacggccugaccagcaucaagugggccgacaacaacugcuaccuggcgaccgcccuccugacccugcagcagaucgagcucaaguucaaccccccggcccugcaggacgccuacuaccgcgcgcgggccggggaggccgccaacuucugcgcccugauccucgcguacugcaacaagacggugggcgagcugggcgacguccgcgagaccauguccuaccuguuccagcacgccaaccucgacagcugcaagcgggugcugaacgucgugugcaagaccugcgggcagcagcagaccacccugaagggcguggaggccgucauguacauggggacgcucuccuacgagcaguucaagaagggcgugcagauccccugcaccugcgggaagcaggccaccaaguaccuggugcagcaggagagccccuucgucaugauguccgcccccccggcgcaguacgagcugaagcacggcaccuucacgugcgccagcgaguacaccggcaacuaccagugcgggcacuacaagcacaucaccuccaaggagacccucuacugcaucgacggcgcccugcugacgaagagcagcgaguacaaggggcccaucaccgacguguucuacaaggagaacuccuacaccaccacgaucaagcccgugaccuacaagcucgacggcgucgugugcaccgagaucgaccccaagcuggacaacuacuacaagaaggacaacagcuacuucaccgagcagccgaucgaccuggugcccaaccagcccuaccccaacgccuccuucgacaacuucaaguucgucugcgacaacaucaaguucgccgacgaccucaaccagcugacgggguacaagaagccggcgagccgcgagcugaaggugaccuucuuccccgaccucaacggcgacguggucgccaucgacuacaagcacuacacccccuccuucaagaagggcgccaagcugcugcacaagcccaucguguggcacgugaacaacgccaccaacaaggcgacguacaagccgaacaccuggugcauccggugccucuggagcaccaagcccgucgagaccuccaacagcuucgacgugcugaaguccgaggacgcccaggggauggacaaccuggccugcgaggaccucaagcccgugagcgaggaggucguggagaaccccacgauccagaaggacgugcuggagugcaacgucaagaccaccgagguggugggcgacaucauccugaagccggccaacaacucccucaagaucaccgaggaggucgggcacacggaccugauggccgcguacguggacaacagcucccugaccaucaagaagcccaacgagcucagccgcgugcugggccugaagacccucgccacccacgggcuggccgccgucaacuccgugcccugggacacgaucgccaacuacgcgaagccguuccugaacaagguggucagcaccaccaccaacaucgugacgcgcugccucaaccgggugugcaccaacuacaugcccuacaucuucacccugcugcuccagcugugcaccuucacccgcuccacgaacagccggaucaaggccuccaugcccaccaccaucgccaagaacaccgucaagagcgugggcaaguucugccuggaggccagcuucaacuaccucaagucccccaacuucagcaagcugaucaacaucaucaucugguuccugcuccuguccgugugccugggcagccucaucuacuccacggccgcgcuggggguccugaugagcaaccucggcaugccguccuacugcaccggguaccgcgagggcuaccugaacagcaccaacgugaccaucgccacguacugcaccggcuccauccccugcagcgugugccuguccgggcucgacagccuggacaccuaccccucccuggagaccauccagaucacgaucagcuccuucaagugggaccucaccgccuucggccuggucgccgagugguuccuggccuacauccucuucacccgguucuucuacgugcuggggcuggcggccaucaugcagcucuucuucagcuacuucgccgugcacuucaucuccaacagcuggcugauguggcugaucaucaaccugguccagauggcccccaucuccgcgauggugcgcauguacaucuucuucgccagcuucuacuacguguggaagagcuacguccacgugguggacggcugcaacuccagcaccugcaugaugugcuacaagcggaaccgcgccacgcgggucgagugcaccaccaucgugaacgggguccgccgguccuucuacguguacgccaacggcggcaagggguucugcaagcuccacaacuggaacugcgugaacugcgacaccuucugcgccggcagcacguucaucuccgacgaggucgcgcgcgaccugagccugcaguucaagcggccgaucaaccccaccgaccaguccagcuacaucguggacuccgugaccgucaagaacgggagcauccaccucuacuucgacaaggccggccagaagaccuacgagcgccacucccugagccacuucgugaaccuggacaaccuccgggccaacaacacgaaggggucccugcccaucaacgugaucgucuucgacggcaagagcaagugcgaggaguccagcgccaaguccgccagcguguacuacucccagcugaugugccagcccauccuccugcuggaccaggcgcucgugagcgacgucggcgacagcgccgagguggccgugaagauguucgacgccuacgucaacaccuucuccagcaccuucaacgugccgauggagaagcugaagacccugguggccacggcggaggccgagcucgccaagaacgucucccuggacaacgugcugagcaccuucaucuccgccgcgcgccagggguucguggacagcgacgucgagaccaaggacgugguggagugccucaagcugucccaccagagcgacaucgaggucaccggcgacuccugcaacaacuacaugcugacguacaacaagguggagaacaugaccccccgggaccucggggccugcaucgacugcagcgcccgccacaucaacgcccagguggccaagucccacaacaucgcgcugaucuggaacgucaaggacuucaugagccuguccgagcagcuccggaagcagauccgcagcgccgccaagaagaacaaccugcccuucaagcugaccugcgccaccacgcgccagguggugaacgucgugaccaccaagaucgcccucaagggcggguga

SEQ ID NO: 18255 - RNA, 5841 nt, Artificial Sequence
  SARS-CoV-2__MT358724.1__non-structural protein 3 (NSP3) CDS gc
auggcccccaccaaggugaccuucggcgacgacacggucaucgaggugcagggguacaagagcgugaacaucaccuucgagcuggacgagcgcaucgacaagguccucaacgagaagugcuccgccuacaccguggagcugggcaccgaggugaacgaguucgcgugcgucguggccgacgccgugaucaagacgcugcagccggucagcgagcuccugaccccccuggggaucgaccucgacgagugguccauggccaccuacuaccuguucgacgagagcggcgaguucaagcuggccucccacauguacugcagcuucuacccccccgacgaggacgaggaggagggggacugcgaggaggaggaguucgagccguccacccaguacgaguacggcacggaggacgacuaccagggcaagccccucgaguucggggcgaccagcgccgcccugcagcccgaggaggagcaggaggaggacuggcuggacgacgacucccagcagaccgugggccagcaggacgggagcgaggacaaccagaccacgaccauccagaccaucguggagguccagccccagcucgagauggagcugaccccgguggugcagacgaucgaggucaacuccuucagcggcuaccugaagcucaccgacaacguguacaucaagaacgccgacaucguggaggaggcgaagaaggucaagcccaccgugguggucaacgccgccaacguguaccugaagcacgggggcggcguggccggggcccugaacaaggcgaccaacaacgccaugcaggucgaguccgacgacuacaucgccacgaacggcccccucaagguggggggcagcugcguccuguccggccacaaccuggccaagcacugccuccacgugguggggcccaacgucaacaagggcgaggacauccagcugcugaagagcgccuacgagaacuucaaccagcacgaggugcuccuggcgccgcugcucuccgccgggaucuucggcgccgaccccauccacagccugcgggugugcgucgacaccgugcgcaccaacguguaccuggccgucuucgacaagaaccucuacgacaagcugguguccagcuuccuggagaugaagagcgagaagcagguggagcagaagaucgccgagauccccaaggaggaggucaagcccuucaucaccgaguccaagccgagcguggagcagcggaagcaggacgacaagaagaucaaggcgugcguggaggaggucacgaccacccucgaggagaccaaguuccugacggagaaccugcuccuguacaucgacaucaacgggaaccugcaccccgacuccgccacccucgugagcgacaucgacaucaccuuccugaagaaggacgcccccuacaucgugggcgacgucgugcaggagggcgugcugaccgccgucgugauccccacgaagaaggccgggggcaccaccgagaugcucgcgaaggcccugcgcaaggugccgaccgacaacuacaucacgaccuaccccgggcagggccugaacggguacaccgucgaggaggccaagaccgugcucaagaagugcaaguccgccuucuacauccugcccagcaucaucuccaacgagaagcaggagauccugggcaccgugagcuggaaccuccgggagaugcuggcgcacgccgaggagacgcgcaagcugaugcccgucugcguggagaccaaggccaucguguccaccauccagcggaaguacaagggcaucaagauccaggagggggucguggacuacggcgcccgcuucuacuucuacaccagcaagacgaccguggccucccugaucaacacccucaacgaccugaacgagacccuggucacgaugccgcucggguacgugacccacggccugaaccuggaggaggcggcccgguacaugcgcagccucaaggugcccgccaccgucuccgugagcucccccgacgccgugaccgccuacaacggguaccugacgagcuccagcaagacccccgaggagcacuucaucgagaccaucucccuggcgggcagcuacaaggacuggagcuacuccggccagagcacccagcucgggaucgaguuccugaagcggggcgacaaguccgucuacuacacgagcaacccgaccaccuuccaccuggacggggaggugaucaccuucgacaaccucaagacgcugcugucccuccgcgaggugcggaccaucaaggucuucaccaccguggacaacaucaaccugcacacgcagguggucgacaugagcaugaccuacggccagcaguucggccccaccuaccuggacggggccgacgugaccaagaucaagccccacaacucccacgagggcaagacguucuacgugcucccgaacgacgacacccugcgcgucgaggccuucgaguacuaccacaccaccgaccccagcuuccuggggcgguacauguccgcccucaaccacacgaagaaguggaaguacccccaggugaacggccugaccagcaucaagugggccgacaacaacugcuaccuggcgaccgcccuccugacccugcagcagaucgagcucaaguucaaccccccggcccugcaggacgccuacuaccgcgcgcgggccggggaggccgccaacuucugcgcccugauccucgcguacugcaacaagacggugggcgagcugggcgacguccgcgagaccauguccuaccuguuccagcacgccaaccucgacagcugcaagcgggugcugaacgucgugugcaagaccugcgggcagcagcagaccacccugaagggcguggaggccgucauguacauggggacgcucuccuacgagcaguucaagaagggcgugcagauccccugcaccugcgggaagcaggccaccaaguaccuggugcagcaggagagccccuucgucaugauguccgcccccccggcgcaguacgagcugaagcacggcaccuucacgugcgccagcgaguacaccggcaacuaccagugcgggcacuacaagcacaucaccuccaaggagacccucuacugcaucgacggcgcccugcugacgaagagcagcgaguacaaggggcccaucaccgacguguucuacaaggagaacuccuacaccaccacgaucaagcccgugaccuacaagcucgacggcgucgugugcaccgagaucgaccccaagcuggacaacuacuacaagaaggacaacagcuacuucaccgagcagccgaucgaccuggugcccaaccagcccuaccccaacgccuccuucgacaacuucaaguucgucugcgacaacaucaaguucgccgacgaccucaaccagcugacgggguacaagaagccggcgagccgcgagcugaaggugaccuucuuccccgaccucaacggcgacguggucgccaucgacuacaagcacuacacccccuccuucaagaagggcgccaagcugcugcacaagcccaucguguggcacgugaacaacgccaccaacaaggcgacguacaagccgaacaccuggugcauccggugccucuggagcaccaagcccgucgagaccuccaacagcuucgacgugcugaaguccgaggacgcccaggggauggacaaccuggccugcgaggaccucaagcccgugagcgaggaggucauggagaaccccacgauccagaaggacgugcuggagugcaacgugaagaccaccgaggucgugggcgacaucauccugaagccggccaacaacucccucaagaucaccgaggagguggggcacacggaccugauggccgcguacgucgacaacagcucccugaccaucaagaagcccaacgagcucagccgcgugcugggccugaagacccucgccacccacgggcuggccgccgugaacuccguccccugggacacgaucgccaacuacgcgaagccguuccugaacaagguggugagcaccaccaccaacaucgucacgcgcugccucaaccgggugugcaccaacuacaugcccuacuucuucacccugcugcuccagcugugcaccuucacccgcuccacgaacagccggaucaaggccuccaugcccaccaccaucgccaagaacaccgugaagagcgucggcaaguucugccuggaggccagcuucaacuaccucaagucccccaacuucagcaagcugaucaacaucaucaucugguuccugcuccuguccgugugccugggcagccucaucuacuccacggccgcgcugggggugcugaugagcaaccucggcaugccguccuacugcaccggguaccgcgagggcuaccugaacagcaccaacgucaccaucgccacguacugcaccggcuccauccccugcagcgugugccuguccgggcucgacagccuggacaccuaccccucccuggagaccauccagaucacgaucagcuccuucaagugggaccucaccgccuucggccugguggccgagugguuccuggccuacauccucuucacccgguucuucuacguccuggggcuggcggccaucaugcagcucuucuucagcuacuucgccgugcacuucaucuccaacagcuggcugauguggcugaucaucaaccuggugcagauggcccccaucuccgcgaugguccgcauguacaucuucuucgccagcuucuacuacguguggaagagcuacgugcacgucguggacggcugcaacuccagcaccugcaugaugugcuacaagcggaaccgcgccacgcggguggagugcaccaccaucgucaacggggugcgccgguccuucuacgucuacgccaacggcggcaagggguucugcaagcuccacaacuggaacugcgugaacugcgacaccuucugcgccggcagcacguucaucuccgacgagguggcgcgcgaccugagccugcaguucaagcggccgaucaaccccaccgaccaguccagcuacaucgucgacuccgugaccgugaagaacgggagcauccaccucuacuucgacaaggccggccagaagaccuacgagcgccacucccugagccacuucgucaaccuggacaaccuccgggccaacaacacgaaggggucccugcccaucaacgugaucguguucgacggcaagagcaagugcgaggaguccagcgccaaguccgccagcgucuacuacucccagcugaugugccagcccauccuccugcuggaccaggcgcucgugagcgacgugggcgacagcgccgaggucgccgugaagauguucgacgccuacgugaacaccuucuccagcaccuucaacgucccgauggagaagcugaagacccugguggccacggcggaggccgagcucgccaagaacgugucccuggacaacguccugagcaccuucaucuccgccgcgcgccagggguucguggacagcgacguggagaccaaggacgucguggagugccucaagcugucccaccagagcgacaucgaggugaccggcgacuccugcaacaacuacaugcugacguacaacaaggucgagaacaugaccccccgggaccucggggccugcaucgacugcagcgcccgccacaucaacgcccagguggccaagucccacaacaucgcgcugaucuggaacgugaaggacuucaugagccuguccgagcagcuccggaagcagauccgcagcgccgccaagaagaacaaccugcccuucaagcugaccugcgccaccacgcgccaggucgugaacguggucaccaccaagaucgcccucaagggcggguga

SEQ ID NO: 18256 - RNA, 5841 nt, Artificial Sequence
  SARS-CoV-2__MT114416.1__non-structural protein 3 (NSP3) CDS gc
auggcccccaccaaggugaccuucggcgacgacacggucaucgaggugcagggguacaagagcgugaacaucaccuucgagcuggacgagcgcaucgacaagguccucaacgagaagugcuccgccuacaccguggagcugggcaccgaggugaacgaguucgcgugcgucguggccgacgccgugaucaagacgcugcagccggucagcgagcuccugaccccccuggggaucgaccucgacgagugguccauggccaccuacuaccuguucgacgagagcggcgaguucaagcuggccucccacauguacugcagcuucuacccccccgacgaggacgaggaggagggggacugcgaggaggaggaguucgagccguccacccaguacgaguacggcacggaggacgacuaccagggcaagccccucgaguucggggcgaccagcgccgcccugcagcccgaggaggagcaggaggaggacuggcuggacgacgacucccagcagaccgugggccagcaggacgggagcgaggacaaccagaccacgaccauccagaccaucguggagguccagccccagcucgagauggagcugaccccgguggugcagacgaucgaggucaacuccuucagcggcuaccugaagcucaccgacaacguguacaucaagaacgccgacaucguggaggaggcgaagaaggucaagcccaccgugguggucaacgccgccaacguguaccugaagcacgggggcggcguggccggggcccugaacaaggcgaccaacaacgccaugcaggucgaguccgacgacuacaucgccacgaacggcccccucaagguggggggcagcugcguccuguccggccacaaccuggccaagcacugccuccacgugguggggcccaacgucaacaagggcgaggacauccagcugcugaagagcgccuacgagaacuucaaccagcacgaggugcuccuggcgccgcugcucuccgccgggaucuucggcgccgaccccauccacagccugcgggugugcgucgacaccgugcgcaccaacguguaccuggccgucuucgacaagaaccucuacgacaagcugguguccagcuuccuggagaugaagagcgagaagcagguggagcagaagaucgccgagauccccaaggaggaggucaagcccuucaucaccgaguccaagccgagcguggagcagcggaagcaggacgacaagaagaucaaggcgugcguggaggaggucacgaccacccucgaggagaccaaguuccugacggagaaccugcuccuguacaucgacaucaacgggaaccugcaccccgacuccgccacccucgugagcgacaucgacaucaccuuccugaagaaggacgcccccuacaucgugggcgacgucgugcaggagggcgugcugaccgccgucgugauccccacgaagaaggccgggggcaccaccgagaugcucgcgaaggcccugcgcaaggugccgaccgacaacuacaucacgaccuaccccgggcagggccugaacggguacaccgucgaggaggccaagaccgugcucaagaagugcaaguccgccuucuacauccugcccagcaucaucuccaacgagaagcaggagauccugggcaccgugagcuggaaccuccgggagaugcuggcgcacgccgaggagacgcgcaagcugaugcccgucugcguggagaccaaggccaucguguccaccauccagcggaaguacaagggcaucaagauccaggagggggucguggacuacggcgcccgcuucuacuucuacaccagcaagacgaccguggccucccugaucaacacccucaacgaccugaacgagacccuggucacgaugccgcucggguacgugacccacggccugaaccuggaggaggcggcccgguacaugcgcagccucaaggugcccgccaccgucuccgugagcucccccgacgccgugaccgccuacaacggguaccugacgagcuccagcaagacccccgaggagcacuucaucgagaccaucucccuggcgggcagcuacaaggacuggagcuacuccggccagagcacccagcucgggaucgaguuccugaagcggggcgacaaguccgucuacuacacgagcaacccgaccaccuuccaccuggacggggaggugaucaccuucgacaaccucaagacgcugcugucccuccgcgaggugcggaccaucaaggucuucaccaccguggacaacaucaaccugcacacgcagguggucgacaugagcaugaccuacggccagcaguucggccccaccuaccuggacggggccgacgugaccaagaucaagccccacaacucccacgagggcaagacguucuacgugcucccgaacgacgacacccugcgcgucgaggccuucgaguacuaccacaccaccgaccccagcuuccuggggcgguacauguccgcccucaaccacacgaagaaguggaaguacccccaggugaacggccugaccagcaucaagugggccgacaacaacugcuaccuggcgaccgcccuccugacccugcagcagaucgagcucaaguucaaccccccggcccugcaggacgccuacuaccgcgcgcgggccggggaggccgccaacuucugcgcccugauccucgcguacugcaacaagacggugggcgagcugggcgacguccgcgagaccauguccuaccuguuccagcacgccaaccucgacagcugcaagcgggugcugaacgucgugugcaagaccugcgggcagcagcagaccacccugaagggcguggaggccgucauguacauggggacgcucuccuacgagcaguucaagaagggcgugcagauccccugcaccugcgggaagcaggccaccaaguaccuggugcagcaggagagccccuucgucaugauguccgcccccccggcgcaguacgagcugaagcacggcaccuucacgugcgccagcgaguacaccggcaacuaccagugcgggcacuacaagcacaucaccuccaaggagacccucuacugcaucgacggcgcccugcugacgaagagcagcgaguacaaggggcccaucaccgacguguucuacaaggagaacuccuacaccaccacgaucaagcccgugaccuacaagcucgacggcgucgugugcaccgagaucgaccccaagcuggacaacuacuacaagaaggacaacagcuacuucaccgagcagccgaucgaccuggugcccaaccagcccuaccccaacgccuccuucgacaacuucaaguucgucugcgacaacaucaaguucgccgacgaccucaaccagcugacgggguacaagaagccggcgagccgcgagcugaaggugaccuucuuccccgaccucaacggcgacguggucgccaucgacuacaagcacuacacccccuccuucaagaagggcgccaagcugcugcacaagcccaucguguggcacgugaacaacgccaccaacaaggcgacguacaagccgaacaccuggugcauccggugccucuggagcaccaagcccgucgagaccuccaacagcuucgacgugcugaaguccgaggacgcccaggggauggacaaccuggccugcgaggaccucaagcccgugagcgaggaggucguggagaaccccacgauccagaaggacgugcuggagugcaacgucaagaccaccgagguggugggcgacaucauccugaagcucgccaacaacucccugaagaucaccgaggaggucgggcacacggaccugauggccgcguacguggacaacagcucccucaccaucaagaagccgaacgagcugagccgcgugcugggccucaagacccuggccacccacgggcuggccgccgucaacuccgugcccugggacacgaucgccaacuacgcgaagcccuuccucaacaagguggucagcaccaccaccaacaucgugacgcgcugccugaaccgggugugcaccaacuacaugccguacuucuucacccugcuccugcagcugugcaccuucacccgcuccacgaacagccggaucaaggccuccaugcccaccaccaucgccaagaacaccgucaagagcgugggcaaguucugccucgaggccagcuucaacuaccugaagucccccaacuucagcaagcugaucaacaucaucaucugguuccuccugcuguccgugugccucggcagccugaucuacuccacggccgcgcuggggguccucaugagcaaccugggcaugcccuccuacugcaccggguaccgcgagggcuaccugaacagcaccaacgugaccaucgccacguacugcaccggcuccaucccgugcagcgugugccucuccgggcuggacagccuggacaccuaccccucccucgagaccauccagaucacgaucagcuccuucaagugggaccugaccgccuucggccuggucgccgagugguuccucgccuacauccuguucacccgguucuucuacgugcuggggcucgcggccaucaugcagcuguucuucagcuacuucgccgugcacuucaucuccaacagcuggcugauguggcugaucaucaaccucguccagauggcccccaucuccgcgauggugcgcauguacaucuucuucgccagcuucuacuacguguggaagagcuacguccacgugguggacggcugcaacuccagcaccugcaugaugugcuacaagcggaaccgcgccacgcgggucgagugcaccaccaucgugaacgggguccgccgguccuucuacguguacgccaacggcggcaagggguucugcaagcugcacaacuggaacugcgugaacugcgacaccuucugcgccggcagcacguucaucuccgacgaggucgcgcgcgaccugagccuccaguucaagcggcccaucaacccgaccgaccaguccagcuacaucguggacuccgugaccgucaagaacgggagcauccaccuguacuucgacaaggccggccagaagaccuacgagcgccacucccugagccacuucgugaaccucgacaaccugcgggccaacaacacgaaggggucccugcccaucaacgugaucgucuucgacggcaagagcaagugcgaggaguccagcgccaaguccgccagcguguacuacucccagcucaugugccagcccauccugcugcucgaccaggcgcuggugagcgacgucggcgacagcgccgagguggccgugaagauguucgacgccuacgucaacaccuucuccagcaccuucaacgugcccauggagaagcugaagacccucguggccacggcggaggccgagcuggccaagaacgucucccuggacaacgugcucagcaccuucaucuccgccgcgcgccagggguucguggacagcgacgucgagaccaaggacgugguggagugccugaagcugucccaccagagcgacaucgaggucaccggcgacuccugcaacaacuacaugcucacguacaacaagguggagaacaugaccccgcgggaccugggggccugcaucgacugcagcgcccgccacaucaacgcccagguggccaagucccacaacaucgcgcugaucuggaacgucaaggacuucaugagccucuccgagcagcugcggaagcagauccgcagcgccgccaagaagaacaaccugcccuucaagcucaccugcgccaccacgcgccagguggugaacgucgugaccaccaagaucgcccugaagggcggguga

SEQ ID NO: 18257 - RNA, 5841 nt, Artificial Sequence
  SARS-CoV-2__MT350247.1__non-structural protein 3 (NSP3) CDS gc
auggcccccaccaaggugaccuucggcgacgacacggucaucgaggugcagggguacaagagcgugaacaucaccuucgagcuggacgagcgcaucgacaagguccucaacgagaagugcuccgccuacaccguggagcugggcaccgaggugaacgaguucgcgugcgucguggccgacgccgugaucaagacgcugcagccggucagcgagcuccugaccccccuggggaucgaccucgacgagugguccauggccaccuacuaccuguucgacgagagcggcgaguucaagcuggccucccacauguacugcagcuucuacccccccgacgaggacgaggaggagggggacugcgaggaggaggaguucgagccguccacccaguacgaguacggcacggaggacgacuaccagggcaagccccucgaguucggggcgaccagcgccgcccugcagcccgaggaggagcaggaggaggacuggcuggacgacgacucccagcagaccgugggccagcaggacgggagcgaggacaaccagaccacgaccauccagaccaucguggagguccagccccagcucgagauggagcugaccccgguggugcagacgaucgaggucaacuccuucagcggcuaccugaagcucaccgacaacguguacaucaagaacgccgacaucguggaggaggcgaagaaggucaagcccaccgugguggucaacgccgccaacguguaccugaagcacgggggcggcguggccggggcccugaacaaggcgaccaacaacgccaugcaggucgaguccgacgacuacaucgccacgaacggcccccucaagguggggggcagcugcguccuguccggccacaaccuggccaagcacugccuccacgugguggggcccaacgucaacaagggcgaggacauccagcugcugaagagcgccuacgagaacuucaaccagcacgaggugcuccuggcgccgcugcucuccgccgggaucuucggcgccgaccccauccacagccugcgggugugcgucgacaccgugcgcaccaacguguaccuggccgucuucgacaagaaccucuacgacaagcugguguccagcuuccuggagaugaagagcgagaagcagguggagcagaagaucgccgagauccccaaggaggaggucaagcccuucaucaccgaguccaagagcuccguggagcagcggaagcaggacgacaagaagaucaaggcgugcguggaggaggucacgaccacccucgaggagaccaaguuccugacggagaaccugcuccuguacaucgacaucaacgggaaccugcacccggacagcgccacccucguguccgacaucgacaucaccuuccugaagaaggacgcccccuacaucgugggcgacgucgugcaggagggcgugcugaccgccgucgugauccccacgaagaaggccgggggcaccaccgagaugcucgcgaaggcccugcgcaaggugcccaccgacaacuacaucacgaccuacccggggcagggccugaacggguacaccgucgaggaggccaagaccgugcucaagaagugcaagagcgccuucuacauccugcccuccaucaucagcaacgagaagcaggagauccugggcaccguguccuggaaccuccgggagaugcuggcgcacgccgaggagacgcgcaagcugaugcccgucugcguggagaccaaggccaucgugagcaccauccagcggaaguacaagggcaucaagauccaggagggggucguggacuacggcacccgcuucuacuucuacacguccaagaccaccguggccagccugaucaacacccucaacgaccugaacgagacgcuggucaccaugccccucggguacgugacccacggccugaaccuggaggaggccgcgcgguacaugcgcucccucaaggugccggccaccgucagcguguccagccccgacgccgugacggccuacaacggguaccugaccuccagcuccaagacccccgaggagcacuucaucgagaccaucagccuggccggcagcuacaaggacugguccuacagcggccaguccacgcagcucgggaucgaguuccugaagcggggcgacaagagcgucuacuacaccuccaaccccaccaccuuccaccuggacggggaggugaucacguucgacaaccucaagacccugcugagccuccgcgaggugcggaccaucaaggucuucaccacgguggacaacaucaaccugcacacccagguggucgacauguccaugaccuacggccagcaguucggcccgaccuaccuggacggggcggacgugacgaagaucaagccccacaacagccacgagggcaagaccuucuacgugcuccccaacgacgacacccugcgcgucgaggccuucgaguacuaccacaccacggacccguccuuccuggggcgguacaugagcgcccucaaccacaccaagaaguggaaguacccccaggugaacggccugaccuccaucaagugggccgacaacaacugcuaccuggccaccgcgcuccugacgcugcagcagaucgagcucaaguucaacccccccgcccugcaggacgccuacuaccgcgcccgggcgggggaggccgccaacuucugcgcccugauccucgccuacugcaacaagaccgugggcgagcugggcgacguccgcgagaccaugagcuaccuguuccagcacgcgaaccucgacuccugcaagcgggugcugaacgucgugugcaagaccugcgggcagcagcagaccacgcugaagggcguggaggccgucauguacauggggacccucagcuacgagcaguucaagaagggcgugcagaucccgugcaccugcgggaagcaggccaccaaguaccuggugcagcaggagucccccuucgucaugaugagcgccccccccgcccaguacgagcugaagcacggcacguucaccugcgcguccgaguacaccggcaacuaccagugcgggcacuacaagcacaucaccagcaaggagacgcucuacugcaucgacggcgcccugcugaccaagagcuccgaguacaaggggccgaucaccgacguguucuacaaggagaacagcuacaccacgaccaucaagcccgugaccuacaagcucgacggcgucgugugcaccgagaucgaccccaagcuggacaacuacuacaagaaggacaacuccuacuucacggagcagcccaucgaccuggugccgaaccagcccuaccccaacgccagcuucgacaacuucaaguucgucugcgacaacaucaaguucgccgacgaccucaaccagcugaccggguacaagaagcccgccucccgcgagcugaaggugaccuucuucccggaccucaacggcgacguggucgcgaucgacuacaagcacuacacccccagcuucaagaagggcgccaagcugcugcacaagcccaucguguggcacgugaacaacgccacgaacaaggccaccuacaagcccaacaccuggugcauccggugccucugguccaccaagccggucgagacgagcaacuccuucgacgugcugaagagcgaggacgcgcaggggauggacaaccuggccugcgaggaccucaagcccguguccgaggaggucguggagaaccccaccauccagaaggacgugcuggagugcaacgucaagaccaccgagguggugggcgacaucauccugaagcccgccaacaacagccucaagaucacggaggaggucgggcacaccgaccugauggccgccuacguggacaacuccagccugaccaucaagaagccgaacgagcucucccgcgugcugggccugaagacccucgcgacgcacgggcuggccgccgucaacagcgugcccugggacaccaucgccaacuacgccaagcccuuccugaacaagguggucuccaccaccacgaacaucgugacccgcugccucaaccgggugugcaccaacuacaugccguacuucuucacccugcugcuccagcugugcaccuucacgcgcagcaccaacucccggaucaaggcgagcaugcccaccaccaucgccaagaacacggucaagagcgugggcaaguucugccuggaggccuccuucaacuaccucaagagccccaacuucuccaagcugaucaacaucaucaucugguuccugcuccugagcgugugccugggcucccucaucuacagcaccgccgcccuggggguccugauguccaaccucggcaugcccagcuacugcaccggguaccgcgagggcuaccugaacuccaccaacgugacgaucgcgaccuacugcaccggcagcaucccgugcuccgugugccugagcgggcucgacucccuggacaccuaccccagccuggagacgauccagaucaccaucuccagcuucaagugggaccucaccgccuucggccuggucgccgagugguuccuggccuacauccucuucacccgguucuucuacgugcuggggcuggccgcgaucaugcagcucuucuucuccuacuucgccgugcacuucaucagcaacuccuggcugauguggcugaucaucaaccugguccagauggcccccaucagcgccauggugcgcauguacaucuucuucgcgagcuucuacuacguguggaaguccuacguccacgugguggacggcugcaacagcuccacgugcaugaugugcuacaagcggaaccgcgccacccgggucgagugcaccaccaucgugaacgggguccgccggagcuucuacguguacgccaacggcggcaagggguucugcaagcuccacaacuggaacugcgugaacugcgacacguucugcgccggcuccaccuucaucagcgacgaggucgcccgcgaccugucccugcaguucaagcggcccaucaacccgaccgaccagagcuccuacaucguggacagcgugaccgucaagaacggguccauccaccucuacuucgacaaggcgggccagaagacguacgagcgccacagccugucccacuucgugaaccuggacaaccuccgggccaacaacaccaaggggagccugcccaucaacgugaucgucuucgacggcaaguccaagugcgaggagagcuccgccaagagcgccuccguguacuacagccagcugaugugccagcccauccuccugcuggaccaggcccucgugagcgacgucggcgacuccgcggagguggccgugaagauguucgacgccuacgucaacaccuucagcuccaccuucaacgugcccauggagaagcugaagacgcugguggccaccgccgaggcggagcucgccaagaacgucagccuggacaacgugcuguccaccuucaucagcgccgcccgccagggguucguggacuccgacgucgagaccaaggacgugguggagugccucaagcugagccaccaguccgacaucgaggucacgggcgacagcugcaacaacuacaugcugaccuacaacaagguggagaacaugaccccgcgggaccucggggcgugcaucgacugcuccgcccgccacaucaacgcccagguggccaagagccacaacaucgcccugaucuggaacgucaaggacuucaugucccugagcgagcagcuccggaagcagauccgcuccgcggccaagaagaacaaccugcccuucaagcugaccugcgccacgacccgccagguggugaacgucgugaccaccaagaucgcccucaagggcggguga

SEQ ID NO: 18258 - RNA, 5841 nt, Artificial Sequence
  SARS-CoV-2__MT345816.1__non-structural protein 3 (NSP3) CDS gc
auggcccccaccaaggugaccuucggcgacgacacggucaucgaggugcagggguacaagagcgugaacaucaccuucgagcuggacgagcgcaucgacaagguccucaacgagaagugcuccgccuacaccguggagcugggcaccgaggugaacgaguucgcgugcgucguggccgacgccgugaucaagacgcugcagccggucagcgagcuccugaccccccuggggaucgaccucgacgagugguccauggccaccuacuaccuguucgacgagagcggcgaguucaagcuggccucccacauguacugcagcuucuacccccccgacgaggacgaggaggagggggacugcgaggaggaggaguucgagccguccacccaguacgaguacggcacggaggacgacuaccagggcaagccccucgaguucggggcgaccagcgccgcccugcagcccgaggaggagcaggaggaggacuggcuggacgacgacucccagcagaccgugggccagcaggacgggagcgaggacaaccagaccacgaccauccagaccaucguggagguccagccccagcucgagauggagccgacccccguggugcagacgaucgaggucaacuccuucagcggcuaccugaagcugaccgacaacguguacaucaagaacgccgacaucguggaggaggcgaagaaggucaagcccaccgugguggucaacgccgccaacguguaccucaagcacgggggcggcguggccggggcccugaacaaggcgaccaacaacgccaugcaggucgaguccgacgacuacaucgccacgaacggcccccugaagguggggggcagcugcguccucuccggccacaaccuggccaagcacugccugcacgugguggggccgaacgucaacaagggcgaggacauccagcuccugaagagcgccuacgagaacuucaaccagcacgaggugcugcucgcgccccugcuguccgccgggaucuucggcgccgaccccauccacagccuccgggugugcgucgacaccgugcgcaccaacguguaccuggccgucuucgacaagaaccuguacgacaagcucguguccagcuuccuggagaugaagagcgagaagcagguggagcagaagaucgccgagauccccaaggaggaggucaagccguucaucaccgaguccaagcccagcguggagcagcggaagcaggacgacaagaagaucaaggcgugcguggaggaggucacgaccacccuggaggagaccaaguuccucacggagaaccugcugcucuacaucgacaucaacgggaaccugcaccccgacuccgccacccuggugagcgacaucgacaucaccuuccucaagaaggacgcccccuacaucgugggcgacgucgugcaggagggcgugcugaccgccgucgugaucccgacgaagaaggccgggggcaccaccgagaugcuggcgaaggcccuccgcaaggugcccaccgacaacuacaucacgaccuaccccgggcagggccugaacggguacaccgucgaggaggccaagaccgugcugaagaagugcaaguccgccuucuacauccuccccagcaucaucuccaacgagaagcaggagauccugggcaccgugagcuggaaccugcgggagaugcucgcgcacgccgaggagacgcgcaagcugaugccggucugcguggagaccaaggccaucguguccaccauccagcggaaguacaagggcaucaagauccaggagggggucguggacuacggcgcccgcuucuacuucuacaccagcaagacgaccguggccucccugaucaacacccugaacgaccucaacgagacccuggucacgaugccccugggguacgugacccacggccucaaccuggaggaggcggcccgguacaugcgcagccugaaggugcccgccaccgucuccgugagcucccccgacgccgugaccgccuacaacggguaccucacgagcuccagcaagaccccggaggagcacuucaucgagaccaucucccuggcgggcagcuacaaggacuggagcuacuccggccagagcacccagcuggggaucgaguuccucaagcggggcgacaaguccgucuacuacacgagcaaccccaccaccuuccaccuggacggggaggugaucaccuucgacaaccugaagacgcuccugucccugcgcgaggugcggaccaucaaggucuucaccaccguggacaacaucaaccuccacacgcagguggucgacaugagcaugaccuacggccagcaguucggccccaccuaccuggacggggccgacgugaccaagaucaagccgcacaacucccacgagggcaagacguucuacgugcugcccaacgacgacacccuccgcgucgaggccuucgaguacuaccacaccaccgaccccagcuuccuggggcgguacauguccgcccugaaccacacgaagaaguggaaguacccccaggugaacggccucaccagcaucaagugggccgacaacaacugcuaccuggcgaccgcccugcucacccugcagcagaucgagcugaaguucaacccgcccgcccuccaggacgccuacuaccgcgcgcgggccggggaggccgccaacuucugcgcccugauccuggcguacugcaacaagacggugggcgagcucggcgacguccgcgagaccauguccuaccuguuccagcacgccaaccuggacagcugcaagcgggugcucaacgucgugugcaagaccugcgggcagcagcagaccacccugaagggcguggaggccgucauguacauggggacgcuguccuacgagcaguucaagaagggcgugcagauccccugcaccugcgggaagcaggccaccaaguaccucgugcagcaggagagccccuucgucaugauguccgccccgcccgcgcaguacgagcugaagcacggcaccuucacgugcgccagcgaguacaccggcaacuaccagugcgggcacuacaagcacaucaccuccaaggagacccuguacugcaucgacggcgcccuccugacgaagagcagcgaguacaaggggcccaucaccgacguguucuacaaggagaacuccuacaccaccacgaucaagcccgugaccuacaagcuggacggcgucgugugcaccgagaucgacccgaagcucgacaacuacuacaagaaggacaacagcuacuucaccgagcagcccaucgaccuggugcccaaccagcccuacccgaacgccuccuucgacaacuucaaguucgucugcgacaacaucaaguucgccgacgaccugaaccagcucacgggguacaagaagcccgcgagccgcgagcugaaggugaccuucuuccccgaccugaacggcgacguggucgccaucgacuacaagcacuacacccccuccuucaagaagggcgccaagcuccugcacaagccgaucguguggcacgugaacaacgccaccaacaaggcgacguacaagcccaacaccuggugcauccggugccuguggagcaccaagcccgucgagaccuccaacagcuucgacgugcucaaguccgaggacgcccaggggauggacaaccuggccugcgaggaccugaagcccgugagcgaggaggucguggagaacccgacgauccagaaggacgugcucgagugcaacgucaagaccaccgagguggugggcgacaucauccugaagcccgccaacaacucccugaagaucaccgaggaggucgggcacacggaccucauggccgcguacguggacaacagcucccugaccaucaagaagcccaacgagcugagccgcgugcucggccugaagacccuggccacccacgggcucgccgccgucaacuccgugccgugggacacgaucgccaacuacgcgaagcccuuccugaacaagguggucagcaccaccaccaacaucgugacgcgcugccugaaccgggugugcaccaacuacaugcccuacuucuucacccuccugcugcagcucugcaccuucacccgcuccacgaacagccggaucaaggccuccaugcccaccaccaucgccaagaacaccgucaagagcgugggcaaguucugccuggaggccagcuucaacuaccugaaguccccgaacuucagcaagcucaucaacaucaucaucugguuccugcugcucuccgugugccugggcagccugaucuacuccacggccgcgcucgggguccugaugagcaaccugggcaugcccuccuacugcaccggguaccgcgagggcuaccucaacagcaccaacgugaccaucgccacguacugcaccggcuccauccccugcagcgugugccuguccgggcuggacagccucgacaccuaccccucccuggagaccauccagaucacgaucagcuccuucaagugggaccugaccgccuucggccucgucgccgagugguuccuggccuacauccuguucacccgguucuucuacgugcucgggcuggcggccaucaugcagcuguucuucagcuacuucgccgugcacuucaucuccaacagcuggcucauguggcugaucaucaaccugguccagauggccccgaucuccgcgauggugcgcauguacaucuucuucgccagcuucuacuacguguggaagagcuacguccacgugguggacggcugcaacuccagcaccugcaugaugugcuacaagcggaaccgcgccacgcgggucgagugcaccaccaucgugaacgggguccgccgguccuucuacguguacgccaacggcggcaagggguucugcaagcugcacaacuggaacugcgugaacugcgacaccuucugcgccggcagcacguucaucuccgacgaggucgcgcgcgaccucagccugcaguucaagcggcccaucaaccccaccgaccaguccagcuacaucguggacuccgugaccgucaagaacgggagcauccaccuguacuucgacaaggccggccagaagaccuacgagcgccacucccucagccacuucgugaaccuggacaaccugcgggccaacaacacgaaggggucccuccccaucaacgugaucgucuucgacggcaagagcaagugcgaggaguccagcgccaaguccgccagcguguacuacucccagcugaugugccagccgauccugcuccuggaccaggcgcuggugagcgacgucggcgacagcgccgagguggccgugaagauguucgacgccuacgucaacaccuucuccagcaccuucaacgugcccauggagaagcucaagacccugguggccacggcggaggccgagcuggccaagaacgucucccucgacaacgugcugagcaccuucaucuccgccgcgcgccagggguucguggacagcgacgucgagaccaaggacgugguggagugccugaagcucucccaccagagcgacaucgaggucaccggcgacuccugcaacaacuacaugcugacguacaacaagguggagaacaugaccccccgggaccugggggccugcaucgacugcagcgcccgccacaucaacgcccagguggccaagucccacaacaucgcgcucaucuggaacgucaaggacuucaugagccuguccgagcagcugcggaagcagauccgcagcgccgccaagaagaacaaccuccccuucaagcugaccugcgccaccacgcgccagguggugaacgucgugaccaccaagaucgcccugaagggcggguga

SEQ ID NO: 18259 - RNA, 5841 nt, Artificial Sequence
  SARS-CoV-2__MT345832.1__non-structural protein 3 (NSP3) CDS gc
auggcccccaccaaggugaccuucggcgacgacacggucaucgaggugcagggguacaagagcgugaacaucaccuucgagcuggacgagcgcaucgacaagguccucaacgagaagugcuccgccuacaccguggagcugggcaccgaggugaacgaguucgcgugcgucguggccgacgccgugaucaagacgcugcagccggucagcgagcuccugaccccccuggggaucgaccucgacgagugguccauggccaccuacuaccuguucgacgagagcggcgaguucaagcuggccucccacauguacugcagcuucuacccccccgacgaggacgaggaggagggggacugcgaggaggaggaguucgagccguccacccaguacgaguacggcacggaggacgacuaccagggcaagccccucgaguucggggcgaccagcgccgcccugcagcccgaggaggagcaggaggaggacuggcuggacgacgacucccagcagaccgugggccagcaggacgggagcgaggacaaccagaccacgaccauccagaccaucguggagguccagccccagcucgagauggagcugaccccgguggugcagacgaucgaggucaacuccuucagcggcuaccugaagcucaccgacaacguguacaucaagaacgccgacaucguggaggaggcgaagaaggucaagcccaccgugguggucaacgccgccaacguguaccugaagcacgggggcggcguggccggggcccugaacaaggcgaccaacaacgccaugcaggucgaguccgacgacuacaucgccacgaacggcccccucaagguggggggcagcugcguccuguccggccacaaccuggccaagcacugccuccacgugguggggcccaacgucaacaagggcgaggacauccagcugcugaagagcgccuacgagaacuucaaccagcacgaggugcuccuggcgccgcugcucuccgccgggaucuucggcgccgaccccauccacagccugcgggugugcgucgacaccgugcgcaccaacguguaccuggccgucuucgacaagaaccucuacgacaagcugguguccagcuuccuggagaugaagagcgagaagcagguggagcagaagaucgccgagauccccaaggaggaggucaagcccuucaucaccgaguccaagccgagcguggagcagcggaagcaggacgacaagaagaucaaggcgugcguggaggaggucacgaccacccucgaggagaccaaguuccugacggagaaccugcuccuguacaucgacaucaacgggaaccugcaccccgacuccgccacccucgugagcgacaucgacaucaccuuccugaagaaggacgcccccuacaucgugggcgacgucgugcaggagggcgugcugaccgccgucgugauccccacgaagaaggccgggggcaccaccgagaugcucgcgaaggcccugcgcaaggugccgaccgacuccuacaucacgaccuaccccgggcagggccugaacggguacaccgucgaggaggccaagaccgugcucaagaagugcaagagcgccuucuacauccugcccuccaucaucagcaacgagaagcaggagauccugggcaccguguccuggaaccuccgggagaugcuggcgcacgccgaggagacgcgcaagcugaugcccgucugcguggagaccaaggccaucgugagcaccauccagcggaaguacaagggcaucaagauccaggagggggucguggacuacggcgcccgcuucuacuucuacaccuccaagacgaccguggccagccugaucaacacccucaacgaccugaacgagacccuggucacgaugccgcucggguacgugacccacggccugaaccuggaggaggcggcccgguacaugcgcucccucaaggugcccgccaccgucagcguguccagccccgacgccgugaccgccuacaacggguaccugacguccagcuccaagacccccgaggagcacuucaucgagaccaucagccuggcgggcagcuacaaggacugguccuacagcggccaguccacccagcucgggaucgaguuccugaagcggggcgacaagagcgucuacuacacguccaacccgaccaccuuccaccuggacggggaggugaucaccuucgacaaccucaagacgcugcugagccuccgcgaggugcggaccaucaaggucuucaccaccguggacaacaucaaccugcacacgcagguggucgacauguccaugaccuacggccagcaguucggccccaccuaccuggacggggccgacgugaccaagaucaagccccacaacagccacgagggcaagacguucuacgugcucccgaacgacgacacccugcgcgucgaggccuucgaguacuaccacaccaccgaccccuccuuccuggggcgguacaugagcgcccucaaccacacgaagaaguggaaguacccccaggugaacggccugaccuccaucaagugggccgacaacaacugcuaccuggcgaccgcccuccugacccugcagcagaucgagcucaaguucaaccccccggcccugcaggacgccuacuaccgcgcgcgggccggggaggccgccaacuucugcgcccugauccucgcguacugcaacaagacggugggcgagcugggcgacguccgcgagaccaugagcuaccuguuccagcacgccaaccucgacuccugcaagcgggugcugaacgucgugugcaagaccugcgggcagcagcagaccacccugaagggcguggaggccgucauguacauggggacgcucagcuacgagcaguucaagaagggcgugcagauccccugcaccugcgggaagcaggccaccaaguaccuggugcagcaggagucccccuucgucaugaugagcgcccccccggcgcaguacgagcugaagcacggcaccuucacgugcgccuccgaguacaccggcaacuaccagugcgggcacuacaagcacaucaccagcaaggagacccucuacugcaucgacggcgcccugcugacgaagagcuccgaguacaaggggcccaucaccgacguguucuacaaggagaacagcuacaccaccacgaucaagcccgugaccuacaagcucgacggcgucgugugcaccgagaucgaccccaagcuggacaacuacuacaagaaggacaacuccuacuucaccgagcagccgaucgaccuggugcccaaccagcccuaccccaacgccagcuucgacaacuucaaguucgucugcgacaacaucaaguucgccgacgaccucaaccagcugacgggguacaagaagccggcgucccgcgagcugaaggugaccuucuuccccgaccucaacggcgacguggucgccaucgacuacaagcacuacacccccagcuucaagaagggcgccaagcugcugcacaagcccaucguguggcacgugaacaacgccaccaacaaggcgacguacaagccgaacaccuggugcauccggugccucugguccaccaagcccgucgagaccagcaacuccuucgacgugcugaagagcgaggacgcccaggggauggacaaccuggccugcgaggaccucaagcccguguccgaggaggucguggagaaccccacgauccagaaggacgugcuggagugcaacgucaagaccaccgagguggugggcgacaucauccugaagccggccaacaacagccucaagaucaccgaggaggucgggcacacggaccugauggccgcguacguggacaacuccagccugaccaucaagaagcccaacgagcucucccgcgugcugggccugaagacccucgccacccacgggcuggccgccgucaacagcgugcccugggacacgaucgccaacuacgcgaagccguuccugaacaagguggucuccaccaccaccaacaucgugacgcgcugccucaaccgggugugcaccaacuacaugcccuacuucuucacccugcugcuccagcugugcaccuucacccgcagcacgaacucccggaucaaggccagcaugcccaccaccaucgccaagaacaccgucaagagcgugggcaaguucugccuggaggccuccuucaacuaccucaagagccccaacuucuccaagcugaucaacaucaucaucugguuccugcuccugagcgugugccugggcucccucaucuacagcacggccgcgcuggggguccugauguccaaccucggcaugccgagcuacugcaccggguaccgcgagggcuaccugaacuccaccaacgugaccaucgccacguacugcaccggcagcauccccugcuccgugugccugagcgggcucgacucccuggacaccuaccccagccuggagaccauccagaucacgaucuccagcuucaagugggaccucaccgccuucggccuggucgccgagugguuccuggccuacauccucuucacccgguucuucuacgugcuggggcuggcggccaucaugcagcucuucuucuccuacuucgccgugcacuucaucagcaacuccuggcugauguggcugaucaucaaccugguccagauggcccccaucagcgcgauggugcgcauguacaucuucuucgccagcuucuacuacguguggaaguccuacguccacgugguggacggcugcaacagcuccaccugcaugaugugcuacaagcggaaccgcgccacgcgggucgagugcaccaccaucgugaacgggguccgccggagcuucuacguguacgccaacggcggcaagggguucugcaagcuccacaacuggaacugcgugaacugcgacaccuucugcgccggcuccacguucaucagcgacgaggucgcgcgcgaccugucccugcaguucaagcggccgaucaaccccaccgaccagagcuccuacaucguggacagcgugaccgucaagaacggguccauccaccucuacuucgacaaggccggccagaagaccuacgagcgccacagccugucccacuucgugaaccuggacaaccuccgggccaacaacacgaaggggagccugcccaucaacgugaucgucuucgacggcaaguccaagugcgaggagagcuccgccaagagcgccuccguguacuacagccagcugaugugccagcccauccuccugcuggaccaggcgcucgugagcgacgucggcgacuccgccgagguggccgugcgcauguucgacgccuacgucaacaccuucagcuccaccuucaacgugccgauggagaagcugaagacccugguggccacggcggaggccgagcucgccaagaacgucagccuggacaacgugcuguccaccuucaucagcgccgcgcggcagggguucguggacuccgacgucgagaccaaggacgugguggagugccucaagcugagccaccaguccgacaucgaggucaccggcgacagcugcaacaacuacaugcugacguacaacaagguggagaacaugaccccccgcgaccucggggccugcaucgacugcuccgcccggcacaucaacgcccagguggccaagagccacaacaucgcgcugaucuggaacgucaaggacuucaugucccugagcgagcagcuccgcaagcagauccgcuccgccgccaagaagaacaaccugcccuucaagcugaccugcgccaccacgcggcagguggugaacgucgugaccaccaagaucgcccucaagggcggguga

SEQ ID NO: 18260 - RNA, 5841 nt, Artificial Sequence
  SARS-CoV-2__MT345848.1__non-structural protein 3 (NSP3) CDS gc
auggcccccaccaaggugaccuucggcgacgacacggucaucgaggugcagggguacaagagcgugaacaucaccuucgagcuggacgagcgcaucgacaagguccucaacgagaagugcuccgccuacaccguggagcugggcaccgaggugaacgaguucgcgugcgucguggccgacgccgugaucaagacgcugcagccggucagcgagcuccugaccccccuggggaucgaccucgacgagugguccauggccaccuacuaccuguucgacgagagcggcgaguucaagcuggccucccacauguacugcagcuucuacccccccgacgaggacgaggaggagggggacugcgaggaggaggaguucgagccguccacccaguacgaguacggcacggaggacgacuaccagggcaagccccucgaguucggggcgaccagcgccgcccugcagcccgaggaggagcaggaggaggacuggcuggacgacgacucccagcagaccgugggccagcaggacgggagcgaggacaaccagaccacgaccauccagaccaucguggagguccagccccagcucgagauggagcugaccccgguggugcagacgaucgaggucaacuccuucagcggcuaccugaagcucaccgacaacguguacaucaagaacgccgacaucguggaggagaccaagaaggucaagcccaccgugguggucaacgcggccaacguguaccugaagcacgggggcggcguggccggggcccugaacaaggccacgaacaacgcgaugcaggucgaguccgacgacuacaucgccaccaacggcccccucaagguggggggcagcugcguccuguccggccacaaccuggccaagcacugccuccacgugguggggcccaacgucaacaagggcgaggacauccagcugcugaagagcgccuacgagaacuucaaccagcacgaggugcuccuggccccgcugcucuccgcggggaucuucggcgccgaccccauccacagccugcgggugugcgucgacaccgugcgcaccaacguguaccuggccgucuucgacaagaaccucuacgacaagcugguguccagcuuccuggagaugaagagcgagaagcagguggagcagaagaucgccgagauccccaaggaggaggucaagcccuucaucacggaguccaagccgagcguggagcagcggaagcaggacgacaagaagaucaaggccugcguggaggaggucaccaccacccucgaggagacgaaguuccugaccgagaaccugcuccuguacaucgacaucaacgggaaccugcaccccgacuccgcgacccucgugagcgacaucgacaucaccuuccugaagaaggacgcccccuacaucgugggcgacgucgugcaggagggcgugcugacggccgucgugauccccaccaagaaggccgggggcaccaccgagaugcucgccaaggcgcugcgcaaggugccgacggacaacuacaucaccaccuaccccgggcagggccugaacggguacaccgucgaggaggccaagaccgugcucaagaagugcaaguccgccuucuacauccugcccagcaucaucuccaacgagaagcaggagauccugggcacggugagcuggaaccuccgggagaugcuggcccacgcggaggagacccgcaagcugaugcccgucugcguggagaccaaggccaucguguccaccauccagcggaaguacaagggcaucaagauccaggagggggucguggacuacggcgcccgcuucuacuucuacacgagcaagaccaccguggccucccugaucaacacccucaacgaccugaacgagacgcuggucaccaugccgcucggguacgugacccacggccugaaccuggaggaggccgcgcgguacaugcgcagccucaaggugcccgccaccgucuccgugagcucccccgacgccgugacggccuacaacggguaccugaccagcuccagcaagacccccgaggagcacuucaucgagaccaucucccuggccggcagcuacaaggacuggagcuacuccggccagagcacgcagcucgggaucgaguuccugaagcggggcgacaaguccgucuacuacaccagcaacccgaccaccuuccaccuggacggggaggugaucacguucgacaaccucaagacccugcugucccuccgcgaggugcggaccaucaaggucuucaccacgguggacaacaucaaccugcacacccagguggucgacaugagcaugaccuacggccagcaguucggccccaccuaccuggacggggcggacgugacgaagaucaagccccacaacucccacgagggcaagaccuucuacgugcucccgaacgacgacacccugcgcgucgaggccuucgaguacuaccacaccacggaccccagcuuccuggggcgguacauguccgcccucaaccacaccaagaaguggaaguacccccaggugaacggccugaccagcaucaagugggccgacaacaacugcuaccuggccaccgcgcuccugacgcugcagcagaucgagcucaaguucaaccccccggcccugcaggacgccuacuaccgcgcccgggcgggggaggccgccaacuucugcgcccugauccucgccuacugcaacaagaccgugggcgagcugggcgacguccgcgagaccauguccuaccuguuccagcacgcgaaccucgacagcugcaagcgggugcugaacgucgugugcaagaccugcgggcagcagcagaccacgcugaagggcguggaggccgucauguacauggggacccucuccuacgagcaguucaagaagggcgugcagauccccugcaccugcgggaagcaggccaccaaguaccuggugcagcaggagagccccuucgucaugauguccgcccccccggcccaguacgagcugaagcacggcacguucaccugcgcgagcgaguacaccggcaacuaccagugcgggcacuacaagcacaucaccuccaaggagacgcucuacugcaucgacggcgcccugcugaccaagagcagcgaguacaaggggcccaucaccgacguguucuacaaggagaacuccuacaccacgaccaucaagcccgugaccuacaagcucgacggcgucgugugcaccgagaucgaccccaagcuggacaacuacuacaagaaggacaacagcuacuucacggagcagccgaucgaccuggugcccaaccagcccuaccccaacgccuccuucgacaacuucaaguucgucugcgacaacaucaaguucgccgacgaccucaaccagcugaccggguacaagaagccggccagccgcgagcugaaggugaccuucuuccccgaccucaacggcgacguggucgcgaucgacuacaagcacuacacccccuccuucaagaagggcgccaagcugcugcacaagcccaucguguggcacgugaacaacgccacgaacaaggccaccuacaagccgaacaccuggugcauccggugccucuggagcaccaagcccgucgagacguccaacagcuucgacgugcugaaguccgaggacgcgcaggggauggacaaccuggccugcgaggaccucaagcccgugagcgaggaggucguggagaaccccaccauccagaaggacgugcuggagugcaacgucaagaccaccgagguggugggcgacaucauccugaagccggccaacaacucccucaagaucacggaggaggucgggcacaccgaccugauggccgccuacguggacaacagcucccugaccaucaagaagcccaacgagcucagccgcgugcugggccugaagacccucgcgacgcacgggcuggccgccgucaacuccgugcccugggacaccaucgccaacuacgccaagccguuccugaacaagguggucagcaccaccacgaacaucgugacccgcugccucaaccgggugugcaccaacuacaugcccuacuucuucacccugcugcuccagcugugcaccuucacgcgcuccaccaacagccggaucaaggcguccaugcccaccaccaucgccaagaacacggucaagagcgugggcaaguucugccuggaggccagcuucaacuaccucaagucccccaacuucagcaagcugaucaacaucaucaucugguuccugcuccuguccgugugccugggcagccucaucuacuccaccgccgcccuggggguccugaugagcaaccucggcaugccguccuacugcaccggguaccgcgagggcuaccugaacagcaccaacgugacgaucgcgaccuacugcaccggcuccauccccugcagcgugugccuguccgggcucgacagccuggacaccuaccccucccuggagacgauccagaucaccaucagcuccuucaagugggaccucaccgccuucggccuggucgccgagugguuccuggccuacauccucuucacccgguucuucuacgugcuggggcuggccgcgaucaugcagcucuucuucagcuacuucgccgugcacuucaucuccaacagcuggcugauguggcugaucaucaaccugguccagauggcccccaucuccgccauggugcgcauguacaucuucuucgcgagcuucuacuacguguggaagagcuacguccacgugguggacggcugcaacuccagcacgugcaugaugugcuacaagcggaaccgcgccacccgggucgagugcaccaccaucgugaacgggguccgccgguccuucuacguguacgccaacggcggcaagggguucugcaagcuccacaacuggaacugcgugaacugcgacacguucugcgccggcagcaccuucaucuccgacgaggucgcccgcgaccugagccugcaguucaagcggccgaucaaccccaccgaccaguccagcuacaucguggacuccgugaccgucaagaacgggagcauccaccucuacuucgacaaggcgggccagaagacguacgagcgccacucccugagccacuucgugaaccuggacaaccuccgggccaacaacaccaaggggucccugcccaucaacgugaucgucuucgacggcaagagcaagugcgaggaguccagcgccaaguccgccagcguguacuacucccagcugaugugccagcccauccuccugcuggaccaggcccucgugagcgacgucggcgacagcgcggagguggccgugaagauguucgacgccuacgucaacaccuucuccagcaccuucaacgugccgauggagaagcugaagacgcugguggccaccgccgaggcggagcucgccaagaacgucucccuggacaacgugcugagcaccuucaucuccgccgcccgccagggguucguggacagcgacgucgagaccaaggacgugguggagugccucaagcugucccaccagagcgacaucgaggucacgggcgacuccugcaacaacuacaugcugaccuacaacaagguggagaacaugaccccccgggaccucggggcgugcaucgacugcagcgcccgccacaucaacgcccagguggccaagucccacaacaucgcccugaucuggaacgucaaggacuucaugagccuguccgagcagcuccggaagcagauccgcagcgcggccaagaagaacaaccugcccuucaagcugaccugcgccacgacccgccagguggugaacgucgugaccaccaagaucgcccucaagggcggguga

SEQ ID NO: 18261 - RNA, 5841 nt, Artificial Sequence
  SARS-CoV-2__MT345861.1__non-structural protein 3 (NSP3) CDS gc
auggcccccaccaaggugaccuucggcgacgacacggucaucgaggugcagggguacaagagcgugaacaucaccuucgagcuggacgagcgcaucgacaagguccucaacgagaagugcuccgccuacaccguggagcugggcaccgaggugaacgaguucgcgugcgucguggccgacgccgugaucaagacgcugcagccggucagcgagcuccugaccccccuggggaucgaccucgacgagugguccauggccaccuacuaccuguucgacgagagcggcgaguucaagcuggccucccacauguacugcagcuucuacccccccgacgaggacgaggaggagggggacugcgaggaggaggaguucgagccguccacccaguacgaguacggcacggaggacgacuaccagggcaagccccucgaguucggggcgaccagcgccgcccugcagcccgaggaggagcaggaggaggacuggcuggacgacgacucccagcagaccgugggccagcaggacgggagcgaggacaaccagaccacgaccauccagaccaucguggagguccagccccagcucgagauggagcugaccccgguggugcagacgaucgaggucaacuccuucagcggcuaccugaagcucaccgacaacguguacaucaagaacgccgacaucguggaggaggcgaagaaggucaagcccaccgugguggucaacgccgccaacguguaccugaagcacgggggcggcguggccggggcccugaacaaggcgaccaacaacgccaugcaggucgaguccgacgacuacaucgccacgaacggcccccucaagguggggggcagcugcguccuguccggccacaaccuggccaagcacugccuccacgugguggggcccaacgucaacaagggcgaggacauccagcugcugaagagcgccuacgagaacuucaaccagcacgaggugcucaucgcgccgcugcuguccgccgggaucuucggcgccgaccccauccacagccuccgggugugcgucgacaccgugcgcaccaacguguaccuggccgucuucgacaagaaccuguacgacaagcucguguccagcuuccuggagaugaagagcgagaagcagguggagcagaagaucgccgagauccccaaggaggaggucaagcccuucaucaccgaguccaagccgagcguggagcagcggaagcaggacgacaagaagaucaaggcgugcguggaggaggucacgaccacccuggaggagaccaaguuccucacggagaaccugcugcucuacaucgacaucaacgggaaccugcaccccgacuccgccacccuggugagcgacaucgacaucaccuuccucaagaaggacgcccccuacaucgugggcgacgucgugcaggagggcgugcugaccgccgucgugauccccacgaagaaggccgggggcaccaccgagaugcuggcgaaggcccuccgcaaggugccgaccgacaacuacaucacgaccuaccccgggcagggccugaacggguacaccgucgaggaggccaagaccgugcugaagaagugcaaguccgccuucuacauccuccccagcaucaucuccaacgagaagcaggagauccugggcaccgugagcuggaaccugcgggagaugcucgcgcacgccgaggagacgcgcaagcugaugcccgucugcguggagaccaaggccaucguguccaccauccagcggaaguacaagggcaucaagauccaggagggggucguggacuacggcgcccgcuucuacuucuacaccagcaagacgaccguggccucccugaucaacacccugaacgaccucaacgagacccuggucacgaugccgcugggguacgugacccacggccucaaccuggaggaggcggcccgguacaugcgcagccugaaggugcccgccaccgucuccgugagcucccccgacgccgugaccgccuacaacggguaccucacgagcuccagcaagacccccgaggagcacuucaucgagaccaucucccuggcgggcagcuacaaggacuggagcuacuccggccagagcacccagcuggggaucgaguuccucaagcggggcgacaaguccgucuacuacacgagcaacccgaccaccuuccaccuggacggggaggugaucaccuucgacaaccugaagacgcuccugucccugcgcgaggugcggaccaucaaggucuucaccaccguggacaacaucaaccuccacacgcagguggucgacaugagcaugaccuacggccagcaguucggccccaccuaccuggacggggccgacgugaccaagaucaagccccacaacucccacgagggcaagacguucuacgugcugccgaacgacgacacccuccgcgucgaggccuucgaguacuaccacaccaccgaccccagcuuccuggggcgguacauguccgcccugaaccacacgaagaaguggaaguacccccaggugaacggccucaccagcaucaagugggccgacaacaacugcuaccuggcgaccgcccugcucacccugcagcagaucgagcugaaguucaaccccccggcccuccaggacgccuacuaccgcgcgcgggccggggaggccgccaacuucugcgcccugauccuggcguacugcaacaagacggugggcgagcucggcgacguccgcgagaccauguccuaccuguuccagcacgccaaccuggacagcugcaagcgggugcucaacgucgugugcaagaccugcgggcagcagcagaccacccugaagggcguggaggccgucauguacauggggacgcuguccuacgagcaguucaagaagggcgugcagauccccugcaccugcgggaagcaggccaccaaguaccucgugcagcaggagagccccuucgucaugauguccgcccccccggcgcaguacgagcugaagcacggcaccuucacgugcgccagcgaguacaccggcaacuaccagugcgggcacuacaagcacaucaccuccaaggagacccuguacugcaucgacggcgcccuccugacgaagagcagcgaguacaaggggcccaucaccgacguguucuacaaggagaacuccuacaccaccacgaucaagcccgugaccuacaagcuggacggcgucgugugcaccgagaucgaccccaagcucgacaacuacuacaagaaggacaacagcuacuucaccgagcagccgaucgaccuggugcccaaccagcccuaccccaacgccuccuucgacaacuucaaguucgucugcgacaacaucaaguucgccgacgaccugaaccagcucacgggguacaagaagccggcgagccgcgagcugaaggugaccuucuuccccgaccugaacggcgacguggucgccaucgacuacaagcacuacacccccuccuucaagaagggcgccaagcuccugcacaagcccaucguguggcacgugaacaacgccaccaacaaggcgacguacaagccgaacaccuggugcauccggugccuguggagcaccaagcccgucgagaccuccaacagcuucgacgugcucaaguccgaggacgcccaggggauggacaaccuggccugcgaggaccugaagcccgugagcgaggaggucguggagaaccccacgauccagaaggacgugcucgagugcaacgucaagaccaccgagguggugggcgacaucauccugaagccggccaacaacucccugaagaucaccgaggaggucgggcacacggaccucauggccgcguacguggacaacagcucccugaccaucaagaagcccaacgagcugagccgcgugcucggccugaagacccuggccacccacgggcucgccgccgucaacuccgugcccugggacacgaucgccaacuacgcgaagccguuccugaacaagguggucagcaccaccaccaacaucgugacgcgcugccugaaccgggugugcaccaacuacaugcccuacuucuucacccuccugcugcagcucugcaccuucacccgcuccacgaacagccggaucaaggccuccaugcccaccaccaucgccaagaacaccgucaagagcgugggcaaguucugccuggaggccagcuucaacuaccugaagucccccaacuucagcaagcucaucaacaucaucaucugguuccugcugcucuccgugugccugggcagccugaucuacuccacggccgcgcucgggguccugaugagcaaccugggcaugccguccuacugcaccggguaccgcgagggcuaccucaacagcaccaacgugaccaucgccacguacugcaccggcuccauccccugcagcgugugccuguccgggcuggacagccucgacaccuaccccucccuggagaccauccagaucacgaucagcuccuucaagugggaccugaccgccuucggccucgucgccgagugguuccuggccuacauccuguucacccgguucuucuacgugcucgggcuggcggccaucaugcagcuguucuucagcuacuucgccgugcacuucaucuccaacagcuggcucauguggcugaucaucaaccugguccagauggcccccaucuccgcgauggugcgcauguacaucuucuucgccagcuucuacuacguguggaagagcuacguccacgugguggacggcugcaacuccagcaccugcaugaugugcuacaagcggaaccgcgccacgcgggucgagugcaccaccaucgugaacgggguccgccgguccuucuacguguacgccaacggcggcaagggguucugcaagcugcacaacuggaacugcgugaacugcgacaccuucugcgccggcagcacguucaucuccgacgaggucgcgcgcgaccucagccugcaguucaagcggccgaucaaccccaccgaccaguccagcuacaucguggacuccgugaccgucaagaacgggagcauccaccuguacuucgacaaggccggccagaagaccuacgagcgccacucccucagccacuucgugaaccuggacaaccugcgggccaacaacacgaaggggucccuccccaucaacgugaucgucuucgacggcaagagcaagugcgaggaguccagcgccaaguccgccagcguguacuacucccagcugaugugccagcccauccugcuccuggaccaggcgcuggugagcgacgucggcgacagcgccgagguggccgugaagauguucgacgccuacgucaacaccuucuccagcaccuucaacgugccgauggagaagcucaagacccugguggccacggcggaggccgagcuggccaagaacgucucccucgacaacgugcugagcaccuucaucuccgccgcgcgccagggguucguggacagcgacgucgagaccaaggacgugguggagugccugaagcucucccaccagagcgacaucgaggucaccggcgacuccugcaacaacuacaugcugacguacaacaagguggagaacaugaccccccgggaccugggggccugcaucgacugcagcgcccgccacaucaacgcccagguggccaagucccacaacaucgcgcucaucuggaacgucaaggacuucaugagccuguccgagcagcugcggaagcagauccgcagcgccgccaagaagaacaaccuccccuucaagcugaccugcgccaccacgcgccagguggugaacgucgugaccaccaagaucgcccugaagggcggguga

SEQ ID NO: 18262 - RNA, 5841 nt, Artificial Sequence
  SARS-CoV-2__MT345869.1__non-structural protein 3 (NSP3) CDS gc
auggcccccaccaaggugaccuucggcgacgacacggucaucgaggugcagggguacaagagcgugaacaucaccuucgagcuggacgagcgcaucgacaagguccucaacgagaagugcuccgccuacaccguggagcugggcaccgaggugaacgaguucgcgugcgucguggccgacgccgugaucaagacgcugcagccggucagcgagcuccugaccccccuggggaucgaccucgacgagugguccauggccaccuacuaccuguucgacgagagcggcgaguucaagcuggccucccacauguacugcagcuucuacccccccgacgaggacgaggaggagggggacugcgaggaggaggaguucgagccguccacccaguacgaguacggcacggaggacgacuaccagggcaagagccucgaguucggggcgaccuccgccgcccugcagcccgaggaggagcaggaggaggacuggcuggacgacgacagccagcagaccgugggccagcaggacggguccgaggacaaccagaccacgaccauccagaccaucguggagguccagccccagcucgagauggagcugacccccguggugcagacgaucgaggucaacagcuucuccggcuaccugaagcucaccgacaacguguacaucaagaacgccgacaucguggaggaggcgaagaaggucaagccgaccgugguggucaacgccgccaacguguaccugaagcacgggggcggcguggccggggcccugaacaaggcgaccaacaacgccaugcaggucgagagcgacgacuacaucgccacgaacggcccccucaagguggggggcuccugcguccugagcggccacaaccuggccaagcacugccuccacgugguggggcccaacgucaacaagggcgaggacauccagcugcugaaguccgccuacgagaacuucaaccagcacgaggugcuccuggcgccccugcucagcgccgggaucuucggcgccgacccgauccacucccugcgggugugcgucgacaccgugcgcaccaacguguaccuggccgucuucgacaagaaccucuacgacaagcuggugagcagcuuccuggagaugaaguccgagaagcagguggagcagaagaucgccgagauccccaaggaggaggucaagcccuucaucaccgagagcaagcccuccguggagcagcggaagcaggacgacaagaagaucaaggcgugcguggaggaggucacgaccacccucgaggagaccaaguuccugacggagaaccugcuccuguacaucgacaucaacgggaaccugcacccggacagcgccacccucguguccgacaucgacaucaccuuccugaagaaggacgcccccuacaucgugggcgacgucgugcaggagggcgugcugaccgccgucgugauccccacgaagaaggccgggggcaccaccgagaugcucgcgaaggcccugcgcaaggugcccaccgacaacuacaucacgaccuacccggggcagggccugaacggguacaccgucgaggaggccaagaccgugcucaagaagugcaagagcgccuucuacauccugcccuccaucaucagcaacgagaagcaggagauccugggcaccguguccuggaaccuccgggagaugcuggcgcacgccgaggagacgcgcaagcugaugcccgucugcguggagaccaaggccaucgugagcaccauccagcggaaguacaagggcaucaagauccaggagggggucguggacuacggcgcccgcuucuacuucuacaccuccaagacgaccguggccagccugaucaacacccucaacgaccugaacgagacccuggucacgaugccccucggguacgugacccacggccugaaccuggaggaggcggcccgguacaugcgcucccucaaggugccggccaccgucagcguguccagccccgacgccgugaccgccuacaacggguaccugacguccagcuccaagacccccgaggagcacuucaucgagaccaucagccuggcgggcagcuacaaggacugguccuacagcggccaguccacccagcucgggaucgaguuccugaagcggggcgacaagagcgucuacuacacguccaaccccaccaccuuccaccuggacggggaggugaucaccuucgacaaccucaagacgcugcugagccuccgcgaggugcggaccaucaaggucuucaccaccguggacaacaucaaccugcacacgcagguggucgacauguccaugaccuacggccagcaguucggcccgaccuaccuggacggggccgacgugaccaagaucaagccccacaacagccacgagggcaagacguucuacgugcuccccaacgacgacacccugcgcgucgaggccuucgaguacuaccacaccaccgacccguccuuccuggggcgguacaugagcgcccucaaccacacgaagaaguggaaguacccccaggugaacggccugaccuccaucaagugggccgacaacaacugcuaccuggcgaccgcccuccugacccugcagcagaucgagcucaaguucaacccccccgcccugcaggacgccuacuaccgcgcgcgggccggggaggccgccaacuucugcgcccugauccucgcguacugcaacaagacggugggcgagcugggcgacguccgcgagaccaugagcuaccuguuccagcacgccaaccucgacuccugcaagcgggugcugaacgucgugugcaagaccugcgggcagcagcagaccacccugaagggcguggaggccgucauguacauggggacgcucagcuacgagcaguucaagaagggcgugcagaucccgugcaccugcgggaagcaggccaccaaguaccuggugcagcaggagucccccuucgucaugaugagcgccccccccgcgcaguacgagcugaagcacggcaccuucacgugcgccuccgaguacaccggcaacuaccagugcgggcacuacaagcacaucaccagcaaggagacccucuacugcaucgacggcgcccugcugacgaagagcuccgaguacaaggggccgaucaccgacguguucuacaaggagaacagcuacaccaccacgaucaagcccgugaccuacaagcucgacggcgucgugugcaccgagaucgaccccaagcuggacaacuacuacaagaaggacaacuccuacuucaccgagcagcccaucgaccuggugccgaaccagcccuaccccaacgccagcuucgacaacuucaaguucgucugcgacaacaucaaguucgccgacgaccucaaccagcugacgggguacaagaagcccgcgucccgcgagcugaaggugaccuucuucccggaccucaacggcgacguggucgccaucgacuacaagcacuacacccccagcuucaagaagggcgccaagcugcugcacaagcccaucguguggcacgugaacaacgccaccaacaaggcgacguacaagcccaacaccuggugcauccggugccucugguccaccaagccggucgagaccagcaacuccuucgacgugcugaagagcgaggacgcccaggggauggacaaccuggccugcgaggaccucaagcccguguccgaggaggucguggagaaccccacgauccagaaggacgugcuggagugcaacgucaagaccaccgagguggugggcgacaucauccugaagcccgccaacaacagccucaagaucaccgaggaggucgggcacacggaccugauggccgcguacguggacaacuccagccugaccaucaagaagccgaacgagcucucccgcgugcugggccugaagacccucgccacccacgggcuggccgccgucaacagcgugcccugggacacgaucgccaacuacgcgaagcccuuccugaacaagguggucuccaccaccaccaacaucgugacgcgcugccucaaccgggugugcaccaacuacaugccguacuucuucacccugcugcuccagcugugcaccuucacccgcagcacgaacucccggaucaaggccagcaugcccaccaccaucgccaagaacaccgucaagagcgugggcaaguucugccuggaggccuccuucaacuaccucaagagccccaacuucuccaagcugaucaacaucaucaucugguuccugcuccugagcgugugccugggcucccucaucuacagcacggccgcgcuggggguccugauguccaaccucggcaugcccagcuacugcaccggguaccgcgagggcuaccugaacuccaccaacgugaccaucgccacguacugcaccggcagcaucccgugcuccgugugccugagcgggcucgacucccuggacaccuaccccagccuggagaccauccagaucacgaucuccagcuucaagugggaccucaccgccuucggccuggucgccgagugguuccuggccuacauccucuucacccgguucuucuacgugcuggggcuggcggccaucaugcagcucuucuucuccuacuucgccgugcacuucaucagcaacuccuggcugauguggcugaucaucaaccugguccagauggcccccaucagcgcgauggugcgcauguacaucuucuucgccagcuucuacuacguguggaaguccuacguccacgugguggacggcugcaacagcuccaccugcaugaugugcuacaagcggaaccgcgccacgcgggucgagugcaccaccaucgugaacgggguccgccggagcuucuacguguacgccaacggcggcaagggguucugcaagcuccacaacuggaacugcgugaacugcgacaccuucugcgccggcuccacguucaucagcgacgaggucgcgcgcgaccugucccugcaguucaagcggcccaucaacccgaccgaccagagcuccuacaucguggacagcgugaccgucaagaacggguccauccaccucuacuucgacaaggccggccagaagaccuacgagcgccacagccugucccacuucgugaaccuggacaaccuccgggccaacaacacgaaggggagccugcccaucaacgugaucgucuucgacggcaaguccaagugcgaggagagcuccgccaagagcgccuccguguacuacagccagcugaugugccagcccauccuccugcuggaccaggcgcucgugagcgacgucggcgacuccgccgagguggccgugaagauguucgacgccuacgucaacaccuucagcuccaccuucaacgugcccauggagaagcugaagacccugguggccacggcggaggccgagcucgccaagaacgucagccuggacaacgugcuguccaccuucaucagcgccgcgcgccagggguucguggacuccgacgucgagaccaaggacgugguggagugccucaagcugagccaccaguccgacaucgaggucaccggcgacagcugcaacaacuacaugcugacguacaacaagguggagaacaugaccccgcgggaccucggggccugcaucgacugcuccgcccgccacaucaacgcccagguggccaagagccacaacaucgcgcugaucuggaacgucaaggacuucaugucccugagcgagcagcuccggaagcagauccgcuccgccgccaagaagaacaaccugcccuucaagcugaccugcgccaccacgcgccagguggugaacgucgugaccaccaagaucgcccucaagggcggguga

SEQ ID NO: 18263 - RNA, 5841 nt, Artificial Sequence
  SARS-CoV-2__MT345871.1__non-structural protein 3 (NSP3) CDS gc
auggcccccaccaaggugaccuucggcgacgacacggucaucgaggugcagggguacaagagcgugaacaucaccuucgagcuggacgagcgcaucgacaagguccucaacgagaagugcuccgccuacaccguggagcugggcaccgaggugaacgaguucgcgugcgucguggccgacgccgugaucaagacgcugcagccggucagcgagcuccugaccccccuggggaucgaccucgacgagugguccauggccaccuacuaccuguucgacgagagcggcgaguucaagcuggccucccacauguacugcagcuucuacccccccgacgaggacgaggaggagggggacugcgaggaggaggaguucgagccguccacccaguacgaguacggcacggaggacgacuaccagggcaagccccucgaguucggggcgaccagcgccgcccugcagcccgaggaggagcaggaggaggacuggcuggacgacgacucccagcagaccgugggccagcaggacgggagcgaggacaaccagaccacgaccauccagaccaucguggagguccagccccagcucgagauggagcugaccccgguggugcagacgaucgaggucaacuccuucagcggcuaccugaagcucaccgacaacguguacaucaagaacgccgacaucguggaggaggcgaagaaggucaagcccaccgugguggucaacgccgccaacguguaccugaagcacgggggcggcguggccggggcccugaacaaggcgaccaacaacgccaugcaggucgaguccgacgacuacaucgccacgaacggcccccucaagguggggggcagcugcguccuguccggccacaaccuggccaagcacugccuccacgugguggggcccaacgucaacaagggcgaggacauccagcugcugaagagcgccuacgagaacuucaaccagcacgaggugcuccuggcgccgcugcucuccgccgggaucuucggcgccgaccccauccacagccugcgggugugcgucgacaccgugcgcaccaacguguaccuggccgucuucgacaagaaccucuacgacaagcugguguccagcuuccuggagaugaagagcgagaagcagguggagcagaagaucgccgagauccccaaggaggaggucaagcccuucaucaccgaguccaagccgagcguggagcagcggaagcaggacgacaagaagaucaaggcgugcguggaggaggucacgaccacccucgaggagaccaaguuccugacggagaaccugcuccuguacaucgacaucaacgggaaccugcaccccgacuccgccacccucgugagcgacaucgacaucaccuuccugaagaaggacgcccccuacaucgugggcgacgucgugcaggagggcgugcugaccgccgucgugauccccacgaagaaggccgggggcaccaccgagaugcucgcgaaggcccugcgcaaggugccgaccgacaacuacaucacgaccuaccccgggcagggccugaacggguacaccgucgaggaggccaagaccgugcucaagaagugcaaguccgccuucuacauccugcccagcaucaucuccaacgagaagcaggagauccugggcaccgugagcuggaaccuccgggagaugcuggcgcacgccgaggagacgcgcaagcugaugcccgucugcguggagaccaaggccaucguguccaccauccagcggaaguacaagggcaucaagauccaggagggggucguggacuacggcgcccgcuucuacuucuacaccagcaagacgaccguggccucccugaucaacacccucaacgaccugaacgagacccuggucacgaugccgcucggguacgugacccacggccugaaccuggaggaggcggcccgguacaugcgcagccucaaggugcccgccaccgucuccgugagcucccccgacgccgugaccgccuacaacggguaccugacgagcuccagcaagacccccgaggagcacuucaucgagaccaucucccuggcgggcagcuacaaggacuggagcuacuccggccagagcacccagcucgggaucgaguuccugaagcggggcgacaaguccgucuacuacacgagcaacccgaccaccuuccaccuggacggggaggugaucaccuucgacaaccucaagacgcugcugucccuccgcgaggugcggaccaucaaggucuucaccaccguggacaacaucaaccugcacacgcagguggucgacaugagcaugaccuacggccagcaguucggccccaccuaccuggacggggccgacgugaccaagaucaagccccacaacucccacgagggcaagacguucuacgugcucccgaacgacgacacccugcgcgucgaggccuucgaguacuaccacaccaccgaccccagcuuccuggggcgguacauguccgcccucaaccacacgaagaaguggaaguacccccaggugaacggccugaccagcaucaagugggccgacaacaacugcuaccuggcgaccgcccuccugacccugcagcagaucgagcucaaguucaaccccccggcccugcaggacgccuacuaccgcgcgcgggccggggaggccgccaacuucugcgcccugauccucgcguacugcaacaagacggugggcgagcugggcgacguccgcgagaccauguccuaccuguuccagcacgccaaccucgacagcugcaagcgggugcugaacgucgugugcaagaccugcgggcagcagcagaccacccugaagggcguggaggccgucauguacauggggacgcucuccuacgagcaguucaagaagggcgugcagauccccugcaccugcgggaagcaggccaccaaguaccuggugcagcaggagagccccuucgucaugauguccgcccccccggcgcaguacgagcugaagcacggcaccuucacgugcgccagcgaguacaccggcaacuaccagugcgggcacuacaagcacaucaccuccaaggagacccucuacugcaucgacggcgcccugcugacgaagagcagcgaguacaaggggcccaucaccgacguguucuacaaggagaacuccuacaccaccacgaucaagcccgugaccuacaagcucgacggcgucgugugcaccgagaucgaccccaagcuggacaacuacuacaagaaggacaacagcuacuucaccgagcagccgaucgaccuggugcccaaccagcccuaccccaacgccuccuucgacaacuucaaguucgucugcgacaacaucaaguucgccgacgaccucaaccagcugacgggguacaagaagccggcgagccgcgagcugaaggugaccuucuuccccgaccucaacggcgacguggucgccaucgacuacaagcacuacacccccuccuucaagaagggcgccaagcugcugcacaagcccaucguguggcacgugaacaacgccaccaacaaggcgacguacaagccgaacaccuggugcauccggugccucuggagcaccaagcccgucgagaccuccaacagcuucgacgugcugaagcuggaggacgcccaggggauggacaaccucgccugcgaggaccugaagcccguguccgaggaggucguggagaaccccacgauccagaaggacgugcuggagugcaacgucaagaccaccgagguggugggcgacaucauccucaagccggccaacaacagccugaagaucaccgaggaggucgggcacacggaccugauggccgcguacguggacaacuccagccucaccaucaagaagcccaacgagcugucccgcgugcugggccucaagacccuggccacccacgggcuggccgccgucaacagcgugcccugggacacgaucgccaacuacgcgaagccguuccucaacaagguggucuccaccaccaccaacaucgugacgcgcugccugaaccgggugugcaccaacuacaugcccuacuucuucacccugcuccugcagcugugcaccuucacccgcagcacgaacucccggaucaaggccagcaugcccaccaccaucgccaagaacaccgucaaguccgugggcaaguucugccucgaggccagcuucaacuaccugaagagccccaacuucuccaagcugaucaacaucaucaucugguuccuccugcugagcgugugccucggcucccugaucuacagcacggccgcgcuggggguccucauguccaaccugggcaugccgagcuacugcaccggguaccgcgagggcuaccugaacuccaccaacgugaccaucgccacguacugcaccggcagcauccccugcuccgugugccucagcgggcuggacucccuggacaccuaccccagccucgagaccauccagaucacgaucuccagcuucaagugggaccugaccgccuucggccuggucgccgagugguuccucgccuacauccuguucacccgguucuucuacgugcuggggcucgcggccaucaugcagcuguucuucuccuacuucgccgugcacuucaucagcaacuccuggcugauguggcugaucaucaaccucguccagauggcccccaucagcgcgauggugcgcauguacaucuucuucgccuccuucuacuacguguggaagagcuacguccacgugguggacggcugcaacagcuccaccugcaugaugugcuacaagcggaaccgcgccacgcgggucgagugcaccaccaucgugaacgggguccgccggagcuucuacguguacgccaacggcggcaagggguucugcaagcugcacaacuggaacugcgugaacugcgacaccuucugcgccggcuccacguucaucagcgacgaggucgcgcgcgaccugucccuccaguucaagcggccgaucaaccccaccgaccagagcuccuacaucguggacagcgugaccgucaagaacggguccauccaccuguacuucgacaaggccggccagaagaccuacgagcgccacagccugucccacuucgugaaccucgacaaccugcgggccaacaacacgaaggggagccugcccaucaacgugaucgucuucgacggcaaguccaagugcgaggagagcuccgccaagagcgccuccguguacuacagccagcucaugugccagcccauccugcugcucgaccaggcgcugguguccgacgucggcgacagcgccgagguggccgugaagauguucgacgccuacgucaacaccuucagcuccaccuucaacgugccgauggagaagcugaagacccucguggccacggcggaggccgagcuggccaagaacgucagccuggacaacgugcucuccaccuucaucagcgccgcgcgccagggguucguggacuccgacgucgagaccaaggacgugguggagugccugaagcugagccaccaguccgacaucgaggucaccggcgacagcugcaacaacuacaugcucacguacaacaagguggagaacaugaccccccgggaccugggggccugcaucgacugcuccgcccgccacaucaacgcccagguggccaagagccacaacaucgcgcugaucuggaacgucaaggacuucaugucccucagcgagcagcugcggaagcagauccgcuccgccgccaagaagaacaaccugcccuucaagcucaccugcgccaccacgcgccagguggugaacgucgugaccaccaagaucgcccugaagggcggguga

SEQ ID NO: 18264 - RNA, 5841 nt, Artificial Sequence
  SARS-CoV-2__MT345879.1__non-structural protein 3 (NSP3) CDS gc
auggcccccaccaaggugaccuucggcgacgacacggucaucgaggugcagggguacaagagcgugaacaucaccuucgagcuggacgagcgcaucgacaagguccucaacgagaagugcuccgccuacaccguggagcugggcaccgaggugaacgaguucgcgugcgucguggccgacgccgugaucaagacgcugcagccggucagcgagcuccugaccccccuggggaucgaccucgacgagugguccauggccaccuacuaccuguucgacgagagcggcgaguucaagcuggccucccacauguacugcagcuucuacccccccgacgaggacgaggaggagggggacugcgaggaggaggaguucgagccguccacccaguacgaguacggcacggaggacgacuaccagggcaagccccucgaguucggggcgaccagcgccgcccugcagcccgaggaggagcaggaggaggacuggcuggacgacgacucccagcagaccgugggccagcaggacgggagcgaggacaaccagaccacgaccauccagaccaucguggagguccagccccagcucgagauggagcugaccccgguggugcagacgaucgaggucaacuccuucagcggcuaccugaagcucaccgacaacguguacaucaagaacgccgacaucguggaggaggcgaagaaggucaagcccaccgugguggucaacgccgccaacguguaccugaagcacgggggcggcguggccggggcccugaacaaggcgaccaacaacgccaugcaggucgaguccgacgacuacaucgccacgaacggcccccucaagguggggggcagcugcguccuguccggccacaaccuggccaagcacugccuccacgugguggggcccaacgucaacaagggcgaggacauccagcugcugaagagcgccuacgagaacuucaaccagcacgaggugcuccuggcgccgcugcucuccgccgggaucuucggcgccgaccccauccacagccugcgggugugcgucgacaccgugcgcaccaacguguaccuggccgucuucgacaagaaccucuacgacaagcugguguccagcuuccuggagaugaagagcgagaagcagguggagcagaagaucgccgagauccccaaggaggaggucaagcccuucaucaccgaguccaagccgagcguggagcagcggaagcaggacgacaagaagaucaaggcgugcguggaggaggucacgaccacccucgaggagaccaaguuccugacggagaaccugcuccuguacaucgacaucaacgggaaccugcaccccgacuccgccacccucgugagcgacaucgacaucaccuuccugaagaaggacgcccccuacaucgugggcgacgucgugcaggagggcgugcugaccgccgucgugauccccacgaagaaggccgggggcaccaccgagaugcucgcgaaggcccugcgcaaggugccgaccgacaacuacaucacgaccuaccccgggcagggccugaacggguacaccgucgaggaggccaagaccgugcucaagaagugcaaguccgccuucuacauccugcccagcaucaucuccaacgagaagcaggagauccugggcaccgugagcuggaaccuccgggagaugcuggcgcacgccgaggagacgcgcaagcugaugcccgucugcguggagaccaaggccaucguguccaccauccagcggaaguacaagggcaucaagauccaggagggggucguggacuacggcgcccgcuucuacuucuacaccagcaagacgaccguggccucccugaucaacacccucaacgaccugaacgagacccuggucacgaugccgcucggguacgugacccacggccugaaccuggaggaggcggcccgguacaugcgcagccucaaggugcccgccaccgucuccgugagcucccccgacgccgugaccgccuacaacggguaccugacgagcuccagcaagacccccgaggagcacuucaucgagaccaucucccuggcgggcagcuacaaggacuggagcuacuccggccagagcacccagcucgggaucgaguuccugaagcggggcgacaaguccgucuacuacacgagcaacccgaccaccuuccaccuggacggggaggugaucaccuucgacaaccucaagacgcugcugucccuccgcgaggugcggaccaucaaggucuucaccaccguggacaacaucaaccugcacacgcagguggucgacaugagcaugaccuacggccagcaguucggccccaccuaccuggacggggccgacgugaccaagaucaagccccacaacucccacgagggcaagacguucuacgugcucccgaacgacgacacccugcgcgucgaggccuucgaguacuaccacaccaccgaccccagcuuccuggggcgguacauguccgcccucaaccacacgaagaaguggaaguacccccaggugaacggccugaccagcaucaaguggaccgacaacaacugcuaccuggccaccgcgcuccugacgcugcagcagaucgagcucaaguucaaccccccggcccugcaggacgccuacuaccgcgcccgggcgggggaggccgccaacuucugcgcccugauccucgccuacugcaacaagaccgugggcgagcugggcgacguccgcgagaccauguccuaccuguuccagcacgcgaaccucgacagcugcaagcgggugcugaacgucgugugcaagaccugcgggcagcagcagaccacgcugaagggcguggaggccgucauguacauggggacccucuccuacgagcaguucaagaagggcgugcagauccccugcaccugcgggaagcaggccaccaaguaccuggugcagcaggagagccccuucgucaugauguccgcccccccggcccaguacgagcugaagcacggcacguucaccugcgcgagcgaguacaccggcaacuaccagugcgggcacuacaagcacaucaccuccaaggagacgcucuacugcaucgacggcgcccugcugaccaagagcagcgaguacaaggggcccaucaccgacguguucuacaaggagaacuccuacaccacgaccaucaagcccgugaccuacaagcucgacggcgucgugugcaccgagaucgaccccaagcuggacaacuacuacaagaaggacaacagcuacuucacggagcagccgaucgaccuggugcccaaccagcccuaccccaacgccuccuucgacaacuucaaguucgucugcgacaacaucaaguucgccgacgaccucaaccagcugaccggguacaagaagccggccagccgcgagcugaaggugaccuucuuccccgaccucaacggcgacguggucgcgaucgacuacaagcacuacacccccuccuucaagaagggcgccaagcugcugcacaagcccaucguguggcacgugaacaacgccacgaacaaggccaccuacaagccgaacaccuggugcauccggugccucuggagcaccaagcccgucgagacguccaacagcuucgacgugcugaaguccgaggacgcgcaggggauggacaaccuggccugcgaggaccucaagcccgugagcgaggaggucguggagaaccccaccauccagaaggacgugcuggagugcaacgucaagaccaccgagguggugggcgacaucauccugaagccggccaacaacucccucaagaucacggaggaggucgggcacaccgaccugauggccgccuacguggacaacagcucccugaccaucaagaagcccaacgagcucagccgcgugcugggccugaagacccucgcgacgcacgggcuggccgccgucaacuccgugcccugggacaccaucgccaacuacgccaagccguuccugaacaagguggucagcaccaccacgaacaucgugacccgcugccucaaccgggugugcaccaacuacaugcccuacuucuucacccugcugcuccagcugugcaccuucacgcgcuccaccaacagccggaucaaggcguccaugcccaccaccaucgccaagaacacggucaagagcgugggcaaguucugccuggaggccagcuucaacuaccucaagucccccaacuucagcaagcugaucaacaucaucaucugguuccugcuccuguccgugugccugggcagccucaucuacuccaccgccgcccuggggguccugaugagcaaccucggcaugccguccuacugcaccggguaccgcgagggcuaccugaacagcaccaacgugacgaucgcgaccuacugcaccggcuccauccccugcagcgugugccuguccgggcucgacagccuggacaccuaccccucccuggagacgauccagaucaccaucagcuccuucaagugggaccucaccgccuucggccuggucgccgagugguuccuggccuacauccucuucacccgguucuucuacgugcuggggcuggccgcgaucaugcagcucuucuucagcuacuucgccgugcacuucaucuccaacagcuggcugauguggcugaucaucaaccugguccagauggcccccaucuccgccauggugcgcauguacaucuucuucgcgagcuucuacuacguguggaagagcuacguccacgugguggacggcugcaacuccagcacgugcaugaugugcuacaagcggaaccgcgccacccgggucgagugcaccaccaucgugaacgggguccgccgguccuucuacguguacgccaacggcggcaagggguucugcaagcuccacaacuggaacugcgugaacugcgacacguucugcgccggcagcaccuucaucuccgacgaggucgcccgcgaccugagccugcaguucaagcggccgaucaaccccaccgaccaguccagcuacaucguggacuccgugaccgucaagaacgggagcauccaccucuacuucgacaaggcgggccagaagacguacgagcgccacucccugagccacuucgugaaccuggacaaccuccgggccaacaacaccaaggggucccugcccaucaacgugaucgucuucgacggcaagagcaagugcgaggaguccagcgccaaguccgccagcguguacuacucccagcugaugugccagcccauccuccugcuggaccaggcccucgugagcgacgucggcgacagcgcggagguggccgugaagauguucgacgccuacgucaacaccuucuccagcaccuucaacgugccgauggagaagcugaagacgcugguggccaccgccgaggcggagcucgccaagaacgucucccuggacaacgugcugagcaccuucaucuccgccgcccgccagggguucguggacagcgacgucgagaccaaggacgugguggagugccucaagcugucccaccagagcgacaucgaggucacgggcgacuccugcaacaacuacaugcugaccuacaacaagguggagaacaugaccccccgggaccucggggcgugcaucgacugcagcgcccgccacaucaacgcccagguggccaagucccacaacaucgcccugaucuggaacgucaaggacuucaugagccuguccgagcagcuccggaagcagauccgcagcgcggccaagaagaacaaccugcccuucaagcugaccugcgccacgacccgccagguggugaacgucgugaccaccaagaucgcccucaagggcggguga

SEQ ID NO: 18265 - RNA, 5841 nt, Artificial Sequence
  SARS-CoV-2__MT345887.1__non-structural protein 3 (NSP3) CDS gc
auggcccccaccaaggugaccuucggcgacgacacggucaucgaggugcagggguacaagagcgugaacaucaccuucgagcuggacgagcgcaucgacaagguccucaacgagaagugcuccgccuacaccguggagcugggcaccgaggugaacgaguucgcgugcgucguggccgacgccgugaucaagacgcugcagccggucagcgagcuccugaccccccuggggaucgaccucgacgagugguccauggccaccuacuaccuguucgacgagagcggcgaguucaagcuggccucccacauguacugcagcuucuacccccccgacgaggacgaggaggagggggacugcgaggaggaggaguucgagccguccacccaguacgaguacggcacggaggacgacuaccagggcaagccccucgaguucggggcgaccagcgccgcccugcagcccgaggaggagcaggaggaggacuggcuggacgacgacucccagcagaccgugggccagcaggacgggagcgaggacaaccagaccacgaccauccagaccaucguggagguccagccccagcucgagauggagcugaccccgguggugcagacgaucgaggucaacuccuucagcggcuaccugaagcucaccgacaacguguacaucaagaacgccgacaucguggaggaggcgaagaaggucaagcccaccgugguggucaacgccgccaacguguaccugaagcacgggggcggcguggccggggcccugaacaaggcgaccaacaacgccaugcaggucgaguccgacgacuacaucgccacgaacggcccccucaagguggggggcagcugcguccuguccggccacaaccuggccaagcacugccuccacgugguggggcccaacgucaacaagggcgaggacauccagcugcugaagagcgccuacgagaacuucaaccagcacgaggugcuccuggcgccgcugcucuccgccgggaucuucggcgccgaccccauccacagccugcgggugugcgucgacaccgugcgcaccaacguguaccuggccgucuucgacaagaaccucuacgacaagcugguguccagcuuccuggagaugaagagcgagaagcagguggagcagaagaucgccgagauccccaaggaggaggucaagcccuucaucaccgaguccaagccgagcguggagcagcggaagcaggacgacaagaagaucaaggcgugcguggaggaggucacgaccacccucgaggagaccaaguuccugacggagaaccugcuccuguacaucgacaucaacgggaaccugcaccccgacuccgccacccucgugagcgacaucgacaucaccuuccugaagaaggacgcccccuacaucgugggcgacgucgugcaggagggcgugcugaccgccgucgugauccccacgaagaaggccgggggcaccaccgagaugcucgcgaaggcccugcgcaaggugccgaccgacaacuacaucacgaccuaccccgggcagggccugaacggguacaccgucgaggaggccaagaccgugcucaagaagugcaaguccgccuucuacauccugcccagcaucaucuccaacgagaagcaggagauccugggcaccgugagcuggaaccuccgggagaugcuggcgcacgccgaggagacgcgcaagcugaugcccgucugcguggagaccaaggccaucguguccaccauccagcggaaguacaagggcaucaagauccaggagggggucguggacuacggcgcccgcuucuacuucuacaccagcaagacgaccguggccucccugaucaacacccucaacgaccugaacgagacccuggucacgaugccgcucggguacgugacccacggccugaaccuggaggaggcggcccgguacaugcgcagccucaaggugcccgccaccgucuccgugagcucccccgacgccgugaccgccuacaacggguaccugacgagcuccagcaagacccccgaggagcacuucaucgagaccaucucccuggcgggcagcuacaaggacuggagcuacuccggccagagcacccagcucgggaucgaguuccugaagcggggcgacaaguccgucuacuacacgagcaacccgaccaccuuccaccuggacggggaggugaucaccuucgacaaccucaagacgcugcugucccuccgcgaggugcggaccaucaaggucuucaccaccguggacaacaucaaccugcacacgcagguggucgacaugagcaugaccuacggccagcaguucggccccaccuaccuggacggggccgacgugaccaagaucaagccccacaacucccacgagggcaagacguucuacgugcucccgaacgacgacacccugcgcgucgaggccuucgaguacuaccacaccaccgaccccagcuuccuggggcgguacauguccgcccucaaccacacgaagaaguggaaguacccccaggugaacggccugaccagcaucaagugggccgacaacaacugcuaccuggcgaccgcccuccugacccugcagcagaucgagcucaaguucaaccccccggcccugcaggacgccuacuaccgcgcgcgggccggggaggccgccaacuucugcgcccugauccucgcguacugcaacaagacggugggcgagcugggcgacguccgcgagaccauguccuaccuguuccagcacgccaaccucgacagcugcaagcgggugcugaacgucgugugcaagaccugcgggcagcagcagaccacccugaagggcguggaggccgucauguacauggggacgcucuccuacgagcaguucaagaagggcgugcagauccccugcaccugcgggaagcaggccaccaaguaccuggugcagcaggagagccccuucgucaugauguccgcccccccggcgcaguacgagcugaagcacggcaccuucacgugcgccagcgaguacaccggcaacuaccagugcgggcacuacaagcacaucaccuccaaggagacccucuacugcaucgacggcgcccugcugacgaagagcagcgaguacaaggggcccaucaccgacguguucuacaaggagaacuccuacaccaccacgaucaagcccgugaccuacaagcucgacggcgucgugugcaucgagaucgaccccaagcuggacaacuacuacaagaaggacaacagcuacuucaccgagcagccgaucgaccuggugcccaaccagcccuaccccaacgccuccuucgacaacuucaaguucgucugcgacaacaucaaguucgccgacgaccucaaccagcugaccggguacaagaagccggcgagccgcgagcugaaggugacguucuuccccgaccucaacggcgacguggucgccaucgacuacaagcacuacacccccuccuucaagaagggcgccaagcugcugcacaagcccaucguguggcacgugaacaacgccaccaacaaggcgaccuacaagccgaacacguggugcauccggugccucuggagcaccaagcccgucgagaccuccaacagcuucgacgugcugaaguccgaggacgcccaggggauggacaaccuggccugcgaggaccucaagcccgugagcgaggaggucguggagaaccccaccauccagaaggacgugcuggagugcaacgucaagacgaccgagguggugggcgacaucauccugaagccggccaacaacucccucaagaucaccgaggaggucgggcacaccgaccugauggccgcguacguggacaacagcucccugacgaucaagaagcccaacgagcucagccgcgugcugggccugaagacccucgccacccacgggcuggccgccgucaacuccgugcccugggacaccaucgccaacuacgcgaagccguuccugaacaagguggucagcacgaccaccaacaucgugacccgcugccucaaccgggugugcacgaacuacaugcccuacuucuucacccugcugcuccagcugugcaccuucacccgcuccaccaacagccggaucaaggccuccaugcccacgaccaucgccaagaacaccgucaagagcgugggcaaguucugccuggaggccagcuucaacuaccucaagucccccaacuucagcaagcugaucaacaucaucaucugguuccugcuccuguccgugugccugggcagccucaucuacuccaccgccgcgcuggggguccugaugagcaaccucggcaugccguccuacugcacgggguaccgcgagggcuaccugaacagcaccaacgugaccaucgccaccuacugcacgggcuccauccccugcagcgugugccuguccgggcucgacagccuggacaccuaccccucccuggagaccauccagaucaccaucagcuccuucaagugggaccucacggccuucggccuggucgccgagugguuccuggccuacauccucuucacccgguucuucuacgugcuggggcuggcggccaucaugcagcucuucuucagcuacuucgccgugcacuucaucuccaacagcuggcugauguggcugaucaucaaccugguccagauggcccccaucuccgcgauggugcgcauguacaucuucuucgccagcuucuacuacguguggaagagcuacguccacgugguggacggcugcaacuccagcaccugcaugaugugcuacaagcggaaccgcgccacccgggucgagugcacgaccaucgugaacgggguccgccgguccuucuacguguacgccaacggcggcaagggguucugcaagcuccacaacuggaacugcgugaacugcgacaccuucugcgccggcagcaccuucaucuccgacgaggucgcgcgcgaccugagccugcaguucaagcggccgaucaaccccacggaccaguccagcuacaucguggacuccgugaccgucaagaacgggagcauccaccucuacuucgacaaggccggccagaagaccuacgagcgccacucccugagccacuucgugaaccuggacaaccuccgggccaacaacaccaaggggucccugcccaucaacgugaucgucuucgacggcaagagcaagugcgaggaguccagcgccaaguccgccagcguguacuacucccagcugaugugccagcccauccuccugcuggaccaggcgcucgugagcgacgucggcgacagcgccgagguggccgugaagauguucgacgccuacgucaacacguucuccagcaccuucaacgugccgauggagaagcugaagacccugguggccaccgcggaggccgagcucgccaagaacgucucccuggacaacgugcugagcacguucaucuccgccgcgcgccagggguucguggacagcgacgucgagaccaaggacgugguggagugccucaagcugucccaccagagcgacaucgaggucaccggcgacuccugcaacaacuacaugcugaccuacaacaagguggagaacaugacgccccgggaccucggggccugcaucgacugcagcgcccgccacaucaacgcccagguggccaagucccacaacaucgcgcugaucuggaacgucaaggacuucaugagccuguccgagcagcuccggaagcagauccgcagcgccgccaagaagaacaaccugcccuucaagcugaccugcgccaccacccgccagguggugaacgucgugacgaccaagaucgcccucaagggcggguga

SEQ ID NO: 18266 - RNA, 5841 nt, Artificial Sequence
  SARS-CoV-2__MT326054.1__non-structural protein 3 (NSP3) CDS gc
auggcccccaccaaggugaccuucggcgacgacacggucaucgaggugcagggguacaagagcgugaacaucaccuucgagcuggacgagcgcaucgacaagguccucaacgagaagugcuccgccuacaccguggagcugggcaccgaggugaacgaguucgcgugcgucguggccgacgccgugaucaagacgcugcagccggucagcgagcuccugaccccccuggggaucgaccucgacgagugguccauggccaccuacuaccuguucgacgagagcggcgaguucaagcuggccucccacauguacugcagcuucuacccccccgacgaggacgaggaggagggggacugcgaggaggaggaguucgagccguccacccaguacgaguacggcacggaggacgacuaccagggcaagccccucgaguucggggcgaccagcgccgcccugcagcccgaggaggagcaggaggaggacuggcuggacgacgacucccagcagaccgugggccagcaggacgggagcgaggacaaccagaccacgaccauccagaccaucguggagguccagccccagcucgagauggagcugaccccgguggugcagacgaucgaggucaacuccuucagcggcuaccugaagcucaccgacaacguguacaucaagaacgccgacaucguggaggaggcgaagaaggucaagcccaccgugguggucaacgccgccaacguguaccugaagcacgggggcggcguggccggggcccugaacaaggcgaccaacaacgccaugcaggucgaguccgacgacuacaucgccacgaacggcccccucaagguggggggcagcugcguccuguccggccacaaccuggccaagcacugccuccacgugguggggcccaacgucaacaagggcgaggacauccagcugcugaagagcgccuacgagaacuucaaccagcacgaggugcuccuggcgccgcugcucuccgccgggaucuucggcgccgaccccauccacagccugcgggugugcgucgacaccgugcgcaccaacguguaccuggccgucuucgacaagaaccucuacgacaagcugguguccagcuuccuggagaugaagagcgagaagcagguggagcagaagaucgccgagauccccaaggaggaggucaagcccuucaucaccgaguccaagccgagcguggagcagcggaagcaguacgacaagaagaucaaggcgugcguggaggaggucacgaccacccucgaggagaccaaguuccugacggagaaccugcuccuguacaucgacaucaacgggaaccugcaccccgacuccgccacccucgugagcgacaucgacaucaccuuccugaagaaggacgcccccuacaucgugggcgacgucgugcaggagggcgugcugaccgccgucgugauccccacgaagaaggccgggggcaccaccgagaugcucgcgaaggcccugcgcaaggugccgaccgacaacuacaucacgaccuaccccgggcagggccugaacggguacaccgucgaggaggccaagaccgugcucaagaagugcaaguccgccuucuacauccugcccagcaucaucuccaacgagaagcaggagauccugggcaccgugagcuggaaccuccgggagaugcuggcgcacgccgaggagacgcgcaagcugaugcccgucugcguggagaccaaggccaucguguccaccauccagcggaaguacaagggcaucaagauccaggagggggucguggacuacggcgcccgcuucuacuucuacaccagcaagacgaccguggccucccugaucaacacccucaacgaccugaacgagacccuggucacgaugccgcucggguacgugacccacggccugaaccuggaggaggcggcccgguacaugcgcagccucaaggugcccgccaccgucuccgugagcucccccgacgccgugaccgccuacaacggguaccugacgagcuccagcaagacccccgaggagcacuucaucgagaccaucucccuggcgggcagcuacaaggacuggagcuacuccggccagagcacccagcucgggaucgaguuccugaagcggggcgacaaguccgucuacuacacgagcaacccgaccaccuuccaccuggacggggaggugaucaccuucgacaaccucaagacgcugcugucccuccgcgaggugcggaccaucaaggucuucaccaccguggacaacaucaaccugcacacgcagguggucgacaugagcaugaccuacggccagcaguucggccccaccuaccuggacggggccgacgugaccaagaucaagccccacaacucccacgagggcaagacguucuacgugcucccgaacgacgacacccugcgcgucgaggccuucgaguacuaccacaccaccgaccccagcuuccuggggcgguacauguccgcccucaaccacacgaagaaguggaaguacccccaggugaacggccugaccagcaucaagugggccgacaacaacugcuaccuggcgaccgcccuccugacccugcagcagaucgagcucaaguucaaccccccggcccugcaggacgccuacuaccgcgcgcgggccggggaggccgccaacuucugcgcccugauccucgcguacugcaacaagacggugggcgagcugggcgacguccgcgagaccauguccuaccuguuccagcacgccaaccucgacagcugcaagcgggugcugaacgucgugugcaagaccugcgggcagcagcagaccacccugaagggcguggaggccgucauguacauggggacgcucuccuacgagcaguucaagaagggcgugcagauccccugcaccugcgggaagcaggccaccaaguaccuggugcagcaggagagccccuucgucaugauguccgcccccccggcgcaguacgagcugaagcacggcaccuucacgugcgccagcgaguacaccggcaacuaccagugcgggcacuacaagcacaucaccuccaaggagacccucuacugcaucgacggcgcccugcugacgaagagcagcgaguacaaggggcccaucaccgacguguucuacaaggagaacuccuacaccaccacgaucaagcccgugaccuacaagcucgacggcgucgugugcaccgagaucgaccccaagcuggacaacuacuacaagaaggacaacagcuacuucaccgagcagccgaucgaccuggugcccaaccagcccuaccccaacgccuccuucgacaacuucaaguucgucugcgacaacaucaaguucgccgacgaccucaaccagcugacgggguacaagaagccggcgagccgcgagcugaaggugaccuucuuccccgaccucaacggcgacguggucgccaucgacuacaagcacuacacccccuccuucaagaagggcgccaagcugcugcacaagcccaucguguggcacgugaacaacgccaccaacaaggcgacguacaagccgaacaccuggugcauccggugccucuggagcaccaagcccgucgagaccuccaacagcuucgacgugcugaaguccgaggacgcccaggggauggacaaccuggccugcgaggaccucaagcccgugagcgaggaggucguggagaaccccacgauccagaaggacgugcuggagugcaacgucaagaccaccgagguggugggcgacaucauccugaagccggccaacaacucccucaagaucaccgaggaggucgggcacacggaccugauggccgcguacguggacaacagcucccugaccaucaagaagcccaacgagcucagccgcgugcugggccugaagacccucgccacccacgggcuggccgccgucaacuccgugcccugggacacgaucgccaacuacgcgaagccguuccugaacaagguggucagcaccaccaccaacaucgugacgcgcugccucaaccgggugugcaccaacuacaugcccuacuucuucacccugcugcuccagcugugcaccuucacccgcuccacgaacagccggaucaaggccuccaugcccaccaccaucgccaagaacaccgucaagagcgugggcaaguucugccuggaggccagcuucaacuaccucaagucccccaacuucagcaagcugaucaacaucaucaucugguuccugcuccuguccgugugccugggcagccucaucuacuccacggccgcgcuggggguccugaugagcaaccucggcaugccguccuacugcaccggguaccgcgagggcuaccugaacagcaccaacgugaccaucgccacguacugcaccggcuccauccccugcagcgugugccuguccgggcucgacagccuggacaccuaccccucccuggagaccauccagaucacgaucagcuccuucaagugggaccucaccgccuucggccuggucgccgagugguuccuggccuacauccucuucacccgguucuucuacgugcuggggcuggcggccaucaugcagcucuucuucagcuacuucgccgugcacuucaucuccaacagcuggcugauguggcugaucaucaaccugguccagauggcccccaucuccgcgauggugcgcauguacaucuucuucgccagcuucuacuacguguggaagagcuacguccacgugguggacggcugcaacuccagcaccugcaugaugugcuacaagcggaaccgcgccacgcgggucgagugcaccaccaucgugaacgggguccgccgguccuucuacguguacgccaacggcggcaagggguucugcaagcuccacaacuggaacugcgugaacugcgacaccuucugcgccggcagcacguucaucuccgacgaggucgcgcgcgaccugagccugcaguucaagcggccgaucaaccccaccgaccaguccagcuacaucguggacuccgugaccgucaagaacgggagcauccaccucuacuucgacaaggccggccagaagaccuacgagcgccacucccugagccacuucgugaaccuggacaaccuccgggccaacaacacgaaggggucccugcccaucaacgugaucgucuucgacggcaagagcaagugcgaggaguccagcgccaaguccgccagcguguacuacucccagcugaugugccagcccauccuccugcuggaccaggcgcucgugagcgacgucggcgacagcgccgagguggccgugaagauguucgacgccuacgucaacaccuucuccagcaccuucaacgugccgauggagaagcugaagacccugguggccacggcggaggccgagcucgccaagaacgucucccuggacaacgugcugagcaccuucaucuccgccgcgcgccagggguucguggacagcgacgucgagaccaaggacgugguggagugccucaagcugucccaccagagcgacaucgaggucaccggcgacuccugcaacaacuacaugcugacguacaacaagguggagaacaugaccccccgggaccucggggccugcaucgacugcagcgcccgccacaucaacgcccagguggccaagucccacaacaucgcgcugaucuggaacgucaaggacuucaugagccuguccgagcagcuccggaagcagauccgcagcgccgccaagaagaacaaccugcccuucaagcugaccugcgccaccacgcgccagguggugaacgucgugaccaccaagaucgcccucaagggcggguga

SEQ ID NO: 18267 - RNA, 5841 nt, Artificial Sequence
  SARS-CoV-2__MT326086.1__non-structural protein 3 (NSP3) CDS gc
auggcccccaccaaggugaccuucggcgacgacacggucaucgaggugcagggguacaagagcgugaacaucaccuucgagcuggacgagcgcaucgacaagguccucaacgagaagugcuccgccuacaccguggagcugggcaccgaggugaacgaguucgcgugcgucguggccgacgccgugaucaagacgcugcagccggucagcgagcuccugaccccccuggggaucgaccucgacgagugguccauggccaccuacuaccuguucgacgagagcggcgaguucaagcuggccucccacauguacugcagcuucuacccccccgacgaggacgaggaggagggggacugcgaggaggaggaguucgagccguccacccaguacgaguacggcacggaggacgacuaccagggcaagccccucgaguucggggcgaccagcgccgcccugcagcccgaggaggagcaggaggaggacuggcuggacgacgacucccagcagaccgugggccagcaggacgggagcgaggacaaccagaccacgaccauccagaccaucguggagguccagccccagcucgagauggagcugaccccgguggugcagacgaucgaggucaacuccuucagcggcuaccugaagcucaccgacaacguguacaucaagaacgccgacaucguggaggaggcgaagaaggucaagcccaccgugguggucaacgccgccaacguguaccugaagcacgggggcggcguggccggggcccugaacaaggcgaccaacaacgccaugcaggucgaguccgacgacuacaucgccacgaacggcccccucaagguggggggcagcugcguccuguccggccacaaccuggccaagcacugccuccacgugguggggcccaacgucaacaagggcgaggacauccagcugcugaagagcgccuacgagaacuucaaccagcacgaggugcuccuggcgccgcugcucuccgccgggaucuucggcgccgaccccauccacagccugcgggugugcgucgacaccgugcgcaccaacguguaccuggccgucuucgacaagaaccucuacgacaagcugguguccagcuuccuggagaugaagagcgagaagcagguggagcagaagaucgccgagauccccaaggaggaggucaagcccuucaucaccgaguccaagccgagcguggagcagcggaagcaggacgacaagaagaucaaggcgugcguggaggaggucacgaccacccucgaggagaccaaguuccugacggagaaccugcuccuguacaucgacaucaacgggaaccugcaccccgacuccgccacccucgugagcgacaucgacaucaccuuccugaagaaggacgcccccuacaucgugggcgacgucgugcaggagggcgugcugaccgccgucgugauccccacgaagaaggccgggggcaccaccgagaugcucgcgaaggcccugcgcaaggugccgaccgacaacuacaucacgaccuaccccgggcagggccugaacggguacaccgucgaggaggccaagaccgugcucaagaagugcaaguccgccuucuacauccugcccagcaucaucuccaacgagaagcaggagauccugggcaccgugagcuggaaccuccgggagaugcuggcgcacgccgaggagacgcgcaagcugaugcccgucugcguggagaccaaggccaucguguccaccauccagcggaaguacaagggcaucaagauccaggagggggucguggacuacggcgcccgcuucuacuucuacaccagcaagacgaccguggccucccugaucaacacccucaacgaccugaacgagacccuggucacgaugccgcucggguacgugacccacggccugaaccuggaggaggcggcccgguacaugcgcagccucaaggugcccgccaccgucuccgugagcucccccgacgccgugaccgccuacaacggguaccugacgagcuccagcaagacccccgaggagcacuucaucgagaccaucucccuggcgggcagcuacaaggacuggagcuacuccggccagagcacccagcucgggaucgaguuccugaagcggggcgacaaguccgucuacuacacgagcaacccgaccaccuuccaccuggacggggaggugaucaccuucgacaaccucaagacgcugcugucccuccgcgaggugcggaccaucaaggucuucaccaccguggacaacaucaaccugcacacgcagguggucgacaugagcaugaccuacggccagcaguucggccccaccuaccuggacggggccgacgugaccaagaucaagccccacaacucccacgagggcaagacguucuacgugcucccgaacgacgacacccugcgcgucgaggccuucgaguacuaccacaccaccgaccccagcuuccuggggcgguacauguccgcccucaaccacacgaagaaguggaaguacccccaggugaacggccugaccagcaucaagugggccgacaacaacugcuaccuggcgaccgcccuccugacccugcagcagaucgagcucaaguucaaccccccggcccugcaggacgccuacuaccgcgcgcgggccggggaggccgccaacuucugcgcccugauccucgcguacugcaacaagacggugggcgagcugggcgacguccgcgagaccauguccuaccuguuccagcacgccaaccucgacagcugcaagcgggugcugaacgucgugugcaagaccugcgggcagcagcagaccacccugaagggcguggaggccgucauguacauggggacgcucuccuacgagcaguucaagaagggcgugcagauccccugcaccugcgggaagcaggccaccaaguaccuggugcagcaggagagccccuucgucaugauguccgcccccccggcgcaguacgagcugaagcacggcaccuucacgugcgccagcgaguacaccggcaacuaccagugcgggcacuacaagcacaucaccuccaaggagacccucuacugcaucgacggcgcccugcugacgaagagcagcgaguacaaggggcccaucaccgacguguucuacaaggagaacuccuacaccaccacgaucaagcccgugaccuacaagcucgacggcgucgugugcaccgagaucgaccccaagcuggacaacuacuacaagaaggacaacagcuacuucaccgagcagccgaucgaccuggugcccaaccagcccuaccccaacgccuccuucgacaacuucaaguucgucugcgacaacaucaaguucgccgacgaccucaaccagcugacgggguacaagaagccggcgagccgcgagcugaaggugaccuucuuccccgaccucaacggcgacguggucgccaucgacuacaagcacuacacccccuccuucaagaagggcgccaagcugcugcacaagcccaucguguggcacgugaacaacgccaccaacaaggcgacguacaagccgaacaccuggugcauccggugccucuggagcaccaagcccgucgagaccuccaacagcuucgacgugcugaaguccgaggacgcccaggggauggacaaccuggccugcgaggaccucaagcccgugagcgaggaggucguggagaaccccacgauccagaaggacgugcuggagugcaacgucaagaccaccgagguggugggcgacaucauccugaagccggccaacaacucccucaagaucaccgaggaggucgggcacacggaccugauggccgcguacguggacaacagcucccugaccaucaagaagcccaacgagcucagccgcgugcugggccugaagacccucgccacccacgggcuggccgccgucaacuccgugcccugggacacgaucgccaacuacgcgaagccguuccugaacaagguggucagcaccaccaccaacaucgugacgcgcugccucaaccgggugugcaccaacuacaugcccuacuucuucacccugcugcuccagcugugcaccuucacccgcuccgccaacagccggaucaaggccuccaugcccacgaccaucgccaagaacaccgucaagagcgugggcaaguucugccuggaggccagcuucaacuaccucaagucccccaacuucagcaagcugaucaacaucaucaucugguuccugcuccuguccgugugccugggcagccucaucuacuccaccgcggcccuggggguccugaugagcaaccucggcaugccguccuacugcacgggguaccgcgagggcuaccugaacagcaccaacgugaccaucgccaccuacugcacgggcuccauccccugcagcgugugccuguccgggcucgacagccuggacaccuaccccucccuggagaccauccagaucaccaucagcuccuucaagugggaccucacggccuucggccuggucgccgagugguuccuggcguacauccucuucacccgguucuucuacgugcuggggcuggccgccaucaugcagcucuucuucagcuacuucgccgugcacuucaucuccaacagcuggcugauguggcugaucaucaaccugguccagauggcgcccaucuccgccauggugcgcauguacaucuucuucgccagcuucuacuacguguggaagagcuacguccacgugguggacggcugcaacuccagcaccugcaugaugugcuacaagcggaaccgcgccacccgggucgagugcacgaccaucgugaacgggguccgccgguccuucuacguguacgccaacggcggcaagggguucugcaagcuccacaacuggaacugcgugaacugcgacaccuucugcgcgggcagcaccuucaucuccgacgaggucgcccgcgaccugagccugcaguucaagcggccgaucaaccccacggaccaguccagcuacaucguggacuccgugaccgucaagaacgggagcauccaccucuacuucgacaaggccggccagaagaccuacgagcgccacucccugagccacuucgugaaccuggacaaccuccgggccaacaacaccaaggggucccugcccaucaacgugaucgucuucgacggcaagagcaagugcgaggaguccagcgccaaguccgcgagcguguacuacucccagcugaugugccagcccauccuccugcuggaccaggcccucgugagcgacgucggcgacagcgccgagguggccgugaagauguucgacgccuacgucaacacguucuccagcaccuucaacgugccgauggagaagcugaagacccugguggcgaccgccgaggccgagcucgccaagaacgucucccuggacaacgugcugagcacguucaucuccgcggcccgccagggguucguggacagcgacgucgagaccaaggacgugguggagugccucaagcugucccaccagagcgacaucgaggucaccggcgacuccugcaacaacuacaugcugaccuacaacaagguggagaacaugacgccccgggaccucggggccugcaucgacugcagcgcccgccacaucaacgcccagguggcgaagucccacaacaucgcccugaucuggaacgucaaggacuucaugagccuguccgagcagcuccggaagcagauccgcagcgccgccaagaagaacaaccugcccuucaagcugaccugcgccaccacccgccagguggugaacgucgugacgaccaagaucgcgcucaagggcggguga

SEQ ID NO: 18268 - RNA, 5841 nt, Artificial Sequence
  SARS-CoV-2__MT326091.1__non-structural protein 3 (NSP3) CDS gc
auggcccccaccaaggugaccuucggcgacgacacggucaucgaggugcagggguacaagagcgugaacaucaccuucgagcuggacgagcgcaucgacaagguccucaacgagaagugcuccgccuacaccguggagcugggcaccgaggugaacgaguucgcgugcgucguggccgacgccgugaucaagacgcugcagccggucagcgagcuccugaccccccuggggaucggcuucuacgagugguccauggccaccuacuaccucuucgacgagagcggggaguucaagcuggccucccacauguacugcagcuucuacccccccgacgaggacgaggaggagggcgacugcgaggaggaggaguucgagccguccacccaguacgaguacggcacggaggacgacuaccaggggaagccccuggaguucggcgcgaccagcgccgcccuccagcccgaggaggagcaggaggaggacuggcuggacgacgacucccagcagaccguggggcagcaggacggcagcgaggacaaccagaccacgaccauccagaccaucguggagguccagccccagcuggagauggagcucaccccgguggugcagacgaucgaggucaacuccuucagcggguaccugaagcugaccgacaacguguacaucaagaacgccgacaucguggaggaggcgaagaaggucaagcccaccgugguggucaacgccgccaacguguaccucaagcacggcggcgggguggccggcgcccugaacaaggcgaccaacaacgccaugcaggucgaguccgacgacuacaucgccacgaacgggccccugaaggugggcggcagcugcguccucuccgggcacaaccuggccaagcacugccugcacguggugggccccaacgucaacaagggggaggacauccagcuccugaagagcgccuacgagaacuucaaccagcacgaggugcugcucgcgccgcugcuguccgccggcaucuucggggccgaccccauccacagccuccgggugugcgucgacaccgugcgcaccaacguguaccuggccgucuucgacaagaaccuguacgacaagcucguguccagcuuccuggagaugaagagcgagaagcagguggagcagaagaucgccgagauccccaaggaggaggucaagcccuucaucaccgaguccaagccgagcguggagcagcggaagcaggacgacaagaagaucaaggcgugcguggaggaggucacgaccacccuggaggagaccaaguuccucacggagaaccugcugcucuacaucgacaucaacggcaaccugcaccccgacuccgccacccuggugagcgacaucgacaucaccuuccucaagaaggacgcccccuacaucgugggcgacgucgugcaggagggggugcugaccgccgucgugauccccacgaagaaggccggcgggaccaccgagaugcuggcgaaggcccuccgcaaggugccgaccgacuccuacaucacgaccuaccccggccaggggcugaacggcuacaccgucgaggaggccaagaccgugcugaagaagugcaagagcgccuucuacauccuccccuccaucaucagcaacgagaagcaggagauccugggcaccguguccuggaaccugcgggagaugcucgcgcacgccgaggagacgcgcaagcugaugcccgucugcguggagaccaaggccaucgugagcaccauccagcggaaguacaaggggaucaagauccaggagggcgucguggacuacggggcccgcuucuacuucuacaccuccaagacgaccguggccagccugaucaacacccugaacgaccucaacgagacccuggucacgaugccgcugggcuacgugacccacgggcucaaccuggaggaggcggcccgguacaugcgcucccugaaggugcccgccaccgucagcguguccagccccgacgccgugaccgccuacaacggcuaccucacguccagcuccaagacccccgaggagcacuucaucgagaccaucagccuggcgggcagcuacaaggacugguccuacagcgggcaguccacccagcugggcaucgaguuccucaagcggggggacaagagcgucuacuacacguccaacccgaccaccuuccaccuggacggcgaggugaucaccuucgacaaccugaagacgcuccugagccugcgcgaggugcggaccaucaaggucuucaccaccguggacaacaucaaccuccacacgcagguggucgacauguccaugaccuacggccagcaguucgggcccaccuaccuggacggcgccgacgugaccaagaucaagccccacaacagccacgaggggaagacguucuacgugcugccgaacgacgacacccuccgcgucgaggccuucgaguacuaccacaccaccgaccccuccuuccugggccgguacaugagcgcccugaaccacacgaagaaguggaaguacccccaggugaacgggcucaccuccaucaagugggccgacaacaacugcuaccuggcgaccgcccugcucacccugcagcagaucgagcugaaguucaaccccccggcccuccaggacgccuacuaccgcgcgcgggccggcgaggccgccaacuucugcgcccugauccuggcguacugcaacaagacggugggcgagcucggggacguccgcgagaccaugagcuaccuguuccagcacgccaaccuggacuccugcaagcgggugcucaacgucgugugcaagaccugcggccagcagcagaccacccugaaggggguggaggccgucauguacaugggcacgcugagcuacgagcaguucaagaagggggugcagauccccugcaccugcggcaagcaggccaccaaguaccucgugcagcaggagucccccuucgucaugaugagcgcccccccggcgcaguacgagcugaagcacggcaccuucacgugcgccuccgaguacaccgggaacuaccagugcggccacuacaagcacaucaccagcaaggagacccuguacugcaucgacggggcccuccugacgaagagcuccgaguacaagggccccaucaccgacguguucuacaaggagaacagcuacaccaccacgaucaagcccgugaccuacaagcuggacggggucgugugcaccgagaucgaccccaagcucgacaacuacuacaagaaggacaacuccuacuucaccgagcagccgaucgaccuggugcccaaccagcccuaccccaacgccagcuucgacaacuucaaguucgucugcgacaacaucaaguucgccgacgaccugaaccagcucacgggcuacaagaagccggcgucccgcgagcugaaggugaccuucuuccccgaccugaacggcgacguggucgccaucgacuacaagcacuacacccccagcuucaagaagggggccaagcuccugcacaagcccaucguguggcacgugaacaacgccaccaacaaggcgacguacaagccgaacaccuggugcauccggugccugugguccaccaagcccgucgagaccagcaacuccuucgacgugcucaagagcgaggacgcccagggcauggacaaccuggccugcgaggaccugaagcccguguccgaggaggucguggagaaccccacgauccagaaggacgugcucgagugcaacgucaagaccaccgagguggugggggacaucauccugaagccggccaacaacagccugaagaucaccgaggaggucggccacacggaccucauggccgcguacguggacaacuccagccugaccaucaagaagcccaacgagcugucccgcgugcucgggcugaagacccuggccacccacggccucgccgccgucaacagcgugcccugggacacgaucgccaacuacgcgaagccguuccugaacaagguggucuccaccaccaccaacaucgugacgcgcugccugaaccgggugugcaccaacuacaugcccuacuucuucacccuccugcugcagcucugcaccuucacccgcagcacgaacucccggaucaaggccagcaugcccaccaccaucgccaagaacaccgucaagagcgugggcaaguucugccuggaggccuccuucaacuaccugaagagccccaacuucuccaagcucaucaacaucaucaucugguuccugcugcucagcgugugccuggggucccugaucuacagcacggccgcgcucggcguccugauguccaaccuggggaugccgagcuacugcaccggcuaccgcgagggcuaccucaacuccaccaacgugaccaucgccacguacugcaccgggagcauccccugcuccgugugccugagcggccuggacucccucgacaccuaccccagccuggagaccauccagaucacgaucuccagcuucaagugggaccugaccgccuucgggcucgucgccgagugguuccuggccuacauccuguucacccgguucuucuacgugcucggccuggcggccaucaugcagcuguucuucuccuacuucgccgugcacuucaucagcaacuccuggcucauguggcugaucaucaaccugguccagauggcccccaucagcgcgauggugcgcauguacaucuucuucgccagcuucuacuacguguggaaguccuacguccacgugguggacgggugcaacagcuccaccugcaugaugugcuacaagcggaaccgcgccacgcgggucgagugcaccaccaucgugaacggcguccgccggagcuucuacguguacgccaacggcgggaagggcuucugcaagcugcacaacuggaacugcgugaacugcgacaccuucugcgccggguccacguucaucagcgacgaggucgcgcgcgaccucucccugcaguucaagcggccgaucaaccccaccgaccagagcuccuacaucguggacagcgugaccgucaagaacggcuccauccaccuguacuucgacaaggccgggcagaagaccuacgagcgccacagccucucccacuucgugaaccuggacaaccugcgggccaacaacacgaagggcagccuccccaucaacgugaucgucuucgacggcaaguccaagugcgaggagagcuccgccaagagcgccuccguguacuacagccagcugaugugccagcccauccugcuccuggaccaggcgcuggugagcgacgucggggacuccgccgagguggccgugaagauguucgacgccuacgucaacaccuucagcuccaccuucaacgugccgauggagaagcucaagacccugguggccacggcggaggccgagcuggccaagaacgucagccucgacaacgugcuguccaccuucaucagcgccgcgcgccagggcuucguggacuccgacgucgagaccaaggacgugguggagugccugaagcucagccaccaguccgacaucgaggucaccggggacagcugcaacaacuacaugcugacguacaacaagguggagaacaugaccccccgggaccugggcgccugcaucgacugcuccgcccgccacaucaacgcccagguggccaagagccacaacaucgcgcucaucuggaacgucaaggacuucaugucccugagcgagcagcugcggaagcagauccgcuccgccgccaagaagaacaaccuccccuucaagcugaccugcgccaccacgcgccagguggugaacgucgugaccaccaagaucgcccugaaggggggcuga

SEQ ID NO: 18269 - RNA, 5841 nt, Artificial Sequence
  SARS-CoV-2__MT326135.1__non-structural protein 3 (NSP3) CDS gc
auggcccccaccaaggugaccuucggcgacgacacggucaucgaggugcagggguacaagagcgugaacaucaccuucgagcuggacgagcgcaucgacaagguccucaacgagaagugcuccgccuacaccguggagcugggcaccgaggugaacgaguucgcgugcgucguggccgacgccgugaucaagacgcugcagccggucagcgagcuccugaccccccuggggaucgaccucgacgagugguccauggccaccuacuaccuguucgacgagagcggcgaguucaagcuggccucccacauguacugcagcuucuacccccccgacgaggacgaggaggagggggacugcgaggaggaggaguucgagccguccacccaguacgaguacggcacggaggacgacuaccagggcaagccccucgaguucggggcgaccagcgccgcccugcagcccgaggaggagcaggaggaggacuggcuggacgacgacucccagcagaccgugggccagcaggacgggagcgaggacaaccagaccacgaccauccagaccaucguggagguccagccccagcucgagauggagcugaccccgguggugcagacgaucgaggucaacuccuucagcggcuaccugaagcucaccgacaacguguacaucaagaacgccgacaucguggaggaggcgaagaaggucaagcccaccgugguggucaacgccgccaacguguaccugaagcacgggggcggcguggccggggcccugaacaaggcgaccaacaacgccaugcaggucgaguccgacgacuacaucgccacgaacggcccccucaagguggggggcagcugcguccuguccggccacaaccuggccaagcacugccuccacgugguggggcccaacgucaacaagggcgaggacauccagcugcugaagagcgccuacgagaacuucaaccagcacgaggugcuccuggcgccgcugcucuccgccgggaucuucggcgccgaccccauccacagccugcgggugugcgucgacaccgugcgcaccaacguguaccuggccgucuucgacaagaaccucuacgacaagcugguguccagcuuccuggagaugaagagcgagaagcagguggagcagaagaucgccgagauccccaaggaggaggucaagcccuucaucaccgaguccaagccgagcguggagcagcggaagcaggacgacaagaagaucaaggcgugcguggaggaggucacgaccacccucgaggagaccaaguuccugacggagaaccugcuccuguacaucgacaucaacgggaaccugcaccccgacuccgccacccucgugagcgacaucgacaucaccuuccugaagaaggacgcccccuacaucgugggcgacgucgugcaggagggcgugcugaccgccgucgugauccccacgaagaaggccgggggcaccaccgagaugcucgcgaaggcccugcgcaaggugccgaccgacaacuacaucacgaccuaccccgggcagggccugaacggguacaccgucgaggaggccaagaccgugcucaagaagugcaaguccgccuucuacauccugcccagcaucaucuccaacgagaagcaggagauccugggcaccgugagcuggaaccuccgggagaugcuggcgcacgccgaggagacgcgcaagcugaugcccgucugcguggagaccaaggccaucguguccaccauccagcggaaguacaagggcaucaagauccaggagggggucguggacuacggcgcccgcuucuacuucuacaccagcaagacgaccguggccucccugaucaacacccucaacgaccugaacgagacccuggucacgaugccgcucggguacgugacccacggccugaaccuggaggaggcggcccgguacaugcgcagccucaaggugcccgccaccgucuccgugagcucccccgacgccgugaccgccuacaacggguaccugacgagcuccagcaagacccccgaggagcacuucaucgagaccaucucccuggcgggcagcuacaaggacuggagcuacuccggccagagcacccagcucgggaucgaguuccugaagcggggcgacaaguccgucuacuacacgagcaacccgaccaccuuccaccuggacggggaggugaucaccuucgacaaccucaagacgcugcugucccuccgcgaggugcggaccaucaaggucuucaccaccguggacaacaucaaccugcacacgcagguggucgacaugagcaugaccuacggccagcaguucggccccaccuaccuggacggggccgacgugaccaagaucaagccccacaacucccacgagggcaagacguucuacgugcucccgaacgacgacacccugcgcgucgaggccuucgaguacuaccacaccaccgaccccagcuuccuggggcgguacauguccgcccucaaccacacgaagaaguggaaguacccccaggugaacggccugaccagcaucaagugggccgacaacaacugcuaccuggcgaccgcccuccugacccugcagcagaucgagcucaaguucaaccccccggcccugcaggacgccuacuaccgcgcgcgggccggggaggccgccaacuucugcgcccugauccucgcguacugcaacaagacggugggcgagcugggcgacguccgcgagaccauguccuaccuguuccagcacgccaaccucgacagcugcaagcgggugcugaacgucgugugcaagaccugcgggcagcagcagaccacccugaagggcguggaggccgucauguacauggggacgcucuccuacgagcaguucaagaagggcgugcagauccccugcaccugcgggaagcaggccaccaaguaccuggugcagcaggagagccccuucgucaugauguccgcccccccggcgcaguacgagcugaagcacggcaccuucacgugcgccagcgaguacaccggcaacuaccagugcgggcacuacaagcacaucaccuccaaggagacccucuacugcaucgacggcgcccugcugacgaagagcagcgaguacaaggggcccaucaccgacguguucuacaaggagaacuccuacaccaccacgaucaagcccgugaccuacaagcucgacggcgucgugugcaccgagaucgaccccaagcuggacaacuacuacaagaaggacaacagcuacuucaccgagcagccgaucgaccuggugcccaaccagcccuaccccaacgccuccuucgacaacuucaaguucgucugcgacaacaucaaguucgccgacgaccucaaccagcugacgggguacaagaagccggcgagccgcgagcugaaggugaccuucuuccccgaccucaacggcgacguggucgccaucgacuacaagcacuacacccccuccuucaagaagggcgccaagcugcugcacaagcccaucguguggcacgugaacaacgccaccaacaaggcgacguacaagccgaacaccuggugcauccggugccucuggagcaccaagcccgucgagaccuccaacagcuucgacgcccugaaguccgaggacgcccaggggauggacaaccuggccugcgaggaccucaagcccgugagcgaggagguggucgagaaccccacgauccagaaggacgugcuggagugcaacgugaagaccaccgaggucgugggcgacaucauccugaagccggccaacaacucccucaagaucaccgaggagguggggcacacggaccugauggcggccuacgucgacaacagcucccugaccaucaagaagcccaacgagcucagccgcgugcugggccugaagacccucgccacccacgggcuggccgccgugaacuccguccccugggacacgaucgcgaacuacgccaagccguuccugaacaagguggugagcaccaccaccaacaucgucacgcgcugccucaaccgggugugcaccaacuacaugcccuacuucuucacccugcugcuccagcugugcaccuucacccgcuccacgaacagccggaucaaggccuccaugcccaccaccaucgccaagaacaccgugaagagcgucggcaaguucugccuggaggccagcuucaacuaccucaagucccccaacuucagcaagcugaucaacaucaucaucugguuccugcuccuguccgugugccugggcagccucaucuacuccacggcggcccugggggugcugaugagcaaccucggcaugccguccuacugcaccggguaccgcgagggcuaccugaacagcaccaacgucaccaucgccacguacugcaccggcuccauccccugcagcgugugccuguccgggcucgacagccuggacaccuaccccucccuggagaccauccagaucacgaucagcuccuucaagugggaccucaccgccuucggccugguggccgagugguuccuggcguacauccucuucacccgguucuucuacguccuggggcuggccgccaucaugcagcucuucuucagcuacuucgccgugcacuucaucuccaacagcuggcugauguggcugaucaucaaccuggugcagauggcgcccaucuccgccaugguccgcauguacaucuucuucgccagcuucuacuacguguggaagagcuacgugcacgucguggacggcugcaacuccagcaccugcaugaugugcuacaagcggaaccgcgccacgcggguggagugcaccaccaucgucaacggggugcgccgguccuucuacgucuacgccaacggcggcaagggguucugcaagcuccacaacuggaacugcgugaacugcgacaccuucugcgcgggcagcacguucaucuccgacgagguggcccgcgaccugagccugcaguucaagcggccgaucaaccccaccgaccaguccagcuacaucgucgacuccgugaccgugaagaacgggagcauccaccucuacuucgacaaggccggccagaagaccuacgagcgccacucccugagccacuucgucaaccuggacaaccuccgggccaacaacacgaaggggucccugcccaucaacgugaucguguucgacggcaagagcaagugcgaggaguccagcgccaaguccgcgagcgucuacuacucccagcugaugugccagcccauccuccugcuggaccaggcccucgugagcgacgugggcgacagcgccgaggucgccgugaagauguucgacgccuacgugaacaccuucuccagcaccuucaacgucccgauggagaagcugaagacccugguggcgacggccgaggccgagcucgccaagaacgugucccuggacaacguccugagcaccuucaucuccgcggcccgccagggguucguggacagcgacguggagaccaaggacgucguggagugccucaagcugucccaccagagcgacaucgaggugaccggcgacuccugcaacaacuacaugcugacguacaacaaggucgagaacaugaccccccgggaccucggggccugcaucgacugcagcgcccgccacaucaacgcccagguggcgaagucccacaacaucgcccugaucuggaacgugaaggacuucaugagccuguccgagcagcuccggaagcagauccgcagcgccgccaagaagaacaaccugcccuucaagcugaccugcgccaccacgcgccaggucgugaacguggucaccaccaagaucgcgcucaagggcggguga

SEQ ID NO: 18270 - RNA, 5841 nt, Artificial Sequence
  SARS-CoV-2__MT326160.1__non-structural protein 3 (NSP3) CDS gc
auggcccccaccaaggugaccuucggcgacgacacggucaucgaggugcagggguacaagagcgugaacaucaccuucgagcuggacgagcgcaucgacaagguccucaacgagaagugcuccgccuacaccguggagcugggcaccgaggugaacgaguucgcgugcgucguggccgacgccgugaucaagacgcugcagccggucagcgagcuccugaccccccuggggaucgaccucgacgagugguccauggccaccuacuaccuguucgacgagagcggcgaguucaagcuggccucccacauguacugcagcuucuacccccccgacgaggacgaggaggagggggacugcgaggaggaggaguucgagccguccacccaguacgaguacggcacggaggacgacuaccagggcaagccccucgaguucggggcgaccagcgccgcccugcagcccgaggaggagcaggaggaggacuggcuggacgacgacucccagcagaccgugggccagcaggacgggagcgaggacaaccagaccacgaccauccagaccaucguggagguccagccccagcucgagauggagcugaccccgguggugcagacgaucgaggucaacuccuucagcggcuaccugaagcucaccgacaacguguacaucaagaacgccgacaucguggaggaggcgaagaaggucaagcccaccgugguggucaacgccgccaacguguaccugaagcacgggggcggcguggccggggcccugaacaaggcgaccaacaacgccaugcaggucgaguccgacgacuacaucgccacgaacggcccccucaagguggggggcagcugcguccuguccggccacaaccuggccaagcacugccuccacgugguggggcccaacgucaacaagggcgaggacauccagcugcugaagagcgccuacgagaacuucaaccagcacgaggugcuccuggcgccgcugcucuccgccgggaucuucggcgccgaccccauccacagccugcgggugugcgucgacaccgugcgcaccaacguguaccuggccgucuucgacaagaaccucuacgacaagcugguguccagcuuccuggagaugaagagcgagaagcagguggagcagaagaucgccgagauccccaaggaggaggucaagcccuucaucaccgaguccaagccgagcguggagcagcggaagcaggacgacaagaagaucaaggcgugcguggaggaggucacgaccacccucgaggagaccaaguuccugacggagaaccugcuccuguacaucgacaucaacgggaaccugcaccccgacuccgccacccucgugagcgacaucgacaucaccuuccugaagaaggacgcccccuacaucgugggcgacgucgugcaggagggcgugcugaccgccgucgugauccccacgaagaaggccgggggcaccaccgagaugcucgcgaaggcccugcgcaaggugccgaccgacaacuacaucacgaccuaccccgggcagggccugaacggguacaccgucgaggaggccaagaccgugcucaagaagugcaaguccgccuucuacauccugcccagcaucaucuccaacgagaagcaggagauccugggcaccgugagcuggaaccuccgggagaugcuggcgcacgccgaggagacgcgcaagcugaugcccgucugcguggagaccaaggccaucguguccaccauccagcggaaguacaagggcaucaagauccaggagggggucguggacuacggcgcccgcuucuacuucuacaccagcaagacgaccguggccucccugaucaacacccucaacgaccugaacgagacccuggucacgaugccgcucggguacgugacccacggccugaaccuggaggaggcggcccgguacaugcgcagccucaaggugcccgccaccgucuccgugagcucccccgacgccgugaccgccuacaacggguaccugacgagcuccagcaagacccccgaggagcacuucaucgagaccaucucccuggcgggcagcuacaaggacuggagcuacuccggccagagcacccagcucgggaucgaguuccugaagcggggcgacaaguccgucuacuacacgagcaacccgaccaccuuccaccuggacggggaggugaucaccuucgacaaccucaagacgcugcugucccuccgcgaggugcggaccaucaaggucuucaccaccguggacaacaucaaccugcacacgcagguggucgacaugagcaugaccuacggccagcaguucggccccaccuaccuggacggggccgacgugaccaagaucaagccccacaacucccacgagggcaagacguucuacgugcucccgaacgacgacacccugcgcgucgaggccuucgaguacuaccacaccaccgaccccagcuuccuggggcgguacauguccgcccucaaccacacgaagaaguggaaguacccccaggugaacggccugaccagcaucaagugggccgacaacaacugcuaccuggcgaccgcccuccugacccugcagcagaucgagcucaaguucaaccccccggcccugcaggacgccuacuaccgcgcgcgggccggggaggccgccaacuucugcgcccugauccucgcguacugcaacaagacggugggcgagcugggcgacguccgcgagaccauguccuaccuguuccagcacgccaaccucgacagcugcaagcgggugcugaacgucgugugcaagaccugcgggcagcagcagaccacccugaagggcguggaggccgucauguacauggggacgcucuccuacgagcaguucaagaagggcgugcagauccccugcaccugcgggaagcaggccaccaaguaccuggugcagcaggagagccccuucgucaugauguccgcccccccggcgcaguacgagcugaagcacggcaccuucacgugcgccagcgaguacaccggcaacuaccagugcgggcacuacaagcacaucaccuccaaggagacccucuacugcaucgacggcgcccugcugacgaagagcagcgaguacaaggggcccaucaccgacguguucuacaaggagaacuccuacaccaccacgaucaagcccgugaccuacaagcucgacggcgucgugugcaccgagaucgaccccaagcuggacaacuacuacaagaaggacaacagcuacuucaccgagcagccgaucgaccuggugcccaaccagcccuaccccaacgccuccuucgacaacuucaaguucgucugcgacaacaucaaguucgccgacgaccucaaccagcugacgggguacaagaagccggcgagccgcgagcugaaggugaccuucuuccccgaccucaacggcgacguggucgccaucgacuacaagcacuacacccccuccuucaagaagggcgccaagcugcugcacaagcccaucguguggcacgugaacaacgccaccaacaaggcgacguacaagccgaacaccuggugcauccggugccucuggagcaccaagcccgucgagaccuccaacagcuucgacgugcugaaguccgaggacgcccaggggauggacaaccuggccugcgaggaccucaagcccgugagcgaggaggucguggagaaccccacgauccagaaggacgugcuggagugcaacgucaagaccaccgagguggugggcgacaucauccugaagccggccaacaacucccucaagaucaccgaggaggucgggcacacggaccugauggccgcguacguggacaacagcucccugaccaucaagaagcccaacgagcucagccgcgugcugggccugaagacccucgccacccacgggcuggccgccaucaacuccguccccugggacacgaucgccaacuacgcgaagccguuccugaacaagguggugagcaccaccaccaacaucgucacgcgcugccucaaccgggugugcaccaacuacaugcccuacuucuucacccugcugcuccagcugugcaccuucacccgcuccacgaacagccggaucaaggccuccaugcccaccaccaucgccaagaacaccgugaagagcgucggcaaguucugccuggaggccagcuucaacuaccucaagucccccaacuucagcaagcugaucaacaucaucaucugguuccugcuccuguccgugugccugggcagccucaucuacuccacggccgcgcugggggugcugaugagcaaccucggcaugccguccuacugcaccggguaccgcgagggcuaccugaacagcaccaacgucaccaucgccacguacugcaccggcuccauccccugcagcgugugccuguccgggcucgacagccuggacaccuaccccucccuggagaccauccagaucacgaucagcuccuucaagugggaccucaccgccuucggccugguggccgagugguuccuggccuacauccucuucacccgguucuucuacguccuggggcuggcggccaucaugcagcucuucuucagcuacuucgccgugcacuucaucuccaacagcuggcugauguggcugaucaucaaccuggugcagauggcccccaucuccgcgaugguccgcauguacaucuucuucgccagcuucuacuacguguggaagagcuacgugcacgucguggacggcugcaacuccagcaccugcaugaugugcuacaagcggaaccgcgccacgcggguggagugcaccaccaucgucaacggggugcgccgguccuucuacgucuacgccaacggcggcaagggguucugcaagcuccacaacuggaacugcgugaacugcgacaccuucugcgccggcagcacguucaucuccgacgagguggcgcgcgaccugagccugcaguucaagcggccgaucaaccccaccgaccaguccagcuacaucgucgacuccgugaccgugaagaacgggagcauccaccucuacuucgacaaggccggccagaagaccuacgagcgccacucccugagccacuucgucaaccuggacaaccuccgggccaacaacacgaaggggucccugcccaucaacgugaucguguucgacggcaagagcaagugcgaggaguccagcgccaaguccgccagcgucuacuacucccagcugaugugccagcccauccuccugcuggaccaggcgcucgugagcgacgugggcgacagcgccgaggucgccgugaagauguucgacgccuacgugaacaccuucuccagcaccuucaacgucccgauggagaagcugaagacccugguggccacggcggaggccgagcucgccaagaacgugucccuggacaacguccugagcaccuucaucuccgccgcgcgccagggguucguggacagcgacguggagaccaaggacgucguggagugccucaagcugucccaccagagcgacaucgaggugaccggcgacuccugcaacaacuacaugcugacguacaacaaggucgagaacaugaccccccgggaccucggggccugcaucgacugcagcgcccgccacaucaacgcccagguggccaagucccacaacaucgcgcugaucuggaacgugaaggacuucaugagccuguccgagcagcuccggaagcagauccgcagcgccgccaagaagaacaaccugcccuucaagcugaccugcgccaccacgcgccaggucgugaacguggucaccaccaagaucgcccucaagggcggguga

SEQ ID NO: 18271 - RNA, 5841 nt, Artificial Sequence
  SARS-CoV-2__MT325594.1__non-structural protein 3 (NSP3) CDS gc
auggcccccaccaaggugaccuucggcgacgacacggucaucgaggugcagggguacaagagcgugaacaucaccuucgagcuggacgagcgcaucgacaagguccucaacgagaagugcuccgccuacaccguggagcugggcaccgaggugaacgaguucgcgugcgucguggccgacgccgugaucaagacgcugcagccggucagcgagcuccugaccccccuggggaucgaccucgacgagugguccauggccaccuacuaccuguucgacgagagcggcgaguucaagcuggccucccacauguacugcagcuucuacccccccgacgaggacgaggaggagggggacugcgaggaggaggaguucgagccguccacccaguacgaguacggcacggaggacgacuaccagggcaagccccucgaguucggggcgaccagcgccgcccugcagcccgaggaggagcaggaggaggacuggcuggacgacgacucccagcagaccgugggccagcaggacgggagcgaggacaaccagaccacgaccauccagaccaucguggagguccagccccagcucgagauggagcugaccccgguggugcagacgaucgaggucaacuccuucagcggcuaccugaagcucaccgacaacguguacaucaagaacgccgacaucguggaggaggcgaagaaggucaagcccaccgugguggucaacgccgccaacguguaccugaagcacgggggcggcguggccggggcccugaacaaggcgaccaacaacgccaugcaggucgaguccgacgacuacaucgccacgaacggcccccucaagguggggggcagcugcguccuguccggccacaaccuggccaagcacugccuccacgugguggggcccaacgucaacaagggcgaggacauccagcugcugaagagcgccuacgagaacuucaaccagcacgaggugcuccuggcgccgcugcucuccgccgggaucuucggcgccgaccccauccacagccugcgggugugcgucgacaccgugcgcaccaacguguaccuggccgucuucgacaagaaccucuacgacaagcugguguccagcuuccuggagaugaagagcgagaagcagguggagcagaagaucgccgagauccccaaggaggaggucaagcccuucaucaccgaguccaagccgagcguggagcagcggaagcaggacgacaagaagaucaaggcgugcguggaggaggucacgaccacccucgaggagaccaaguuccugacggagaaccugcuccuguacaucgacaucaacgggaaccugcaccccgacuccgccacccucgugagcgacaucgacaucaccuuccugaagaaggacgcccccuacaucgugggcgacgucgugcaggagggcgugcugaccgccgucgugauccccacgaagaaggccgggggcaccaccgagaugcucgcgaaggcccugcgcaaggugccgaccgacaacuacaucacgaccuaccccgggcagggccugaacggguacaccgucgaggaggccaagaccgugcucaagaagugcaaguccgccuucuacauccugcccagcaucaucuccaacgagaagcaggagauccugggcaccgugagcuggaaccuccgggagaugcuggcgcacgccgaggagacgcgcaagcugaugcccgucugcguggagaccaaggccaucguguccaccauccagcggaaguacaagggcaucaagauccaggagggggucguggacuacggcgcccgcuucuacuucuacaccagcaagacgaccguggccucccugaucaacacccucaacgaccugaacgagacccuggucacgaugccgcucggguacgugacccacggccugaaccuggaggaggcggcccgguacaugcgcagccucaaggugcccgccaccgucuccgugagcucccccgacgccgugaccgccuacaacggguaccugacgagcuccagcaagacccccgaggagcacuucaucgagaccaucucccuggcgggcagcuacaaggacuggagcuacuccggccagagcacccagcucgggaucgaguuccugaagcggggcgacaaguccgucuacuacacgagcaacccgaccaccuuccaccuggacggggaggugaucaccuucgacaaccucaagacgcugcugucccuccgcgaggugcggaccaucaaggucuucaccaccguggacaacaucaaccugcacaugcagguggucgacaugagcaugacguacggccagcaguucggccccaccuaccuggacggggccgacgugaccaagaucaagccccacaacucccacgagggcaagaccuucuacgugcucccgaacgacgacacgcugcgcgucgaggccuucgaguacuaccacaccaccgaccccagcuuccuggggcgguacauguccgcccucaaccacaccaagaaguggaaguacccccaggugaacggccugacgagcaucaagugggccgacaacaacugcuaccuggcgaccgcccuccugacccugcagcagaucgagcucaaguucaaccccccggcccugcaggacgccuacuaccgcgcgcgggccggggaggccgccaacuucugcgcccugauccucgcguacugcaacaagaccgugggcgagcugggcgacguccgcgagacgauguccuaccuguuccagcacgccaaccucgacagcugcaagcgggugcugaacgucgugugcaagaccugcgggcagcagcagaccacccugaagggcguggaggccgucauguacauggggacccucuccuacgagcaguucaagaagggcgugcagauccccugcacgugcgggaagcaggccaccaaguaccuggugcagcaggagagccccuucgucaugauguccgcccccccggcgcaguacgagcugaagcacggcaccuucaccugcgccagcgaguacacgggcaacuaccagugcgggcacuacaagcacaucaccuccaaggagacccucuacugcaucgacggcgcccugcugaccaagagcagcgaguacaaggggcccaucacggacguguucuacaaggagaacuccuacaccaccaccaucaagcccgugacguacaagcucgacggcgucgugugcaccgagaucgaccccaagcuggacaacuacuacaagaaggacaacagcuacuucaccgagcagccgaucgaccuggugcccaaccagcccuaccccaacgccuccuucgacaacuucaaguucgucugcgacaacaucaaguucgccgacgaccucaaccagcugaccggguacaagaagccggcgagccgcgagcugaaggugacguucuuccccgaccucaacggcgacguggucgccaucgacuacaagcacuacacccccuccuucaagaagggcgccaagcugcugcacaagcccaucguguggcacgugaacaacgccaccaacaaggcgaccuacaagccgaacacguggugcauccggugccucuggagcaccaagcccgucgagaccuccaacagcuucgacgugcugaaguccgaggacgcccaggggauggacaaccuggccugcgaggaccucaagcccgugagcgaggaggucguggagaaccccaccauccagaaggacgugcuggagugcaacgucaagacgaccgagguggugggcgacaucauccugaagccggccaacaacucccucaagaucaccgaggaggucgggcacaccgaccugauggccgcguacguggacaacagcucccugacgaucaagaagcccaacgagcucagccgcgugcugggccugaagacccucgccacccacgggcuggccgccgucaacuccgugcccugggacaccaucgccaacuacgcgaagccguuccugaacaagguggucagcacgaccaccaacaucgugacccgcugccucaaccgggugugcacgaacuacaugcccuacuucuucacccugcugcuccagcugugcaccuucacccgcuccaccaacagccggaucaaggccuccaugcccacgaccaucgccaagaacaccgucaagagcgugggcaaguucugccuggaggccagcuucaacuaccucaagucccccaacuucagcaagcugaucaacaucaucaucugguuccugcuccuguccgugugccugggcagccucaucuacuccaccgccgcgcuggggguccugaugagcaaccucggcaugccguccuacugcacgggguaccgcgagggcuaccugaacagcaccaacgugaccaucgccaccuacugcacgggcuccauccccugcagcgugugccuguccgggcucgacagccuggacaccuaccccucccuggagaccauccagaucaccaucagcuccuucaagugggaccucacggccuucggccuggucgccgagugguuccuggccuacauccucuucacccgguucuucuacgugcuggggcuggcggccaucaugcagcucuucuucagcuacuucgccgugcacuucaucuccaacagcuggcugauguggcugaucaucaaccugguccagauggcccccaucuccgcgauggugcgcauguacaucuucuucgccagcuucuacuacguguggaagagcuacguccacgugguggacggcugcaacuccagcaccugcaugaugugcuacaagcggaaccgcgccacccgggucgagugcacgaccaucgugaacgggguccgccgguccuucuacguguacgccaacggcggcaagggguucugcaagcuccacaacuggaacugcgugaacugcgacaccuucugcgccggcagcaccuucaucuccgacgaggucgcgcgcgaccugagccugcaguucaagcggccgaucaaccccacggaccaguccagcuacaucguggacuccgugaccgucaagaacgggagcauccaccucuacuucgacaaggccggccagaagaccuacgagcgccacucccugagccacuucgugaaccuggacaaccuccgggccaacaacaccaaggggucccugcccaucaacgugaucgucuucgacggcaagagcaagugcgaggaguccagcgccaaguccgccagcguguacuacucccagcugaugugccagcccauccuccugcuggaccaggcgcucgugagcgacgucggcgacagcgccgagguggccgugaagauguucgacgccuacgucaacacguucuccagcaccuucaacgugccgauggagaagcugaagacccugguggccaccgcggaggccgagcucgccaagaacgucucccuggacaacgugcugagcacguucaucuccgccgcgcgccagggguucguggacagcgacgucgagaccaaggacgugguggagugccucaagcugucccaccagagcgacaucgaggucaccggcgacuccugcaacaacuacaugcugaccuacaacaagguggagaacaugacgccccgggaccucggggccugcaucgacugcagcgcccgccacaucaacgcccagguggccaagucccacaacaucgcgcugaucuggaacgucaaggacuucaugagccuguccgagcagcuccggaagcagauccgcagcgccgccaagaagaacaaccugcccuucaagcugaccugcgccaccacccgccagguggugaacgucgugacgaccaagaucgcccucaagggcggguga

SEQ ID NO: 18272 - RNA, 5841 nt, Artificial Sequence
  SARS-CoV-2__MT293211.1__non-structural protein 3 (NSP3) CDS gc
auggcccccaccaaggugaccuucggcgacgacacggucaucgaggugcagggguacaagagcgugaacaucaccuucgagcuggacgagcgcaucgacaagguccucaacgagaagugcuccgccuacaccguggagcugggcaccgaggugaacgaguucgcgugcgucguggccgacgccgugaucaagacgcugcagccggucagcgagcuccugaccccccuggggaucgaccucgacgagugguccauggccaccuacuaccuguucgacgagagcggcgaguucaagcuggccucccacauguacugcagcuucuacccccccgacgaggacgaggaggagggggacugcgaggaggaggaguucgagccguccacccaguacgaguacggcacggaggacgacuaccagggcaagccccucgaguucggggcgaccagcgccgcccugcagcccgaggaggagcaggaggaggacuggcuggacgacgacucccagcagaccgugggccagcaggacgggagcgaggacaaccagaccacgaccauccagaccaucguggagguccagccccagcucgagauggagcugaccccgguggugcagacgaucgaggucaacuccuucagcggcuaccugaagcucaccgacaacguguacaucaagaacgccgacaucguggaggaggcgaagaaggucaagcccaccgugguggucaacgccgccaacguguaccugaagcacgggggcggcguggccggggcccugaacaaggcgaccaacaacgccaugcaggucgaguccgacgacuacaucgccacgaacggcccccucaagguggggggcagcugcguccuguccggccacaaccuggccaagcacugccuccacgugguggggcccaacgucaacaagggcgaggacauccagcugcugaagagcgccuacgagaacuucaaccagcacgaggugcuccuggcgccgcugcucuccgccgggaucuucggcgccgaccccauccacagccugcgggugugcgucgacaccgugcgcaccaacguguaccuggccgucuucgacaagaaccucuacgacaagcugguguccagcuuccuggagaugaagagcgagaagcagguggagcagaagaucgccgagauccccaaggaggaggucaagcccuucaucaccgaguccaagccgagcguggagcagcggaagcaggacgacaagaagaucaaggcgugcguggaggaggucacgaccacccucgaggagaccaaguuccugacggagaaccugcuccuguacaucgacaucaacgggaaccugcaccccgacuccgccacccucgugagcgacaucgacaucaccuuccugaagaaggacgcccccuacaucgugggcgacgucgugcaggagggcgugcugaccgccgucgugauccccacgaagaaggccgggggcaccaccgagaugcucgcgaaggcccugcgcaaggugccgaccgacaacuacaucacgaccuaccccgggcagggccugaacggguacaccgucgaggaggccaagaccgugcucaagaagugcaaguccgccuucuacauccugcccagcaucaucuccaacgagaagcaggagauccugggcaccgugagcuggaaccuccgggagaugcuggcgcacgccgaggagacgcgcaagcugaugcccgucugcguggagaccaaggccaucguguccaccauccagcggaaguacaagggcaucaagauccaggagggggucguggacuacggcgcccgcuucuacuucuacaccagcaagacgaccguggccucccugaucaacacccucaacgaccugaacgagacccuggucacgaugccgcucggguacgugacccacggccugaaccuggaggaggcggcccgguacaugcgcagccucaaggugcccgccaccgucuccgugagcucccccgacgccgugaccgccuacaacggguaccugacgagcuccagcaagacccccgaggagcacuucaucgagaccaucucccuggcgggcagcuacaaggacuggagcuacuccggccagagcacccagcucgggaucgaguuccugaagcggggcgacaaguccgucuacuacacgagcaacccgaccaccuuccaccuggacggggaggugaucaccuucgacaaccucaagacgcugcugucccuccgcgaggugcggaccaucaaggucuucaccaccguggacaacaucaaccugcacacgcagguggucgacaugagcaugaccuacggccagcaguucggccccaccuaccuggacggggccgacgugaccaagaucaagccccacaacucccacgagggcaagacguucuacgugcucccgaacgacgacacccugcgcgucgaggccuucgaguacuaccacaccaccgaccccagcuuccuggggcgguacauguccgcccucaaccacacgaagaaguggaaguacccccaggugaacggccugaccagcaucaagugggccgacaacaacugcuaccuggcgaccgcccuccugacccugcagcagaucgagcucaaguucaaccccccggcccugcaggacgccuacuaccgcgcgcgggccggggaggccgccaacuucugcgcccugauccucgcguacugcaacaagacggugggcgagcugggcgacguccgcgagaccauguccuaccuguuccagcacgccaaccucgacagcugcaagcgggugcugaacgucgugugcaagaccugcgggcagcagcagaccacccugaagggcguggaggccgucauguacauggggacgcucuccuacgagcaguucaagaagggcgugcagauccccugcaccugcgggaagcaggccaccaaguaccuggugcagcaggagagccccuucgucaugauguccgcccccccggcgcaguacgagcugaagcacggcaccuucacgugcgccagcgaguacaccggcaacuaccagugcgggcacuacaagcacaucaucuccaaggagacccucuacugcaucgacggcgcccugcugaccaagagcagcgaguacaaggggcccaucacggacguguucuacaaggagaacuccuacaccaccaccaucaagcccgugacguacaagcucgacggcgucgugugcaccgagaucgaccccaagcuggacaacuacuacaagaaggacaacagcuacuucaccgagcagccgaucgaccuggugcccaaccagcccuaccccaacgccuccuucgacaacuucaaguucgucugcgacaacaucaaguucgccgacgaccucaaccagcugaccggguacaagaagccggcgagccgcgagcugaaggugacguucuuccccgaccucaacggcgacguggucgccaucgacuacaagcacuacacccccuccuucaagaagggcgccaagcugcugcacaagcccaucguguggcacgugaacaacgccaccaacaaggcgaccuacaagccgaacacguggugcauccggugccucuggagcaccaagcccgucgagaccuccaacagcuucgacgugcugaaguccgaggacgcccaggggauggacaaccuggccugcgaggaccucaagcccgugagcgaggaggucguggagaaccccaccauccagaaggacgugcuggagugcaacgucaagacgaccgagguggugggcgacaucauccugaagccggccaacaacucccucaagaucaccgaggaggucgggcacaccgaccugauggccgcguacguggacaacagcucccugacgaucaagaagcccaacgagcucagccgcgugcugggccugaagacccucgccacccacgggcuggccgccgucaacuccgugcccugggacaccaucgccaacuacgcgaagccguuccugaacaagguggucagcacgaucaccaacaucgugacccgcugccucaaccgggugugcaccaacuacaugcccuacuucuucacgcugcugcuccagcugugcaccuucacccgcuccaccaacagccggaucaaggccuccaugcccaccacgaucgccaagaacaccgucaagagcgugggcaaguucugccuggaggccagcuucaacuaccucaagucccccaacuucagcaagcugaucaacaucaucaucugguuccugcuccuguccgugugccugggcagccucaucuacuccaccgccgcgcuggggguccugaugagcaaccucggcaugccguccuacugcaccggguaccgcgagggcuaccugaacagcacgaacgugaccaucgccaccuacugcaccggcuccauccccugcagcgugugccuguccgggcucgacagccuggacacguaccccucccuggagaccauccagaucaccaucagcuccuucaagugggaccucaccgccuucggccuggucgccgagugguuccuggccuacauccucuucacgcgguucuucuacgugcuggggcuggcggccaucaugcagcucuucuucagcuacuucgccgugcacuucaucuccaacagcuggcugauguggcugaucaucaaccugguccagauggcccccaucuccgcgauggugcgcauguacaucuucuucgccagcuucuacuacguguggaagagcuacguccacgugguggacggcugcaacuccagcaccugcaugaugugcuacaagcggaaccgcgccacccgggucgagugcaccacgaucgugaacgggguccgccgguccuucuacguguacgccaacggcggcaagggguucugcaagcuccacaacuggaacugcgugaacugcgacaccuucugcgccggcagcaccuucaucuccgacgaggucgcgcgcgaccugagccugcaguucaagcggccgaucaaccccaccgaccaguccagcuacaucguggacuccgugacggucaagaacgggagcauccaccucuacuucgacaaggccggccagaagaccuacgagcgccacucccugagccacuucgugaaccuggacaaccuccgggccaacaacaccaaggggucccugcccaucaacgugaucgucuucgacggcaagagcaagugcgaggaguccagcgccaaguccgccagcguguacuacucccagcugaugugccagcccauccuccugcuggaccaggcgcucgugagcgacgucggcgacagcgccgagguggccgugaagauguucgacgccuacgucaacaccuucuccagcacguucaacgugccgauggagaagcugaagacccugguggccaccgcggaggccgagcucgccaagaacgucucccuggacaacgugcugagcaccuucaucuccgccgcgcgccagggguucguggacagcgacgucgagacgaaggacgugguggagugccucaagcugucccaccagagcgacaucgaggucaccggcgacuccugcaacaacuacaugcugaccuacaacaagguggagaacaugaccccccgggaccucggggccugcaucgacugcagcgcccgccacaucaacgcccagguggccaagucccacaacaucgcgcugaucuggaacgucaaggacuucaugagccuguccgagcagcuccggaagcagauccgcagcgccgccaagaagaacaaccugcccuucaagcugacgugcgccaccacccgccagguggugaacgucgugaccacgaagaucgcccucaagggcggguga

SEQ ID NO: 18273 - RNA, 5841 nt, Artificial Sequence
  SARS-CoV-2__MT291826.1__non-structural protein 3 (NSP3) CDS gc
auggcccccaccaaggugaccuucggcgacgacacggucaucgaggugcagggguacaagagcgugaacaucaccuucgagcuggacgagcgcaucgacaagguccucaacgagaagugcuccgccuacaccguggagcugggcaccgaggugaacgaguucgcgugcgucguggccgacgccgugaucaagacgcugcagccggucagcgagcuccugaccccccuggggaucgaccucgacgagugguccauggccaccuacuaccuguucgacgagagcggcgaguucaagcuggccucccacauguacugcagcuucuacccccccgacgaggacgaggaggagggggacugcgaggaggaggaguucgagccguccacccaguacgaguacggcacggaggacgacuaccagggcaagccccucgaguucggggcgaccagcgccgcccugcagcccgaggaggagcaggaggaggacuggcuggacgacgacucccagcagaccgugggccagcaggacgggagcgaggacaaccagaccacgaccauccagaccaucguggagguccagccccagcucgagauggagcugaccccgguggugcagacgaucgaggucaacuccuucagcggcuaccugaagcucaccgacaacguguacaucaagaacgccgacaucguggaggaggcgaagaaggucaagcccaccgugguggucaacgccgccaacguguaccugaagcacgggggcggcguggccggggcccugaacaaggcgaccaacaacgccaugcaggucgaguccgacgacuacaucgccacgaacggcccccucaagguggggggcagcugcguccuguccggccacaaccuggccaagcacugccuccacgugguggggcccaacgucaacaagggcgaggacauccagcugcugaagagcgccuacgagaacuucaaccagcacgaggugcuccuggcgccgcugcucuccgccgggaucuucggcgccgaccccauccacagccugcgggugugcgucgacaccgugcgcaccaacguguaccuggccgucuucgacaagaaccucuacgacaagcugguguccagcuuccuggagaugaagagcgagaagcagguggagcagaagaucgccgagauccccaaggaggaggucaagcccuucaucaccgaguccaagccgagcguggagcagcggaagcaggacgacaagaagaucaaggcgugcguggaggaggucacgaccacccucgaggagaccaaguuccugacggagaaccugcuccuguacaucgacaucaacgggaaccugcaccccgacuccgccacccucgugagcgacaucgacaucaccuuccugaagaaggacgcccccuacaucgugggcgacgucgugcaggagggcgugcugaccgccgucgugauccccacgaagaaggccgggggcaccaccgagaugcucgcgaaggcccugcgcaaggugccgaccgacaacuacaucacgaccuaccccgggcagggccugaacggguacaccgucgaggaggccaagaccgugcucaagaagugcaaguccgccuucuacauccugcccagcaucaucuccaacgagaagcaggagauccugggcaccgugagcuggaaccuccgggagaugcuggcgcacgccgaggagacgcgcaagcugaugcccgucugcguggagaccaaggccaucguguccaccauccagcggaaguacaagggcaucaagauccaggagggggucguggacuacggcgcccgcuucuacuucuacaccagcaagacgaccguggccucccugaucaacacccucaacgaccugaacgagacccuggucacgaugccgcucggguacgugacccacggccugaaccuggaggaggcggcccgguacaugcgcagccucaaggugcccgccaccgucuccgugagcucccccgacgccgugaccgccuacaacggguaccugacgagcuccagcaagacccccgaggagcacuucaucgagaccaucucccuggcgggcagcuacaaggacuggagcuacuccggccagagcacccagcucgggaucgaguuccugaagcggggcgacaaguccgucuacuacacgagcaacccgaccaccuuccaccuggacggggaggugaucaccuucgacaaccucaagacgcugcugccccuccgcgaggugcggaccaucaaggucuucaccaccguggacaacaucaaccugcacacgcagguggucgacauguccaugaccuacggccagcaguucggccccaccuaccuggacggggccgacgugaccaagaucaagccgcacaacagccacgagggcaagacguucuacgugcuccccaacgacgacacccugcgcgucgaggccuucgaguacuaccacaccaccgaccccuccuuccuggggcgguacaugagcgcccucaaccacacgaagaaguggaaguacccccaggugaacggccugaccuccaucaagugggccgacaacaacugcuaccuggcgaccgcccuccugacccugcagcagaucgagcucaaguucaacccgcccgcccugcaggacgccuacuaccgcgcgcgggccggggaggccgccaacuucugcgcccugauccucgcguacugcaacaagacggugggcgagcugggcgacguccgcgagaccaugagcuaccuguuccagcacgccaaccucgacuccugcaagcgggugcugaacgucgugugcaagaccugcgggcagcagcagaccacccugaagggcguggaggccgucauguacauggggacgcucagcuacgagcaguucaagaagggcgugcagauccccugcaccugcgggaagcaggccaccaaguaccuggugcagcaggagucccccuucgucaugaugagcgccccgcccgcgcaguacgagcugaagcacggcaccuucacgugcgccuccgaguacaccggcaacuaccagugcgggcacuacaagcacaucaccagcaaggagacccucuacugcaucgacggcgcccugcugacgaaguccagcgaguacaaggggcccaucaccgacguguucuacaaggagaacagcuacaccaccacgaucaagcccgugaccuacaagcucgacggcgucgugugcaccgagaucgacccgaagcuggacaacuacuacaagaaggacaacuccuacuucaccgagcagcccaucgaccuggugcccaaccagcccuacccgaacgccagcuucgacaacuucaaguucgucugcgacaacaucaaguucgccgacgaccucaaccagcugacgggguacaagaagcccgcgucccgcgagcugaaggugaccuucuuccccgaccucaacggcgacguggucgccaucgacuacaagcacuacacccccagcuucaagaagggcgccaagcugcugcacaagccgaucguguggcacgugaacaacgccaccaacaaggcgacguacaagcccaacaccuggugcauccggugccucugguccaccaagcccgucgagaccagcaacuccuucgacgugcugaagagcgaggacgcccaggggauggacaaccuggccugcgaggaccucaagcccguguccgaggaggucguggagaacccgacgauccagaaggacgugcuggagugcaacgucaagaccaccgagguggugggcgacaucauccugaagcccgccaacaacagccucaagaucaccgaggaggucgggcacacggaccugauggccgcguacguggacaacuccagccugaccaucaagaagcccaacgagcucucccgcgugcugggccugaagacccucgccacccacgggcuggccgccgucaacagcgugccgugggacacgaucgccaacuacgcgaagcccuuccugaacaagguggucuccaccaccaccaacaucgugacgcgcugccucaaccgggugugcaccaacuacaugcccuacuucuucacccugcugcuccagcugugcaccuucacccgcagcacgaacucccggaucaaggccagcaugcccaccaccaucgccaagaacaccgucaaguccgugggcaaguucugccuggaggccagcuucaacuaccucaagagcccgaacuucuccaagcugaucaacaucaucaucugguuccugcuccugagcgugugccugggcucccucaucuacagcacggccgcgcuggggguccugauguccaaccucggcaugcccagcuacugcaccggguaccgcgagggcuaccugaacuccaccaacgugaccaucgccacguacugcaccggcagcauccccugcuccgugugccugagcgggcucgacucccuggacaccuaccccagccuggagaccauccagaucacgaucuccagcuucaagugggaccucaccgccuucggccuggucgccgagugguuccuggccuacauccucuucacccgguucuucuacgugcuggggcuggcggccaucaugcagcucuucuucuccuacuucgccgugcacuucaucagcaacuccuggcugauguggcugaucaucaaccugguccagauggccccgaucagcgcgauggugcgcauguacaucuucuucgccuccuucuacuacguguggaagagcuacguccacgugguggacggcugcaacagcuccaccugcaugaugugcuacaagcggaaccgcgccacgcgggucgagugcaccaccaucgugaacgggguccgccggagcuucuacguguacgccaacggcggcaagggguucugcaagcuccacaacuggaacugcgugaacugcgacaccuucugcgccggcuccacguucaucagcgacgaggucgcgcgcgaccugucccugcaguucaagcggcccaucaaccccaccgaccagagcuccuacaucguggacagcgugaccgucaagaacggguccauccaccucuacuucgacaaggccggccagaagaccuacgagcgccacagccugucccacuucgugaaccuggacaaccuccgggccaacaacacgaaggggagccugcccaucaacgugaucgucuucgacggcaaguccaagugcgaggagagcuccgccaagagcgccuccguguacuacagccagcugaugugccagccgauccuccugcuggaccaggcgcucguguccgacgucggcgacagcgccgagguggccgugaagauguucgacgccuacgucaacaccuucagcuccaccuucaacgugcccauggagaagcugaagacccugguggccacggcggaggccgagcucgccaagaacgucagccuggacaacgugcuguccaccuucaucagcgccgcgcgccagggguucguggacuccgacgucgagaccaaggacgugguggagugccucaagcugagccaccaguccgacaucgaggucaccggcgacagcugcaacaacuacaugcugacguacaacaagguggagaacaugaccccccgggaccucggggccugcaucgacugcuccgcccgccacaucaacgcccagguggccaagagccacaacaucgcgcugaucuggaacgucaaggacuucaugucccugagcgagcagcuccggaagcagauccgcuccgccgccaagaagaacaaccugcccuucaagcugaccugcgccaccacgcgccagguggugaacgucgugaccaccaagaucgcccucaagggcggguga

SEQ ID NO: 18274 - RNA, 5841 nt, Artificial Sequence
  SARS-CoV-2__MT276325.2__non-structural protein 3 (NSP3) CDS gc
auggcccccaccaaggugaccuucggcgacgacacggucaucgaggugcagggguacaagagcgugaacaucaccuucgagcuggacgagcgcaucgacaagguccucaacgagaagugcuccgccuacaccguggagcugggcaccgaggugaacgaguucgcgugcgucguggccgacgccgugaucaagacgcugcagccggucagcgagcuccugaccccccuggggaucgaccucgacgagugguccauggccaccuacuaccuguucgacgagagcggcgaguucaagcuggccucccacauguacugcagcuucuacccccccgacgaggacgaggaggagggggacugcgaggaggaggaguucgagccguccacccaguacgaguacggcacggaggacgacuaccagggcaagccccucgaguucggggcgaccagcgccgcccugcagcccgaggaggagcaggaggaggacuggcuggacgacgacucccagcagaccgugggccagcaggacgggagcgaggacaaccagaccacgaccauccagaccaucguggagguccagccccagcucgagauggagcugaccccgguggugcagacgaucgaggucaacuccuucagcggcuaccugaagcucaccgacaacguguacaucaagaacgccgacaucguggaggaggucaagaaggugaagcccaccguggucgugaacgcggccaacguguaccugaagcacgggggcggcgucgccggggcccugaacaaggccaccaacaacgcgaugcagguggaguccgacgacuacaucgccacgaacggcccccucaaggucgggggcagcugcgugcuguccggccacaaccuggccaagcacugccuccacguggucgggcccaacgugaacaagggcgaggacauccagcugcugaagagcgccuacgagaacuucaaccagcacgaggugcuccuggccccgcugcucuccgcggggaucuucggcgccgaccccauccacagccugcgggucugcguggacaccgugcgcaccaacgucuaccuggccguguucgacaagaaccucuacgacaagcugguguccagcuuccuggagaugaagagcgagaagcaggucgagcagaagaucgccgagauccccaaggaggaggugaagcccuucaucaccgaguccaagccgagcguggagcagcggaagcaggacgacaagaagaucaaggccugcgucgaggaggugacgaccacccucgaggagaccaaguuccugacggagaaccugcuccuguacaucgacaucaacgggaaccugcaccccgacuccgcgacccucgugagcgacaucgacaucaccuuccugaagaaggacgcccccuacaucgucggcgacguggugcaggagggcguccugaccgccguggugauccccacgaagaaggccgggggcaccaccgagaugcucgccaaggcgcugcgcaaggucccgaccgacaacuacaucacgaccuaccccgggcagggccugaacggguacaccguggaggaggccaagaccgugcucaagaagugcaaguccgccuucuacauccugcccagcaucaucuccaacgagaagcaggagauccugggcaccgucagcuggaaccuccgggagaugcuggcccacgcggaggagacgcgcaagcugaugcccgugugcguggagaccaaggccaucgucuccaccauccagcggaaguacaagggcaucaagauccaggagggggugguggacuacggcgcccgcuucuacuucuacaccagcaagacgaccgucgccucccugaucaacacccucaacgaccugaacgagacccuggugacgaugccgcucggguacgugacccacggccugaaccuggaggaggccgcgcgguacaugcgcagccucaagguccccgccaccguguccgugagcucccccgacgccgucaccgccuacaacggguaccugacgagcuccagcaagacccccgaggagcacuucaucgagaccaucucccuggccggcagcuacaaggacuggagcuacuccggccagagcacccagcucgggaucgaguuccugaagcggggcgacaaguccguguacuacacgagcaacccgaccaccuuccaccuggacggggaggugaucaccuucgacaaccucaagacgcugcugucccuccgcgagguccggaccaucaagguguucaccaccguggacaacaucaaccugcacacgcaggucguggacaugagcaugaccuacggccagcaguucggccccaccuaccuggacggggcggacgugaccaagaucaagccccacaacucccacgagggcaagacguucuacguccucccgaacgacgacacccugcgcguggaggccuucgaguacuaccacaccaccgaccccagcuuccuggggcgguacauguccgcccucaaccacacgaagaaguggaaguacccccaggugaacggccugaccagcaucaagugggccgacaacaacugcuaccuggccaccgcgcuccugacccugcagcagaucgagcucaaguucaaccccccggcccugcaggacgccuacuaccgcgcccgggcgggggaggccgccaacuucugcgcccugauccucgccuacugcaacaagacggucggcgagcugggcgacgugcgcgagaccauguccuaccuguuccagcacgcgaaccucgacagcugcaagcggguccugaacguggugugcaagaccugcgggcagcagcagaccacccugaagggcgucgaggccgugaucuacauggggacgcucuccuacgagcaguucaagaagggcgugcagauccccugcaccugcgggaagcaggccaccaaguaccugguccagcaggagagccccuucgugaugauguccgcccccccggcccaguacgagcugaagcacggcaccuucacgugcgcgagcgaguacaccggcaacuaccagugcgggcacuacaagcacaucaccuccaaggagacccucuacugcaucgacggcgcccugcugacgaagagcagcgaguacaaggggcccaucaccgacguguucuacaaggagaacuccuacaccaccacgaucaagcccgucaccuacaagcucgacggcguggugugcaccgagaucgaccccaagcuggacaacuacuacaagaaggacaacagcuacuucaccgagcagccgaucgaccugguccccaaccagcccuaccccaacgccuccuucgacaacuucaaguucgugugcgacaacaucaaguucgccgacgaccucaaccagcugacgggguacaagaagccggccagccgcgagcugaaggugaccuucuuccccgaccucaacggcgacgucguggcgaucgacuacaagcacuacacccccuccuucaagaagggcgccaagcugcugcacaagcccaucguguggcacgucaacaacgccaccaacaaggccacguacaagccgaacaccuggugcauccggugccucuggagcaccaagcccguggagaccuccaacagcuucgacgugcugaaguccgaggacgcgcaggggauggacaaccuggccugcgaggaccucaagcccgucagcgaggaggugguggagaaccccacgauccagaaggacguccuggagugcaacgugaagaccaccgagguggucggcgacaucauccugaagccggccaacaacucccucaagaucaccgaggagguggggcacacggaccugauggccgccuacguggacaacagcucccugaccaucaagaagcccaacgagcucagccgcguccugggccugaagacccucgcgacccacgggcuggccgccgugaacuccgugcccugggacacgaucgccaacuacgccaagccguuccugaacaaggucgugagcaccaccaccaacaucgugacgcgcugccucaaccgggucugcaccaacuacaugcccuacuucuucacccugcugcuccagcugugcaccuucacccgcuccacgaacagccggaucaaggcguccaugcccaccaccaucgccaagaacaccgugaagagcgugggcaaguucugccuggaggccagcuucaacuaccucaagucccccaacuucagcaagcugaucaacaucaucaucugguuccugcuccuguccgucugccugggcagccucaucuacuccacggccgcccugggggugcugaugagcaaccucggcaugccguccuacugcaccggguaccgcgagggcuaccugaacagcaccaacgugaccaucgcgacguacugcaccggcuccauccccugcagcgucugccuguccgggcucgacagccuggacaccuaccccucccuggagaccauccagaucacgaucagcuccuucaagugggaccucaccgccuucggccugguggccgagugguuccuggccuacauccucuucacccgguucuucuacgugcuggggcuggccgcgaucaugcagcucuucuucagcuacuucgccguccacuucaucuccaacagcuggcugauguggcugaucaucaaccuggugcagauggcccccaucuccgccauggugcgcauguacaucuucuucgcgagcuucuacuacgucuggaagagcuacgugcacguggucgacggcugcaacuccagcaccugcaugaugugcuacaagcggaaccgcgccacgcggguggagugcaccaccaucgucaacggggugcgccgguccuucuacguguacgccaacggcggcaagggguucugcaagcuccacaacuggaacugcgucaacugcgacaccuucugcgccggcagcacguucaucuccgacgagguggcccgcgaccugagccugcaguucaagcggccgaucaaccccaccgaccaguccagcuacaucguggacuccgucaccgugaagaacgggagcauccaccucuacuucgacaaggcgggccagaagaccuacgagcgccacucccugagccacuucgugaaccuggacaaccuccgggccaacaacacgaaggggucccugcccaucaacgucaucguguucgacggcaagagcaagugcgaggaguccagcgccaaguccgccagcguguacuacucccagcugaugugccagcccauccuccugcuggaccaggcccucgucagcgacgugggcgacagcgcggagguggccgucaagauguucgacgccuacgugaacaccuucuccagcaccuucaacgugccgauggagaagcugaagacccuggucgccacggccgaggcggagcucgccaagaacgugucccuggacaacgugcugagcaccuucaucuccgccgcccgccagggguucgucgacagcgacguggagaccaaggacguggucgagugccucaagcugucccaccagagcgacaucgaggugaccggcgacuccugcaacaacuacaugcugacguacaacaagguggagaacaugaccccccgggaccucggggcgugcaucgacugcagcgcccgccacaucaacgcccaggucgccaagucccacaacaucgcccugaucuggaacgugaaggacuucaugagccuguccgagcagcuccggaagcagauccgcagcgcggccaagaagaacaaccugcccuucaagcugaccugcgccaccacgcgccagguggucaacguggugaccaccaagaucgcccucaagggcggguga

SEQ ID NO: 18275 - RNA, 5841 nt, Artificial Sequence
  SARS-CoV-2__MT263415.1__non-structural protein 3 (NSP3) CDS gc
auggcccccaccaaggugaccuucggcgacgacacggucaucgaggugcagggguacaagagcgugaacaucaccuucgagcuggacgagcgcaucgacaagguccucaacgagaagugcuccgccuacaccguggagcugggcaccgaggugaacgaguucgcgugcgucguggccgacgccgugaucaagacgcugcagccggucagcgagcuccugaccccccuggggaucgaccucgacgagugguccauggccaccuacuaccuguucgacgagagcggcgaguucaagcuggccucccacauguacugcagcuucuacccccccgacgaggacgaggaggagggggacugcgaggaggaggaguucgagccguccacccaguacgaguacggcacggaggacgacuaccagggcaagccccucgaguucggggcgaccagcgccgcccugcagcccgaggaggagcaggaggaggacuggcuggacgacgacucccagcagaccgugggccagcaggacgggagcgaggacaaccagaccacgaccauccagaccaucguggagguccagccccagcucgagauggagcugaccccgguggugcagacgaucgaggucaacuccuucagcggcuaccugaagcucaccgacaacguguacaucaagaacgccgacaucguggaggaggcgaagaaggucaagcccaccgugguggucaacgccgccaacguguaccugaagcacgggggcggcguggccggggcccugaacaaggcgaccaacaacgccaugcaggucgaguccgacgacuacaucgccacgaacggcccccucaagguggggggcagcugcguccuguccggccacaaccuggccaagcacugccuccacgugguggggcccaacgucaacaagggcgaggacauccagcugcugaagagcgccuacgagaacuucaaccagcacgaggugcuccuggcgccgcugcucuccgccgggaucuucggcgccgaccccauccacagccugcgggugugcgucgacaccgugcgcaccaacguguaccuggccgucuucgacaagaaccucuacgacaagcugguguccagcuuccuggagaugaagagcgagaagcagguggagcagaagaucgccgagauccccaaggaggaggucaagcccuucaucaccgaguccaagccgagcguggagcagcggaagcaggacgacaagaagaucaaggcgugcguggaggaggucacgaccacccucgaggagaccaaguuccugacggagaaccugcuccuguacaucgacaucaacgggaaccugcaccccgacuccgccacccucgugagcgacaucgacaucaccuuccugaagaaggacgcccccuacaucgugggcgacgucgugcaggagggcgugcugaccgccgucgugauccccacgaagaaggccgggggcaccaccgagaugcucgcgaaggcccugcgcaaggugccgaccgacaacuacaucacgaccuaccccgggcagggccugaacggguacaccgucgaggaggccaagaccgugcucaagaagugcaaguccgccuucuacauccugcccagcaucaucuccaacgagaagcaggagauccugggcaccgugagcuggaaccuccgggagaugcuggcgcacgccgaggagacgcgcaagcugaugcccgucugcguggagaccaaggccaucguguccaccauccagcggaaguacaagggcaucaagauccaggagggggucguggacuacggcgcccgcuucuacuucuacaccagcaagacgaccguggccucccugaucaacacccucaacgaccugaacgagacccuggucacgaugccgcucggguacgugacccacggccugaaccuggaggaggcggcccgguacaugcgcagccucaaggugcccgucaccguguccgugagcucccccgacgccgucaccgccuacaacggguaccugacgagcuccagcaagacccccgaggagcacuucaucgagaccaucucccuggccggcagcuacaaggacuggagcuacuccggccagagcacccagcucgggaucgaguuccugaagcggggcgacaaguccguguacuacacgagcaacccgaccaccuuccaccuggacggggaggugaucaccuucgacaaccucaagacgcugcugucccuccgcgagguccggaccaucaagguguucaccaccguggacaacaucaaccugcacacgcaggucguggacaugagcaugaccuacggccagcaguucggccccaccuaccuggacggggcggacgugaccaagaucaagccccacaacucccacgagggcaagacguucuacguccucccgaacgacgacacccugcgcguggaggccuucgaguacuaccacaccaccgaccccagcuuccuggggcgguacauguccgcccucaaccacacgaagaaguggaaguacccccaggugaacggccugaccagcaucaagugggccgacaacaacugcuaccuggccaccgcgcuccugacccugcagcagaucgagcucaaguucaaccccccggcccugcaggacgccuacuaccgcgcccgggcgggggaggccgccaacuucugcgcccugauccucgccuacugcaacaagacggucggcgagcugggcgacgugcgcgagaccauguccuaccuguuccagcacgcgaaccucgacagcugcaagcggguccugaacguggugugcaagaccugcgggcagcagcagaccacccugaagggcgucgaggccgugauguacauggggacgcucuccuacgagcaguucaagaagggcgugcagauccccugcaccugcgggaagcaggccaccaaguaccugguccagcaggagagccccuucgugaugauguccgcccccccggcccaguacgagcugaagcacggcaccuucacgugcgcgagcgaguacaccggcaacuaccagugcgggcacuacaagcacaucaccuccaaggagacccucuacugcaucgacggcgcccugcugacgaagagcagcgaguacaaggggcccaucaccgacguguucuacaaggagaacuccuacaccaccacgaucaagcccgucaccuacaagcucgacggcguggugugcaccgagaucgaccccaagcuggacaacuacuacaagaaggacaacagcuacuucaccgagcagccgaucgaccugguccccaaccagcccuaccccaacgccuccuucgacaacuucaaguucgugugcgacaacaucaaguucgccgacgaccucaaccagcugacgggguacaagaagccggccagccgcgagcugaaggugaccuucuuccccgaccucaacggcgacgucguggcgaucgacuacaagcacuacacccccuccuucaagaagggcgccaagcugcugcacaagcccaucguguggcacgucaacaacgccaccaacaaggccacguacaagccgaacaccuggugcauccggugccucuggagcaccaagcccguggagaccuccaacagcuucgacgugcugaaguccgaggacgcgcaggggauggacaaccuggccugcgaggaccucaagcccgucagcgaggaggugguggagaaccccacgauccagaaggacguccuggagugcaacgugaagaccaccgagguggucggcgacaucauccugaagccggccaacaacucccucaagaucaccgaggagguggggcacacggaccugauggccgccuacguggacaacagcucccugaccaucaagaagcccaacgagcucagccgcguccugggccugaagacccucgcgacccacgggcuggccgccgugaacuccgugcccugggacacgaucgccaacuacgccaagccguuccugaacaaggucgugagcaccaccaccaacaucgugacgcgcugccucaaccgggucugcaccaacuacaugcccuacuucuucacccugcugcuccagcugugcaccuucacccgcuccacgaacagccggaucaaggcguccaugcccaccaccaucgccaagaacaccgugaagagcgugggcaaguucugccuggaggccagcuucaacuaccucaagucccccaacuucagcaagcugaucaacaucaucaucugguuccugcuccuguccgucugccugggcagccucaucuacuccacggccgcccugggggugcugaugagcaaccucggcaugccguccuacugcaccggguaccgcgagggcuaccugaacagcaccaacgugaccaucgcgacguacugcaccggcuccauccccugcagcgucugccuguccgggcucgacagccuggacaccuaccccucccuggagaccauccagaucacgaucagcuccuucaagugggaccucaccgccuucggccugguggccgagugguuccuggccuacauccucuucacccgguucuucuacgugcuggggcuggccgcgaucaugcagcucuucuucagcuacuucgccguccacuucaucuccaacagcuggcugauguggcugaucaucaaccuggugcagauggcccccaucuccgccauggugcgcauguacaucuucuucgcgagcuucuacuacgucuggaagagcuacgugcacguggucgacggcugcaacuccagcaccugcaugaugugcuacaagcggaaccgcgccacgcggguggagugcaccaccaucgucaacggggugcgccgguccuucuacguguacgccaacggcggcaagggguucugcaagcuccacaacuggaacugcgucaacugcgacaccuucugcgccggcagcacguucaucuccgacgagguggcccgcgaccugagccugcaguucaagcggccgaucaaccccaccgaccaguccagcuacaucguggacuccgucaccgugaagaacgggagcauccaccucuacuucgacaaggcgggccagaagaccuacgagcgccacucccugagccacuucgugaaccuggacaaccuccgggccaacaacacgaaggggucccugcccaucaacgucaucguguucgacggcaagagcaagugcgaggaguccagcgccaaguccgccagcguguacuacucccagcugaugugccagcccauccuccugcuggaccaggcccucgucagcgacgugggcgacagcgcggagguggccgucaagauguucgacgccuacgugaacaccuucuccagcaccuucaacgugccgauggagaagcugaagacccuggucgccacggccgaggcggagcucgccaagaacgugucccuggacaacgugcugagcaccuucaucuccgccgcccgccagggguucgucgacagcgacguggagaccaaggacguggucgagugccucaagcugucccaccagagcgacaucgaggugaccggcgacuccugcaacaacuacaugcugacguacaacaagguggagaacaugaccccccgggaccucggggcgugcaucgacugcagcgcccgccacaucaacgcccaggucgccaagucccacaacaucgcccugaucuggaacgugaaggacuucaugagccuguccgagcagcuccggaagcagauccgcagcgcggccaagaagaacaaccugcccuucaagcugaccugcgccaccacgcgccagguggucaacguggugaccaccaagaucgcccucaagggcggguga

SEQ ID NO: 18276 - RNA, 5841 nt, Artificial Sequence
  SARS-CoV-2__MT263422.1__non-structural protein 3 (NSP3) CDS gc
auggcccccaccaaggugaccuucggcgacgacacggucaucgaggugcagggguacaagagcgugaacaucaccuucgagcuggacgagcgcaucgacaagguccucaacgagaagugcuccgccuacaccguggagcugggcaccgaggugaacgaguucgcgugcgucguggccgacgccgugaucaagacgcugcagccggucagcgagcuccugaccccccuggggaucgaccucgacgagugguccauggccaccuacuaccuguucgacgagagcggcgaguucaagcuggccucccacauguacugcagcuucuacccccccgacgaggacgaggaggagggggacugcgaggaggaggaguucgagccguccacccaguacgaguacggcacggaggacgacuaccagggcaagccccucgaguucggggcgaccagcgccgcccugcagcccgaggaggagcaggaggaggacuggcuggacgacgacucccagcagaccgugggccagcaggacgggagcgaggacaaccagaccacgaccauccagaccaucguggagguccagccccagcucgagauggagcugaccccgguggugcagacgaucgaggucaacuccuucagcggcuaccugaagcucaccgacaacguguacaucaagaacgccgacaucguggaggaggcgaagaaggucaagcccaccgugguggucaacgccgccaacguguaccugaagcacgggggcggcguggccggggcccugaacaaggcgaccaacaacgccaugcaggucgaguccgacgacuacaucgccacgaacggcccccucaagguggggggcagcugcguccuguccggccacaaccuggccaagcacugccuccacgugguggggcccaacgucaacaagggcgaggacauccagcugcugaagagcgccuacgagaacuucaaccagcacgaggugcuccuggcgccgcugcucuccgccgggaucuucggcgccgaccccauccacagccugcgggugugcgucgacaccgugcgcaccaacguguaccuggccgucuucgacaagaaccucuacgacaagcugguguccagcuuccuggagaugaagagcgagaagcagguggagcagaagaucgccgagauccccaaggaggaggucaagcccuucaucaccgaguccaagccgagcguggagcagcggaagcaggacgacaagaagaucaaggcgugcguggaggaggucacgaccacccucgaggagaccaaguuccugacggagaaccugcuccuguacaucgacaucaacgggaaccugcaccccgacuccgccacccucgugagcgacaucgacaucaccuuccugaagaaggacgcccccuacaucgugggcgacgucgugcaggagggcgugcugaccgccgucgugauccccacgaagaaggccgggggcaccaccgagaugcucgcgaaggcccugcgcaaggugccgaccgacaacuacaucacgaccuaccccgggcagggccugaacggguacaccgucgaggaggccaagaccgugcucaagaagugcaaguccgccuucuacauccugcccagcaucaucuccaacgagaagcaggagauccugggcaccgugagcuggaaccuccgggagaugcuggcgcacgccgaggagacgcgcaagcugaugcccgucugcguggagaccaaggccaucguguccaccauccagcggaaguacaagggcaucaagauccaggagggggucguggacuacggcgcccgcuucuacuucuacaccagcaagacgaccguggccucccugaucaacacccucaacgaccugaacgagacccuggucacgaugccgcucggguacgugacccacggccugaaccuggaggaggcggcccgguacaugcgcagccucaaggugcccgccaccgucuccgugagcucccccgacgccgugaccgccuacaacggguaccugacgagcuccagcaagacccccgaggagcacuucaucgagaccaucucccuggcgggcagcuacaaggacuggagcuacuccggccagagcacccagcucgggaucgaguuccugaagcggggcgacaaguccgucuacuacacgagcaacccgaccaccuuccaccuggacggggaggugaucaccuucgacaaccucaagacgcugcugucccuccgcgaggugcggaccaucaaggucuucaccaccguggacaacaucaacuuccacacgcagguggucgacaugagcaugaccuacggccagcaguucggccccaccuaccuggacggggccgacgugaccaagaucaagccccacaacucccacgagggcaagacguucuacgugcugccgaacgacgacacccuccgcgucgaggccuucgaguacuaccacaccaccgaccccagcuuccuggggcgguacauguccgcccugaaccacacgaagaaguggaaguacccccaggugaacggccucaccagcaucaagugggccgacaacaacugcuaccuggcgaccgcccugcucacccugcagcagaucgagcugaaguucaaccccccggcccuccaggacgccuacuaccgcgcgcgggccggggaggccgccaacuucugcgcccugauccuggcguacugcaacaagacggugggcgagcucggcgacguccgcgagaccauguccuaccuguuccagcacgccaaccuggacagcugcaagcgggugcucaacgucgugugcaagaccugcgggcagcagcagaccacccugaagggcguggaggccgucauguacauggggacgcuguccuacgagcaguucaagaagggcgugcagauccccugcaccugcgggaagcaggccaccaaguaccucgugcagcaggagagccccuucgucaugauguccgcccccccggcgcaguacgagcugaagcacggcaccuucacgugcgccagcgaguacaccggcaacuaccagugcgggcacuacaagcacaucaccuccaaggagacccuguacugcaucgacggcgcccuccugacgaagagcagcgaguacaaggggcccaucaccgacguguucuacaaggagaacuccuacaccaccacgaucaagcccgugaccuacaagcuggacggcgucgugugcaccgagaucgaccccaagcucgacaacuacuacaagaaggacaacagcuacuucaccgagcagccgaucgaccuggugcccaaccagcccuaccccaacgccuccuucgacaacuucaaguucgucugcgacaacaucaaguucgccgacgaccugaaccagcucacgggguacaagaagccggcgagccgcgagcugaaggugaccuucuuccccgaccugaacggcgacguggucgccaucgacuacaagcacuacacccccuccuucaagaagggcgccaagcuccugcacaagcccaucguguggcacgugaacaacgccaccaacaaggcgacguacaagccgaacaccuggugcauccggugccuguggagcaccaagcccgucgagaccuccaacagcuucgacgugcucaaguccgaggacgcccaggggauggacaaccuggccugcgaggaccugaagcccgugagcgaggaggucguggagaaccccacgauccagaaggacgugcucgagugcaacgucaagaccaccgagguggugggcgacaucauccugaagccggccaacaacucccugaagaucaccgaggaggucgggcacacggaccucauggccgcguacguggacaacagcucccugaccaucaagaagcccaacgagcugagccgcgugcucggccugaagacccuggccacccacgggcucgccgccgucaacuccgugcccugggacacgaucgccaacuacgcgaagccguuccugaacaagguggucagcaccaccaccaacaucgugacgcgcugccugaaccgggugugcaccaacuacaugcccuacuucuucacccuccugcugcagcucugcaccuucacccgcuccacgaacagccggaucaaggccuccaugcccaccaccaucgccaagaacaccgucaagagcgugggcaaguucugccuggaggccagcuucaacuaccugaagucccccaacuucagcaagcucaucaacaucaucaucugguuccugcugcucuccgugugccugggcagccugaucuacuccacggccgcgcucgggguccugaugagcaaccugggcaugccguccuacugcaccggguaccgcgagggcuaccucaacagcaccaacgugaccaucgccacguacugcaccggcuccauccccugcagcgugugccuguccgggcuggacagccucgacaccuaccccucccuggagaccauccagaucacgaucagcuccuucaagugggaccugaccgccuucggccucgucgccgagugguuccuggccuacauccuguucacccgguucuucuacgugcucgggcuggcggccaucaugcagcuguucuucagcuacuucgccgugcacuucaucuccaacagcuggcucauguggcugaucaucaaccugguccagauggcccccaucuccgcgauggugcgcauguacaucuucuucgccagcuucuacuacguguggaagagcuacguccacgugguggacggcugcaacuccagcaccugcaugaugugcuacaagcggaaccgcgccacgcgggucgagugcaccaccaucgugaacgggguccgccgguccuucuacguguacgccaacggcggcaagggguucugcaagcugcacaacuggaacugcgugaacugcgacaccuucugcgccggcagcacguucaucuccgacgaggucgcgcgcgaccucagccugcaguucaagcggccgaucaaccccaccgaccaguccagcuacaucguggacuccgugaccgucaagaacgggagcauccaccuguacuucgacaaggccggccagaagaccuacgagcgccacucccucagccacuucgugaaccuggacaaccugcgggccaacaacacgaaggggucccuccccaucaacgugaucgucuucgacggcaagagcaagugcgaggaguccagcgccaaguccgccagcguguacuacucccagcugaugugccagcccauccugcuccuggaccaggcgcuggugagcgacgucggcgacagcgccgagguggccgugaagauguucgacgccuacgucaacaccuucuccagcaccuucaacgugccgauggagaagcucaagacccugguggccacggcggaggccgagcuggccaagaacgucucccucgacaacgugcugagcaccuucaucuccgccgcgcgccagggguucguggacagcgacgucgagaccaaggacgugguggagugccugaagcucucccaccagagcgacaucgaggucaccggcgacuccugcaacaacuacaugcugacguacaacaagguggagaacaugaccccccgggaccugggggccugcaucgacugcagcgcccgccacaucaacgcccagguggccaagucccacaacaucgcgcucaucuggaacgucaaggacuucaugagccuguccgagcagcugcggaagcagauccgcagcgccgccaagaagaacaaccuccccuucaagcugaccugcgccaccacgcgccagguggugaacgucgugaccaccaagaucgcccugaagggcggguga

SEQ ID NO: 18277 - RNA, 5841 nt, Artificial Sequence
  SARS-CoV-2__MT263457.1__non-structural protein 3 (NSP3) CDS gc
auggcccccaccaaggugaccuucggcgacgacacggucaucgaggugcagggguacaagagcgugaacaucaccuucgagcuggacgagcgcaucgacaagguccucaacgagaagugcuccgccuacaccguggagcugggcaccgaggugaacgaguucgcgugcgucguggccgacgccgugaucaagacgcugcagccggucagcgagcuccugaccccccuggggaucgaccucgacgagugguccauggccaccuacuaccuguucgacgagagcggcgaguucaagcuggccucccacauguacugcagcuucuacccccccgacgaggacgaggaggagggggacugcgaggaggaggaguucgagccguccacccaguacgaguacggcacggaggacgacuaccagggcaagccccucgaguucggggcgaccagcgccgcccugcagcccgaggaggagcaggaggaggacuggcuggacgacgacucccagcagaccgugggccagcaggacgggagcgaggacaaccagaccacgaccauccagaccaucguggagguccagccccagcucgagauggagcugaccccgguggugcagacgaucgaggucaacuccuucagcggcuaccugaagcucaccgacaacguguacaucaagaacgccgacaucguggaggaggcgaagaaggucaagcccaccgugguggucaacgccgccaacguguaccugaagcacgggggcggcguggccggggcccugaacaaggcgaccaacaacgccaugcaggucgaguccgacgacuacaucgccacgaacggcccccucaagguggggggcagcugcguccuguccggccacaaccuggccaagcacugccuccacgugguggggcccaacgucaacaagggcgaggacauccagcugcugaagagcgccuacgagaacuucaaccagcacgaggugcuccuggcgccgcugcucuccgccgggaucuucggcgccgaccccauccacagccugcgggugugcgucgacaccgugcgcaccaacguguaccuggccgucuucgacaagaaccucuacgacaagcugguguccagcuuccuggagaugaagagcgagaagcagguggagcagaagaucgccgagauccccaaggaggaggucaagcccuucaucaccgaguccaagccgagcguggagcagcggaagcaggacgacaagaagaucaaggcgugcguggaggaggucacgaccacccucgaggagaccaaguuccugacggagaaccugcuccuguacaucgacaucaacgggaaccugcaccccgacuccgccacccucgugagcgacaucgacaucaccuuccugaagaaggacgcccccuacaucgugggcgacgucgugcaggagggcgugcugaccgccgucgugauccccacgaagaaggccgggggcaccaccgagaugcucgcgaaggcccugcgcaaggugccgaccgacaacuacaucacgaccuaccccgggcagggccugaacggguacaccgucgaggaggccaagaccgugcucaagaagugcaaguccgccuucuacauccugcccagcaucaucuccaacgagaagcaggagauccugggcaccgugagcuggaaccuccgggagaugcuggcgcacgccgaggagacgcgcaagcugaugcccgucugcguggagaccaaggccaucguguccaccauccagcggaaguacaagggcaucaagauccaggagggggucguggacuacggcgcccgcuucuacuucuacaccagcaagacgaccguggccucccugaucaacacccucaacgaccugaacgagacccuggucacgaugccgcucggguacgugacccacggccugaaccuggaggaggcggcccgguacaugcgcagccucaaggugcccgccaccgucuccgugagcucccccgacgccgugaccgccuacaacggguaccugacgagcuccagcaagacccccgaggagcacuucaucgagaccaucucccuggcgggcagcuacaaggacuggagcuacuccggccagagcacccagcucgggaucgaguuccugaagcggggcgacaaguccgucuacuacacgagcaacccgaccaccuuccaccuggacggggaggugaucaccuucgacaaccucaagacgcugcugucccuccgcgaggugcggaccaucaaggucuucaccaccguggacaacaucaaccugcacacgcagguggucgacaugagcaugaccuacggccagcaguucggccccaccuaccuggacggggccgacgugaccaagaucaagccccacaacucccacgagggcaagacguucuacgugcucccgaacgacgacacccugcgcgucgaggccuucgaguacuaccacaccaccgaccccagcuuccuggggcgguacauguccgcccucaaccacacgaagaaguggaaguacccccaggugaacggccugaccagcaucaagugggccgacaacaacugcuaccuggcgaccgcccuccugacccugcagcagaucgagcucaaguucaaccccccggcccugcaggacgccuacuaccgcgcgcgggccggggaggccgccaacuucugcgcccugauccucgcguacugcaacaagacggugggcgagcugggcgacguccgcgagaccauguccuaccuguuccagcacgccaaccucgacagcugcaagcgggugcugaacgucgugugcaagaccugcgggcagcagcagaccacccugaagggcguggaggccgucauguacauggggacgcucuccuacgagcaguucaagaagggcgugcagauccccugcaccugcgggaagcaggccaccaaguaccuggugcagcaggagagccccuucgucaugauguccgcccccccggcgcaguacgagcugaagcacggcaccuucacgugcgccagcgaguacaccggcaacuaccagugcgggcacuacaagcacaucaccuccaaggagacccucuacugcaucgacggcgcccugcugacgaagagcagcgaguacaaggggcccaucaccgacguguucuacaaggagaacuccuacaccaccacgaucaagcccgugaccuacaagcucgacggcgucgugugcaccgagaucgaccccaagcuggacaacuacuacaagaaggacaacagcuacuucaccgagcagccgaucgaccuggugcccaaccagcccuaccccaacgccuccuucgacaacuucaaguucgucugcgacaacaucaaguucgccgacgaccucaaccagcugacgggguacaagaagccggcgagccgcgagcugaaggugaccuucuuccccgaccucaacggcgacguggucgccaucgacuacaagcacuacacccccuccuucaagaagggcgccaagcugcugcacaagcccaucguguggcacgugaacaacgccaccaacaaggcgacguacaagccgaacaccuggugcauccggugccucuggagcaccaagcccgucgagaccuccaacagcuucgacgugcugaaguccgaggacgcccaggggauggacaaccuggccugcgaggaccucaagcccgugagcgaggaggucguggagaaccccacgauccagaaggacgugcuggagugcaacgucaagaccaccgagguggugggcgacaucauccugaagccggccaacaacucccucaagaucaccgaggaggucgggcacacggaccugauggccgcguacguggacaacagcucccugaccaucaagaagcccaacgagcucagccgcgugcugggccugaagacccucgccacccacgggcuggccgccgucaacuccgugcccugggacacgaucgccaacuacgcgaagccguuccugaacaagguggucagcaccaccaccaacaucgugacgcgcugccucaaccgggugugcaccaacuacaugcccuacuucuucacccugcugcuccagcugugcaccuucacccgcuccacgaacagccggaucaaggccuccaugcccaccaccaucgccaagaacaccgucaagagcgugggcaaguucugccuggaggccagcuucaacuaccucaagucccccaacuucagcaagcugaucaacaucaucaucugguuccugcuccuguccgugugccugggcagccucaucuacuccacggccgcgcuggggguccugaugagcaaccucggcaugccguccuacugcaccggguaccgcgagggcuaccugaacagcaccaacgugaccaucgccacguacugcaccggcuccauccccugcagcgugugccuguccgggcucgacagccuggacaccuaccccucccuggagaccauccagaucacgaucagcuccuucaagugggaccucaccgccuucggccuggucgccgagugguuccuggccuacauccucuucacccgguucuucuacgugcuggggcuggcggccaucaugcagcucuucuucagcuacuucgccgugcacuucaucuccaacagcuggcugauguggcugaucaucaaccugguccagauggcccccaucuccgcgauggugcgcauguacaucuucuucgccagcuucuacuacguguggaagagcuacguccacgugguggacggcugcaacuccagcaccugcaugaugugcuacaagcggaaccgcgucacgcggguggagugcaccaccaucgucaacggggugcgccgguccuucuacguguacgccaacggcggcaagggguucugcaagcuccacaacuggaacugcgucaacugcgacaccuucugcgccggcagcacguucaucuccgacgagguggcccgcgaccugagccugcaguucaagcggccgaucaaccccaccgaccaguccagcuacaucguggacuccgucaccgugaagaacgggagcauccaccucuacuucgacaaggcgggccagaagaccuacgagcgccacucccugagccacuucgugaaccuggacaaccuccgggccaacaacacgaaggggucccugcccaucaacgucaucguguucgacggcaagagcaagugcgaggaguccagcgccaaguccgccagcguguacuacucccagcugaugugccagcccauccuccugcuggaccaggcccucgucagcgacgugggcgacagcgcggagguggccgucaagauguucgacgccuacgugaacaccuucuccagcaccuucaacgugccgauggagaagcugaagacccuggucgccacggccgaggcggagcucgccaagaacgugucccuggacaacgugcugagcaccuucaucuccgccgcccgccagggguucgucgacagcgacguggagaccaaggacguggucgagugccucaagcugucccaccagagcgacaucgaggugaccggcgacuccugcaacaacuacaugcugacguacaacaagguggagaacaugaccccccgggaccucggggcgugcaucgacugcagcgcccgccacaucaacgcccaggucgccaagucccacaacaucgcccugaucuggaacgugaaggacuucaugagccuguccgagcagcuccggaagcagauccgcagcgcggccaagaagaacaaccugcccuucaagcugaccugcgccaccacgcgccagguggucaacguggugaccaccaagaucgcccucaagggcggguga

SEQ ID NO: 18278 - RNA, 5841 nt, Artificial Sequence
  SARS-CoV-2__MT163720.1__non-structural protein 3 (NSP3) CDS gc
auggcccccaccaaggugaccuucggcgacgacacggucaucgaggugcagggguacaagagcgugaacaucaccuucgagcuggacgagcgcaucgacaagguccucaacgagaagugcuccgccuacaccguggagcugggcaccgaggugaacgaguucgcgugcgucguggccgacgccgugaucaagacgcugcagccggucagcgagcuccugaccccccuggggaucgaccucgacgagugguccauggccaccuacuaccuguucgacgagagcggcgaguucaagcuggccucccacauguacugcagcuucuacccccccgacgaggacgaggaggagggggacugcgaggaggaggaguucgagccguccacccaguacgaguacggcacggaggacgacuaccagggcaagccccucgaguucggggcgaccagcgccgcccugcagcccgaggaggagcaggaggaggacuggcuggacgacgacucccagcagaccgugggccagcaggacgggagcgaggacaaccagaccacgaccauccagaccaucguggagguccagccccagcucgagauggagcugaccccgguggugcagacgaucgaggucaacuccuucagcggcuaccugaagcucaccgacaacguguacaucaagaacgccgacaucguggacgaggcgaagaaggucaagcccaccgugguggucaacgccgccaacguguaccugaagcacgggggcggcguggccggggcccugaacaaggcgaccaacaacgccaugcaggucgaguccgacgacuacaucgccacgaacggcccccucaagguggggggcagcugcguccuguccggccacaaccuggccaagcacugccuccacgugguggggcccaacgucaacaagggcgaggacauccagcugcugaagagcgccuacgagaacuucaaccagcacgaggugcuccuggcgccgcugcucuccgccgggaucuucggcgccgaccccauccacagccugcgggugugcgucgacaccgugcgcaccaacguguaccuggccgucuucgacaagaaccucuacgacaagcugguguccagcuuccuggagaugaagagcgagaagcagguggagcagaagaucgccgagauccccaaggaggaggucaagcccuucaucaccgaguccaagccgagcguggagcagcggaagcaggacgacaagaagaucaaggcgugcguggaggaggucacgaccacccucgaggagaccaaguuccugacggagaaccugcuccuguacaucgacaucaacgggaaccugcaccccgacuccgccacccucgugagcgacaucgacaucaccuuccugaagaaggacgcccccuacaucgugggcgacgucgugcaggagggcgugcugaccgccgucgugauccccacgaagaaggccgggggcaccaccgagaugcucgcgaaggcccugcgcaaggugccgaccgacaacuacaucacgaccuaccccgggcagggccugaacggguacaccgucgaggaggccaagaccgugcucaagaagugcaaguccgccuucuacauccugcccagcaucaucuccaacgagaagcaggagauccugggcaccgugagcuggaaccuccgggagaugcuggcgcacgccgaggagacgcgcaagcugaugcccgucugcguggagaccaaggccaucguguccaccauccagcggaaguacaagggcaucaagauccaggagggggucguggacuacggcgcccgcuucuacuucuacaccagcaagacgaccguggccucccugaucaacacccucaacgaccugaacgagacccuggucacgaugccgcucggguacgugacccacggccugaaccuggaggaggcggcccgguacaugcgcagccucaaggugcccgccaccgucuccgugagcucccccgacgccgugaccgccuacaacggguaccugacgagcuccagcaagacccccgaggagcacuucaucgagaccaucucccuggcgggcagcuacaaggacuggagcuacuccggccagagcacccagcucgggaucgaguuccugaagcggggcgacaaguccgucuacuacacgagcaacccgaccaccuuccaccuggacggggaggugaucaccuucgacaaccucaagacgcugcugucccuccgcgaggugcggaccaucaaggucuucaccaccguggacaacaucaaccugcacacgcagguggucgacaugagcaugaccuacggccagcaguucggccccaccuaccuggacggggccgacgugaccaagaucaagccccacaacucccacgagggcaagacguucuacgugcucccgaacgacgacacccugcgcgucgaggccuucgaguacuaccacaccaccgaccccagcuuccuggggcgguacauguccgcccucaaccacacgaagaaguggaaguacccccaggugaacggccugaccagcaucaagugggccgacaacaacugcuaccuggcgaccgcccuccugacccugcagcagaucgagcucaaguucaaccccccggcccugcaggacgccuacuaccgcgcgcgggccggggaggccgccaacuucugcgcccugauccucgcguacugcaacaagacggugggcgagcugggcgacguccgcgagaccauguccuaccuguuccagcacgccaaccucgacagcugcaagcgggugcugaacgucgugugcaagaccugcgggcagcagcagaccacccugaagggcguggaggccgucauguacauggggacgcucuccuacgagcaguucaagaagggcgugcagauccccugcaccugcgggaagcaggccaccaaguaccuggugcagcaggagagccccuucgucaugauguccgcccccccggcgcaguacgagcugaagcacggcaccuucacgugcgccagcgaguacaccggcaacuaccagugcgggcacuacaagcacaucaucuccaaggagacccucuacugcaucgacggcgcccugcugaccaagagcagcgaguacaaggggcccaucacggacguguucuacaaggagaacuccuacaccaccaccaucaagcccgugacguacaagcucgacggcgucgugugcaccgagaucgaccccaagcuggacaacuacuacaagaaggacaacagcuacuucaccgagcagccgaucgaccuggugcccaaccagcccuaccccaacgccuccuucgacaacuucaaguucgucugcgacaacaucaaguucgccgacgaccucaaccagcugaccggguacaagaagccggcgagccgcgagcugaaggugacguucuuccccgaccucaacggcgacguggucgccaucgacuacaagcacuacacccccuccuucaagaagggcgccaagcugcugcacaagcccaucguguggcacgugaacaacgccaccaacaaggcgaccuacaagccgaacacguggugcauccggugccucuggagcaccaagcccgucgagaccuccaacagcuucgacgugcugaaguccgaggacgcccaggggauggacaaccuggccugcgaggaccucaagcccgugagcgaggaggucguggagaaccccaccauccagaaggacgugcuggagugcaacgucaagacgaccgagguggugggcgacaucauccugaagccggccaacaacucccucaagaucaccgaggaggucgggcacaccgaccugauggccgcguacguggacaacagcucccugacgaucaagaagcccaacgagcucagccgcgugcugggccugaagacccucgccacccacgggcuggccgccgucaacuccgugcccugggacaccaucgccaacuacgcgaagccguuccugaacaagguggucagcacgaccaccaacaucgugacccgcugccucaaccgggugugcacgaacuacaugcccuacuucuucacccugcugcuccagcugugcaccuucacccgcuccaccaacagccggaucaaggccuccaugcccacgaccaucgccaagaacaccgucaagagcgugggcaaguucugccuggaggccagcuucaacuaccucaagucccccaacuucagcaagcugaucaacaucaucaucugguuccugcuccuguccgugugccugggcagccucaucuacuccaccgccgcgcuggggguccugaugagcaaccucggcaugccguccuacugcacgggguaccgcgagggcuaccugaacagcaccaacgugaccaucgccaccuacugcacgggcuccauccccugcagcgugugccuguccgggcucgacagccuggacaccuaccccucccuggagaccauccagaucaccaucagcuccuucaagugggaccucacggccuucggccuggucgccgagugguuccuggccuacauccucuucacccgguucuucuacgugcuggggcuggcggccaucaugcagcucuucuucagcuacuucgccgugcacuucaucuccaacagcuggcugauguggcugaucaucaaccugguccagauggcccccaucuccgcgauggugcgcauguacaucuucuucgccagcuucuacuacguguggaagagcuacguccacgugguggacggcugcaacuccagcaccugcaugaugugcuacaagcggaaccgcgccacccgggucgagugcacgaccaucgugaacgggguccgccgguccuucuacguguacgccaacggcggcaagggguucugcaagcuccacaacuggaacugcgugaacugcgacaccuucugcgccggcagcaccuucaucuccgacgaggucgcgcgcgaccugagccugcaguucaagcggccgaucaaccccacggaccaguccagcuacaucguggacuccgugaccgucaagaacgggagcauccaccucuacuucgacaaggccggccagaagaccuacgagcgccacucccugagccacuucgugaaccuggacaaccuccgggccaacaacaccaaggggucccugcccaucaacgugaucgucuucgacggcaagagcaagugcgaggaguccagcgccaaguccgccagcguguacuacucccagcugaugugccagcccauccuccugcuggaccaggcgcucgugagcgacgucggcgacagcgccgagguggccgugaagauguucgacgccuacgucaacacguucuccagcaccuucaacgugccgauggagaagcugaagacccugguggccaccgcggaggccgagcucgccaagaacgucucccuggacaacgugcugagcacguucaucuccgccgcgcgccagggguucguggacagcgacgucgagaccaaggacgugguggagugccucaagcugucccaccagagcgacaucgaggucaccggcgacuccugcaacaacuacaugcugaccuacaacaagguggagaacaugacgccccgggaccucggggccugcaucgacugcagcgcccgccacaucaacgcccagguggccaagucccacaacaucgcgcugaucuggaacgucaaggacuucaugagccuguccgagcagcuccggaagcagauccgcagcgccgccaagaagaacaaccugcccuucaagcugaccugcgccaccacccgccagguggugaacgucgugacgaccaagaucgcccucaagggcggguga

SEQ ID NO: 18279 - RNA, 1527 nt, Artificial Sequence
  MERS-CoV/MERS-CoV-Jeddah-human-1__KF958702.1__non-structural protein 4 (NSP4) CDS gc
auggccagcaccugguucaacgcccugcgcgacuucacccucaagggcuacgugcuggcgacgaucaucgucuuccugugcgccgugcucauguaccugugccugcccaccuucuccauggugccggucgaguucuacgaggaccggauccucgacuucaaggugcuggacaacgggaucauccgcgacgugaaccccgacgacaagugcuucgccaacaagcaccggagcuucacccagugguaccacgagcacgucggcgggguguacgacaacuccaucacgugcccccugaccguggccgucaucgccggcguggcgggggcccgcauccccgacgugccgaccacccucgccugggucaacaaccagaucaucuucuucgugagccggguguucgccaacaccggcuccgucugcuacacgcccaucgacgagauccccuacaagagcuucuccgacagcggcugcauccugcccuccgagugcaccauguuccgcgacgcggaggggcggaugaccccguacugccacgaccccaccgugcugcccggcgccuucgccuacagccagaugcgcccccacgugcgguacgaccucuacgacgggaacauguucaucaaguucccggaggucguguucgaguccacgcugcgcaucacccggacccugagcacccaguacugccgcuucggcuccugcgaguacgcccaggagggggugugcaucacgaccaacggcagcugggccaucuucaacgaccaccaccucaaccggcccggcgucuacugcggguccgacuucaucgacaucgugcgccggcuggcggugagccuguuccagcccaucaccuacuuccagcucaccacgucccugguccugggcaucgggcucugcgccuuccugacccuccuguucuacuacaucaacaaggugaagcgcgccuucgccgacuacacccagugcgccgucaucgcggugguggccgccguccugaacagccugugcaucugcuucguggccuccaucccccucugcaucgugccguacaccgcccuguacuacuacgcgacguucuacuucaccaacgagcccgccuucaucaugcacgucagcugguacaucauguucggccccaucgugcccaucuggaugaccugcguguacaccgucgccaugugcuuccggcacuucuucugggugcuggccuacuucagcaagaagcacguggaggucuucacggacggcaagcucaacugcuccuuccaggacgccgcgagcaacaucuucgugaucaacaaggacaccuacgccgcccugcgcaacucccugaccaacgacgccuacagccgguuccucgggcuguucaacaaguacaaguacuucuccggcgcgauggagaccgccgccuaccgcgaggccgccgcgugccaccuggccaaggcccuccagacguacagcgagaccggguccgaccugcuguaccagccgcccaacugcagcaucaccuccggcgugcuccaguga

SEQ ID NO: 18280 - RNA, 1527 nt, Artificial Sequence
  MERS-CoV/Al-Hasa_4_2013__KF186564.1__non-structural protein 4 (NSP4) CDS gc
auggcccccaccugguucaacgugcugcgcgacuucacccucaagggcuacguccuggccacgaucaucguguuccugugcgcggugcucauguaccugugccugcccaccuucagcaugguccccguggaguucuacgaggaccggauccucgacuucaaggugcuggacaacgggaucauccgcgacgucaaccccgacgacaagugcuucgccaacaagcaccgguccuucacccagugguaccacgagcacgugggcgggguguacgacaacagcaucacgugcccccugaccgucgccgugaucgccggcguggccggggcgcgcaucccggacguccccaccacccucgccugggugaacaaccagaucaucuucuucgugucccgggucuucgccaacaccggcagcgugugcuacacgcccaucgacgagauccccuacaaguccuucagcgacuccggcugcauccugccgagcgagugcaccauguuccgcgacgccgaggggcggaugacccccuacugccacgaccccaccgugcugcccggcgcguucgccuacucccagaugcgcccgcacguccgguacgaccucuacgacgggaacauguucaucaaguuccccgaggugguguucgagagcacgcugcgcaucacccggacccuguccacccaguacugccgcuucggcagcugcgaguacgcccaggagggggucugcaucacgaccaacggcuccugggccaucuucaacgaccaccaccucaaccggcccggcguguacugcgggagcgacuucaucgacaucgugcgccggcuggccgucucccuguuccagcccaucaccuacuuccagcucaccacgagccuggugcugggcaucgggcucugcgcguuccugacccuccuguucuacuacaucaacaaggucaagcgcgccuucgccgacuacacccagugcgccgugaucgccguggucgcggccgugcugaacucccugugcaucugcuucguggccagcaucccgcucugcaucguccccuacaccgcccuguacuacuacgccacguucuacuucaccaacgagcccgcguucaucaugcacguguccugguacaucauguucggccccaucgugccgaucuggaugaccugcgucuacaccguggccaugugcuuccggcacuucuucugggugcuggccuacuucagcaagaagcacgucgagguguucacggacggcaagcucaacugcagcuuccaggacgccgccuccaacaucuucgugaucaacaaggacaccuacgcggcccugcgcaacagccugaccaacgacgccuacucccgguuccucgggcuguucaacaaguacaaguacuucagcggcgccauggagaccgcggccuaccgcgaggccgccgccugccaccuggcgaaggcccuccagacguacuccgagaccgggagcgaccugcuguaccagccgcccaacugcuccaucaccagcggcguccuccaguga

SEQ ID NO: 18281 - RNA, 1527 nt, Artificial Sequence
  MERS-CoV/Riyadh_14_2013__KJ156934.1__non-structural protein 4 (NSP4) CDS gc
auggcccccaccugguucaacgcccugcgcgacuucacccucaagggcuacgugcuggcgacgaucaucgucuuccugugcgccgugcucauguaccugugccugcccaccuucagcauggugcccgucgaguucuacgaggaccggauccucgacuucaaggugcuggacaacgggaucauccgcgacgugaaccccgacgacaagugcuucgccaacaagcaccgguccuucacccagugguaccacgagcacgucggcgggguguacgacaacagcaucacgugcccccugaccguggccgucaucgccggcguggcgggggcccgcaucccggacgugcccaccacccucgccugggucaacaaccagaucaucuucuucgugucccggguguucgccaacaccggcagcgucugcuacacgcccaucgacgagauccccuacaaguccuucagcgacuccggcugcauccugccgagcgagugcaccauguuccgcgacgcggaggggcggaugacccccuacugccacgaccccaccgugcugcccggcgccuucgccuacucccagaugcgcccgcacgugcgguacgaccucuacgacgggaacauguucaucaaguuccccgaggucguguucgagagcacgcugcgcaucacccggacccuguccacccaguacugccgcuucggcagcugcgaguacgcccaggagggggugugcaucacgaccaacggcuccugggccaucuucaacgaccaccaccucaaccggcccggcgucuacugcgggagcgacuucaucgacaucgugcgccggcuggcggugucccuguuccagcccaucaccuacuuccagcucaccacgagccugguccugggcaucgggcucugcgccuuccugacccuccuguucuacuacaucaacaaggugaagcgcgccuucgccgacuacacccagugcgccgucaucgcggugguggccgccguccugaacucccugugcaucugcuucguggccagcaucccgcucugcaucgugcccuacaccgcccuguacuacuacgcgacguucuacuucaccaacgagcccgccuucaucaugcacgucuccugguacaucauguucggccccaucgugccgaucuggaugaccugcguguacaccgucgccaugugcuuccggcacuucuucugggugcuggccuacuucagcaagaagcacguggaggucuucacggacggcaagcucaacugcagcuuccaggacgccgcguccaacaucuucgugaucaacaaggacaccuacgccgcccugcgcaacagccugaccaacgacgccuacucccgguuccucgggcuguucaacaaguacaaguacuucagcggcgcgauggagaccgccgccuaccgcgaggccgccgcgugccaccuggccaaggcccuccagacguacuccgagaccgggagcgaccugcuguaccagccgcccaacugcuccaucaccagcggcgugcuccaguga

SEQ ID NO: 18282 - RNA, 1527 nt, Artificial Sequence; identical to SEQ ID NO: 18281
  MERS-CoV/England 1__NC_038294.1__non-structural protein 4 (NSP4) CDS gc

SEQ ID NO: 18283 - RNA, 1506 nt, Artificial Sequence
  SARS-CoV/Tor2__NC_004718.3__non-structural protein 4 (NSP4) CDS gc
augaagaucgugagcacgugcuucaagcugaugcucaaggccacccugcugugcguccucgccgcgcuggugugcuacaucgugaugcccguccacacccuguccauccacgacggcuacaccaacgagaucaucggguacaaggccauccaggacggcgugacccgcgacaucaucagcaccgacgacugcuucgccaacaagcacgccggguucgacgccugguucucccagcggggcgggagcuacaagaacgacaaguccugcccgguggucgcggccaucaucacgcgcgagaucggcuucaucgugcccggccuccccgggaccgugcugcgggccaucaacggcgacuuccugcacuuccucccccgcgucuucagcgccguggggaacaucugcuacaccccguccaagcugaucgaguacagcgacuucgcgaccuccgccugcgugcuggccgccgagugcacgaucuucaaggacgccaugggcaagcccguccccuacugcuacgacaccaaccuccuggaggggagcaucuccuacagcgagcugcggcccgacacccgcuacgugcucauggacggcuccaucauccaguucccgaacaccuaccuggagggcagcgugcgggucgugacgaccuucgacgcggaguacugccgccacgggaccugcgagcgguccgaggugggcaucugccugagcaccuccgggcgcuggguccucaacaacgagcacuaccgggcccugagcggcguguucugcggcguggacgccaugaaccugaucgccaacaucuucacgccccucguccagcccgugggggcccuggacguguccgcgagcgucguggccggcgggaucaucgccauccuggugaccugcgccgccuacuacuucaugaaguuccgccgggucuucggcgaguacaaccacguggucgcggccaacgcccuccuguuccugaugagcuucaccauccucugccuggugcccgccuacuccuuccugccggggguguacagcgucuucuaccucuaccugaccuucuacuucacgaacgacguguccuuccuggcccaccuccagugguucgcgauguucagccccaucgugcccuucuggaucaccgccaucuacgucuucugcaucucccugaagcacugccacugguucuucaacaacuaccugcgcaagcgggugauguucaacggcgugaccuucagcaccuucgaggaggccgcccucugcacguuccugcugaacaaggagauguaccucaagcugcgcuccgagacccugcucccccugacccaguacaaccgguaccuggcgcucuacaacaaguacaaguacuucagcggcgcccuggacaccacguccuaccgcgaggccgccugcugccaccuggccaaggcgcugaacgacuucagcaacuccggggccgacguccucuaccagccgccccagaccagcaucaccuccgccgugcugcaguga

SEQ ID NO: 18284 - RNA, 1494 nt, Artificial Sequence
  HCoV/OC43__NC_006213.1__non-structural protein 4 (NSP4) CDS gc
auggccguguucagcuacuucgucuacgugugcuucgugcugucccucgucugcuucaucggccuguggugccugaugcccaccuacaccgugcacaagagcgacuuccagcuccccguguacgccuccuacaagguccuggacaacggggugauccgcgacgugagcgucgaggacgugugcuucgcgaacaaguucgagcaguucgaccagugguacgaguccacguucggccugagcuacuacuccaacagcauggccugccccaucguggucgccgugaucgaccaggacuucggguccaccguguucaacguccccaccaaggugcuccgguacggcuaccacgugcugcacuucaucacccacgcccugagcgccgacgggguccagugcuacacgccccacucccagaucagcuacuccaacuucuacgcgagcggcugcgugcucuccagcgccugcaccauguucaccauggccgacggcuccccgcagcccuacugcuacaccgaggggcugaugcagaacgccagccuguacuccagccucgugccccacguccgcuacaaccuggcgaacgccaagggcuucauccgguuccccgaggugcugcgcgaggggcucgugcggaucguccgcacgcggagcauguccuacugccgcgugggccugugcgaggaggccgacgaggggaucugcuucaacuucaacggcagcuggguccugaacaacgacuacuaccggucccucccgggcaccuucugcgggcgcgacguguucgaccugaucuaccagcuguucaagggccucgcccagcccguggacuuccuggcccugaccgcgagcuccaucgccggggccauccucgccgucaucguggugcuggucuucuacuaccugaucaagcucaagcgggccuucggcgacuacaccagcgugguguucgucaacgugaucguguggugcgucaacuucaugaugcuguucguguuccagguguaccccauccuguccugcgucuacgcgaucugcuacuucuacgccacgcucuacuuccccagcgagaucuccgugaucaugcaccuccaguggcuggugauguacggcaccaucaugccgcugugguucugccugcuguacaucgccgucguggugagcaaccacgccuucugggucuucuccuacugccgcaagcucgggaccagcgugcgguccgacggcaccuucgaggagauggcccugacgaccuucaugaucaccaaggacagcuacugcaagcugaagaacucccucagcgacguggcguucaaccgcuaccugucccuguacaacaaguaccgguacuacagcgggaagauggacaccgccgccuaccgcgaggccgccugcucccagcucgcgaaggccauggacacguucaccaacaacaacggcagcgacguccuguaccagccgcccaccgccagcguguccaccagcuuccugcaguga

SEQ ID NO: 18285 - RNA, 1494 nt, Artificial Sequence
  HCoV/HKU1__NC_006577.2__non-structural protein 4 (NSP4) CDS gc
auggugguccugagcaaccuccuguacauccuguucuucgugucccucaucugcuucauccugcugugggcccuccugcccaccuacagcguguacaaguccgacauccaccuccccgccuacgcgagcuucaaggucaucgacaacggcguggugcgcgacaucuccgucaacgaccugugcuucgccaacaaguucuuccaguucgaccagugguacgagagcaccuucggguccguguacuaccacaacagcauggacugccccaucguggucgccgugauggacgaggacaucggcuccacgauguucaacgugcccaccaagguccugcggcacggguuccacgugcugcacuuccucaccuacgccuucgccagcgacuccgugcagugcuacacgccccacauccagaucagcuacaacgacuucuacgcguccggcugcguccugagcucccugugcaccauguucaagcgcggggacggcaccccgcaccccuacugcuacagcgacggcgugaugaagaacgccucccucuacaccagccuggugccccacacccgguacucccuggccaacagcaacggguucauccgcuuccccgacgucaucagcgagggcaucgugcggaucgugcgcacgcgguccaugaccuacugccgcgucggggccugcgaguacgcggaggagggcaucugcuucaacuucaacagcuccugggugcucaacaacgacuacuaccggagcaugccggggaccuucugcggccgcgaccuguucgaccuguucuaccaguucuucuccagccucauccggcccaucgacuucuucucccugaccgccagcuccaucuucggcgccauccuggccaucguggucgugcucgucuucuacuaccugaucaagcugaagcgcgccuucggggacuacacgagcgugguggucaucaacgugguggucuggugcaucaacuuccucaugcuguucguguuccagguguaccccaucugcgcgugcgucuacgccugcuucuacuucuacgugacccuguacuuccccuccgagaucagcgugaucaugcaccuccaguggaucgucauguacggcgccaucaugccguucugguucugcgugaccuacguggccauggucaucgccaaccacgugcuguggcuguucuccuacugccggaagaucggggugaacgucugcagcgacuccaccuucgaggagacgagccucaccaccuucaugaucaccaaggacuccuacugccgccugaagaacagcguguccgacguggcguacaaccgguaccugagccucuacaacaaguaccgcuacuacagcggcaagauggacacggccgccuaccgggaggccgccugcucccagcuggcgaaggccauggagaccuucaaccacaacaacggcaacgacguccuguaccagccgcccaccgccagcguguccaccagcuuccuccaguga

SEQ ID NO: 18286 - RNA, 1449 nt, Artificial Sequence
  HCoV/229E/BN1/GER/2015__KU291448.1__non-structural protein 4 (NSP4) CDS gc
augggcgacgccgggcacagccugaccuggcucuggcugcugugcggccucgugugccugauccaguucuaccugugcuucuucaugcccuacuucaugcacgacgucguguccagcuucgagggguacgacuucaaguacaucgagaacggccagcucaagaacuucgaggccccgcugaagugcgugcgcaacgucuucgagaacuucgaggacuggcacuacgcgaaguucggguucacgccccugaacaagcaguccugccccaucguggugggcgucagcgagaucgugaacacgguggccggcauccccuccaacgucuaccucguggggaagacccugaucuucacccugcaggccgccuucggcaacgccggggugugcuacgacaucuucggcgucaccacgccggagaagugcaucuucaccagcgcgugcacccggcucgaggggcugggcggcaacaacguguacugcuacaacaccgagcugauggaggggucccuccccuacagcuccauccaggccaacgccuacuacaaguacgacaacggcaacuucaucaagcugcccgaggugaucgcccagggguucggcuuccgcaccguccggaccaucgcgaccaaguacugccgcgugggcgagugcguggacagcaacgccggggucugcuucggcuucgacaagugguucgugaacgacgggcggguggccaacggcuacgucugcgggaccggccuguggaaccucguguucaacauccuguccauguucagcuccagcuucuccguggccgccaugagcggccagauccugcucaacugcgcgcugggggccuucgccaucuucugcugcuuccuggucacgaaguuccgccggauguucggcgaccucuccgugggggucugcaccgugguggucgccgugcugcugaacaacgugagcuacaucgucacccagaaccucgugaccaugaucgccuacgcgauccuguacuucuucgccacgcgcucccugcgguacgccuggaucuggugcgccgccuaccucaucgcguacaucagcuucgcccccugguggcugugcgccugguacuuccuggccaugcucaccggccugcugcccagccuccugaagcugaagguguccaccaaccucuucgagggggacaaguucgucggcaccuucgagagcgccgcggccggcacguucgugaucgacauccgcuccuacgagaagcuggccaacagcaucucccccgagaagcucaagagcuacgccgcguccuacaaccgguacaaguacuacagcgggaacgccaacgaggccgacuaccgcugcgccugcuacgccuaccuggcgaaggccaugcuggacuucucccgggaccacaacgacauccuguacaccccgcccaccgugagcuacggcuccacccuccaguga

SEQ ID NO: 18287 - RNA, 1437 nt, Artificial Sequence
  HCoV/NL63/RPTEC/2004__JX504050.1__non-structural protein 4 (NSP4) CDS gc
augggcuucaagcgcaccuacaacuuccugugguacgugugccucuucgucguggcccuguucaucggggugagcuucaucgacuacaccacgaccgucaccuccuuccacggcuacgacuucaaguacaucgagaacgggcagcugaagguguucgaggcgccccuccacugcgugcggaacgucuucgacaacuucaaccaguggcacgaggccaaguucggcguggugaccacgaacagcgacaagugccccaucgucguggggguguccgagcgcaucaacgucgugcccggcgugcccaccaacgucuaccuggugggcaagacccugguguucacccuccaggccgccuucgggaacacgggcgucugcuacgacuucgacggggugaccaccagcgacaagugcaucuucaacuccgccugcacccggcuggagggccucgggggcgacaacguguacugcuacaacacgggccucaucgaggggagcaagcccuacuccacccugcagccgaacgccuacuacaaguacgacgcgaagaacuacguccgcuuccccgagauccuggcccggggcuucgggcuccgcaccauccggacccuggccacgcgcuacugccgggugggcgagugccgcgacagccacaagggcgugugcuucggguucgacaagugguacgucaacgacggccggguggacgacggguacaucugcggcgacgggcugaucgaccuccuggucaacgugcuguccaucuucagcuccagcuucuccguggucgccaugagcggccacaugcuguucaacuuccuguucgcggccuucaucaccuuccugugcuuccucgugaccaaguucaagcgcguguucggcgaccuguccuacggggucuucaccguggugugcgccacgcugaucaacaacaucagcuacgucgugacccagaaccucuucuucaugcugcuguacgccauccucuacuucguguucacccggaccguccgcuacgccuggaucuggcacaucgcguacaucguggccuacuuccugcugauccccugguggcuccugacgugguucuccuucgccgccuuccuggagcuccugcccaacguguucaagcugaagaucagcacccagcuguucgagggcgacaaguucaucgggaccuucgaguccgccgcggccggcaccuucguccucgacaugcggagcuacgagcgccugaucaacacgaucagcccggagaagcucaagaacuacgccgccuccuacaacaaguacaaguacuacagcggguccgccagcgaggcggacuaccggugcgccugcuacgcccaccuggccaaggccaugcuggacuacgcgaaggaccacaacgacaugcucuacuccccgcccaccaucagcuacaacuccacccugcaguga

SEQ ID NO: 18288 - RNA, 1506 nt, Artificial Sequence
  Bat SARS-like CoV/WIV1__KF367457.1__non-structural protein 4 (NSP4) CDS gc
augaagaucgugagcaccugguucaagcugaugcucaaggccacccugcugugcgucaucgccacgcucgugugcuacaucgugaugcccguccacacccuguccgugcacgacggcuacaccaacgagaucaucggguacaaggcgauccaggacggcgugacccgcgacaucgucagcacggacgacugcuucgccaacaagcacgccggguucgacuccuggcugagccagcggggcggguccuacaagaacgacaagagcugccccgugguggccgccaucaucacccgcgagaucggcuucaucguccccggccuccccgggaccgugcugcgggcgaucaacggcgacuuccugcacuuccucccccgcguguucuccgccgucgggaacaucugcuacaccccgagcaagcugaucgaguacuccgacuucgccacgagcgccugcgugcuggcggccgagugcaccaucuucaaggacgccaugggcaagcccgugcccuacugcuacgacaccaaccuccuggagggguccaucagcuacuccgagcugcggcccgacacccgcuacguccucauggacggcagcaucauccaguucccgaacacguaccuggagggcuccgugcggguggucaccaccuucgacgccgaguacugccgccacgggaccugcgagcggagcgaggccggcaucugccuguccacgagcgggcgcugggugcucaacaacgagcacuaccgggcgcugcccggcguguucugcggcgucgacgccaugaaccugaucgccaacaucuucacgccccucgugcagcccgugggggcccuggacgucuccgccagcguggucgcgggcgggaucaucgccauccuggugaccugcgccgccuacuacuucaugaaguuccgccgggccuucggcgaguacaaccacguggucgcggccaacgcccuccuguuccugaugagcuucaccauccucugccuggccccggccuacuccuuccugcccgggguguacagcguguucuaccucuaccugaccuucuacuucaccaacgacgucuccuuccuggcgcaccuccagugguucgccauguucagccccaucgugcccuucuggaucaccgccaucuacguguucugcaucucccugaagcacugccacugguucuucaacaacuaccugcgcaagcgggucauguucaacggcgugaccuucagcacguucgaggaggccgcgcucugcaccuuccugcugaacaaggagauguaccucaagcugcgcuccgagacccugcucccgcugacccaguacaaccgguaccuggcccucuacaacaaguacaaguacuucagcggcgcccuggacacgaccuccuaccgcgaggccgccugcugccaccuggcgaaggcccugaacgacuucagcaacuccggggccgacgugcucuaccagccgccccagaccagcaucaccuccgccguccugcaguga

SEQ ID NO: 18289 - RNA, 1488 nt, Artificial Sequence
  BatCoV/HKU9-1 BF_005I__NC_009021.1__non-structural protein 4 (NSP4) CDS gc
augggccaccgccggaucgugagcuggcgccggguccugauccacguguucaugcuccuggugguccugaacccccagugguucaccccgugguacaucaugcgccccaucgaguacaacgugguggacuucaaggucaucgacaacgccgugauccgggacaucaccuccgccgaccagugcuucgcgaacaaguucagcgccuucgagaacugguacuccaaccgcuacgggagcuacgugaacucccggggcugccccauggucguggggguggucagcgacaucgugggcucccucgugcccgggcugccggcccgcuuccugcgggucggcacgacccuccugccccuggugaacuacggccucggggccgugggcagcgucugcuacaccccgcacuacgccaucaacuacgacguguucgacaccuccgcgugcgugcuggccgccacgugcacccuguucagcuccgccagcggggagcgcaugcccuacugcgcggacgccgcccucauccagaacgccucccgguacgacaugcugaagccccacgucauguaccccuucuacgagcacagcggcuacauccgcuuccccgaggugaucuccgccggggugcacaucguccggaccauggcgauggaguacugcaaggugggccgcugcgacgucagcgaggccggccugugcaugucccuccagccccgguggguggugaacaacgccuacuuccgccagcagagcggggucuacugcggcaccuccgccuucgaccuguucaugaacaugcugcucccgaucuucacgcccgugggggccguggacaucaccaccagcauccugaugggcgcgcugcucgccgucguggugagcaugucccuguacuaccugcuccgguuccgccgggccuucggcgacuacagcggggucaucuucaccaacauccuggccuucgugcugaacgugaucguccucugccuggagggccccuaccccaugcugccguccaucuacgccaugguguuccucuacgcgacgugcuacuucgggagcgacaucgccugcaugaugcacguguccuuccugaucauguucgccggcgucgugccccugugggugaccguccucuacaucguggugguccugagccgccacauccugugguucgccucccucugcaccaagcggaccguccaggugggggaccuggccuuccacagcuuccaggacgcggcccugcagacguucaugcucgacaaggagguguuccugcgccugaagcgcgagaucuccagcgacgccuacuucaaguaccucgccauguacaacaaguacaaguacuacuccggccccauggacaccgcggccuaccgggaggccgccugcagccaccuggugauggcccuggagaaguacuccaacggcgggggcgacaccaucuaccagcccccgcgcugcagcguggcguccgccgcccuccaguga

SEQ ID NO: 18290 - RNA, 1449 nt, Artificial Sequence
  PEDV/NPL-PEDv/2013/P10__KJ778616.1__non-structural protein 4 (NSP4) CDS gc
auggccggccugcccagcuucuccaaggugaagaaguucuucugguuccucugccuguucaucgucgccguguucuucgcgcugagcuucuucgacuucuccacccaggugagcuccgacagcgacuacgacuucaaguacaucgaguccgggcagcucaagaccuucgacaacccgcugagcugcguccacaacguguucuccaacuucgaccaguggcacgacgccaaguucggcuucacgcccgugaacaaccccagcugccccaucgucguggggguguccgacgaggcccgcaccgucccgggcauccccgccgggguguaccuggccggcaagacccucguguucgcgaucaacaccaucuucggcacgagcgggcugugcuucgacgccuccggcgucgccgacaagggggccugcaucuucaacagcgcgugcaccacccuguccggccucgggggcaccgccguguacugcuacaagaacggccugguggagggggccaagcuguacagcgagcucgcgccccacuccuacuacaagauggucgacggcaacgccgugagccugcccgagaucaucucccggggguucggcauccgcacgauccggaccaaggccaugaccuacugccgcgugggccagugcguccagagcgccgagggggugugcuucggcgccgaccgguucuucguguacaacgccgagagcggguccgacuucgucugcggcaccgggcuguucacgcuccugaugaacgugaucagcguguucuccaagaccgucccggugaccguccugagcggccagauccucuucaacugcaucaucgccuucgcggccguggccgugugcuuccuguucaccaaguucaagcgcauguucggcgacauguccgucgggguguucacggugggcgccugcacccugcucaacaacgucagcuacaucgugacccagaacacccuggggaugcugggcuacgccacgcucuacuuccugugcaccaagggggugcgguacauguggaucuggcaccugggcuuccucaucuccuacauccugaucgcgcccugguggguccugaugguguacgccuucagcgccaucuucgaguucaugcccaaccucuucaagcugaagguguccacccagcuguucgagggcgacaaguucgucgggagcuucgagaacgccgccgcgggcaccuucgugcucgacaugcacgccuacgagcgccuggccaacuccaucagcacggagaagcugcggcaguacgccuccaccuacaacaaguacaaguacuacagcggguccgcgagcgaggccgacuaccgccucgccugcuucgcccaccuggccaaggcgaugauggacuacgccuccaaccacaacgacacccuguacacgcccccgaccgugagcuacaacuccacccuccaguga

SEQ ID NO: 18291 - RNA, 1494 nt, Artificial Sequence
  MHV/A59__NC_048217.1__non-structural protein 4 (NSP4) CDS gc
auggccguguucagccgcaugcugcaguggcuguucgucgccaaccugaucugcuucaucgugcugugggcgcucaugcccaccuacgccgugcacaaguccgacaugcagcugccgcuguacgccagcuucaaggucaucgacaacggcgugcuccgggacguguccgucaccgacgccugcuucgccaacaaguucaaccaguucgaccagugguacgagagcacguucgggcuggcguacuaccgcaacuccaaggccugccccgugguggucgccgugaucgaccaggacaucggccacacccuguucaacgugcccaccaccguccuccgguacggguuccacgugcugcacuucaucacgcacgccuucgcgaccgacagcgugcagugcuacaccccgcacaugcagauccccuacgacaacuucuacgccuccggcugcguccugagcucccucugcaccaugcuggcccacgccgacgggacgccccaccccuacugcuacaccggcggcgugaugcacaacgccagccuguacuccagccucgcgccccacgugcgcuacaaccuggccuccagcaacggguacauccgguucccggaggucguguccgagggcaucgugcgcgucgugcggacccgcagcaugaccuacugccggguggggcugugcgaggaggccgaggagggcaucugcuucaacuucaaccgcuccuggguccucaacaaccccuacuaccgggccaugcccgggacguucugcggccgcaacgccuucgaccugauccaccaggugcugggcgggcucguccggcccaucgacuucuucgcgcugaccgccagcuccguggccggcgccauccuggccaucaucgugguccucgcguucuacuaccugaucaagcugaagcgcgccuucggggacuacaccagcgugguggucaucaacgugaucguguggugcaucaacuuccucaugcuguucgucuuccagguguacccgacccugagcugccucuacgccugcuucuacuucuacacgacccuguacuuccccuccgagaucagcguggucaugcaccuccaguggcucgugauguacggcgccaucaugccccugugguucugcaucaucuacguggccgucgugguguccaaccacgcgcuguggcuguucagcuacugccggaagaucggcaccgagguccgcuccgacgggaccuucgaggagauggcccucacgaccuucaugaucaccaaggagagcuacugcaagcugaagaacuccgugagcgacguggccuucaaccgguaccucucccuguacaacaaguaccgcuacuucagcggcaagauggacaccgccgcguaccgggaggccgccugcucccagcuggccaaggccauggagacguucaaccacaacaacgggaacgacguccucuaccagcccccgaccgcgagcgugaccaccuccuuccugcaguga

SEQ ID NO: 18292 - RNA, 1506 nt, Artificial Sequence
  SARS-CoV-2/Wuhan-Hu-1__NC_045512.2/MN908947.2/EPI_ISL_402128__non -structural protein 4 (NSP4) CDS gc
augaagaucgugaacaacuggcugaagcagcucaucaaggucacccugguguuccuguucguggccgccaucuucuaccucaucacccccguccacgugaugagcaagcacacggacuucuccagcgagaucaucggcuacaaggcgaucgacgggggcgugacccgcgacaucgccuccaccgacacgugcuucgccaacaagcacgccgacuucgacaccugguucagccagcggggcggcuccuacaccaacgacaaggccugcccccugaucgcggccgucaucacccgcgaggugggguucgugguccccggccugcccggcaccauccuccggacgaccaacggggacuuccugcacuuccugccccgcguguucagcgccgugggcaacaucugcuacaccccguccaagcucaucgaguacaccgacuucgccacgagcgcgugcguccuggccgccgagugcaccaucuucaaggacgccuccgggaagcccgugcccuacugcuacgacaccaacgugcuggagggcagcgucgccuacgagucccuccggcccgacacccgcuacgugcugauggacgggagcaucauccaguucccgaacacguaccuggagggcuccgugcgggucgugaccaccuucgacagcgaguacugccgccacgggaccugcgagcgguccgaggcgggggugugcgucagcacguccggccgcugggugcucaacaacgacuacuaccggagccugcccgggguguucugcggcgucgacgccgugaaccugcucaccaacauguucacgccccugauccagcccaucggcgcccuggacaucuccgccagcaucgucgccgggggcaucguggcgaucguggugaccugccucgccuacuacuucaugcgcuuccggcgcgccuucggggaguacagccacgucguggccuucaacacccugcuguuccucauguccuucaccguccugugccugaccccgguguacagcuuccuccccggcguguacuccgucaucuaccuguaccugaccuucuaccucacgaacgacgugagcuuccuggcccacauccaguggauggugauguucacgccccugguccccuucuggaucaccaucgcguacaucaucugcaucuccaccaagcacuucuacugguucuucagcaacuaccucaagcggcgcgugguguucaacggggucuccuucagcaccuucgaggaggccgcccugugcaccuuccugcucaacaaggagauguaccugaagcugcgguccgacgugcuccugccgcugacccaguacaaccgcuaccucgcccuguacaacaaguacaaguacuucagcggcgccauggacaccacguccuaccgggaggcggccugcugccaccuggccaaggcccucaacgacuucagcaacuccggcagcgacgugcuguaccagccgccccagaccuccaucaccagcgcgguccugcaguga

SEQ ID NO: 18293 - RNA, 1506 nt, Artificial Sequence
  SARS-CoV-2__MT919775.1__non-structural protein 4 (NSP4) CDS gc
augaagaucgugaacaacuggcugaagcagcucaucaaggucacccugguguuccuguucguggccgccaucuucuaccucaucacccccguccacgugaugagcaagcacacggacuucuccagcgagaucaucggcuacaaggcgaucgacgggggcgugacccgcgacaucgccuccaccgacacgugcuucgccaacaagcacgccgacuucgacaccugguucagccagcggggcggcuccuacaccaacgacaaggccugcccccugaucgcggccgucaucacccgcgaggugggguucgugguccccggccugcccggcaccauccuccggacgaccaacggggacuuccugcacuuccugccccgcguguucagcgccgugggcaacaucugcuacaccccguccaagcucaucgaguacaccgacuucgccacgagcgcgugcguccuggccgccgagugcaccaucuucaaggacgccuccgggaagcccgugcccuacugcuacgacaccaacgugcuggagggcagcgucgccuacgagucccuccggcccgacacccgcuacgugcugauggacgggagcaucauccaguucccgaacacguaccuggagggcuccgugcgggucgugaccaccuucgacagcgaguacugccgccacgggaccugcgagcgguccgaggcgggggugugcgucagcacguccggccgcugggugcucaacaacgacuacuaccggagccugcccgggguguucugcggcgucgacgccgugaaccugcucaccaacauguucacgccccugauccagcccaucggcgcccuggacaucuccgccagcaucgucgccgggggcaucguggcgaucguggugaccugccucgccuacuacuucaugcgcuuccggcgcgucuucggggaguacagccacguggucgccuucaacacccugcuguuccucauguccuucaccgugcugugccugaccccgguguacagcuuccuccccggcgucuacuccgugaucuaccuguaccugaccuucuaccucacgaacgacgugagcuuccuggcccacauccaguggauggucauguucacgccccuggugcccuucuggaucaccaucgccuacaucaucugcaucuccaccaagcacuucuacugguucuucagcaacuaccucaagcggcgcguggucuucaacgggguguccuucagcaccuucgaggaggcggcccugugcaccuuccugcucaacaaggagauguaccugaagcugcgguccgacgugcuccugccgcugacccaguacaaccgcuaccucgcccuguacaacaaguacaaguacuucagcggcgccauggacaccacguccuaccgggaggccgcgugcugccaccuggccaaggcccucaacgacuucagcaacuccggcagcgacguccuguaccagccgccccagaccuccaucaccagcgccgugcugcaguga

SEQ ID NO: 18294 - RNA, 1506 nt, Artificial Sequence
  SARS-CoV-2__MT919788.1__non-structural protein 4 (NSP4) CDS gc
augaagaucgugaacaacuggcugaagcagcucaucaaggucacccugguguuccuguucguggccgccaucuucuaccucaucacccccguccacgugaugagcaagcacacggacuucuccagcgagaucaucggcuacaaggcgaucgacgggggcgugacccgcgacaucgccuccaccgacacgugcuucgccaacaagcacgccgacuucgacaccugguucagccagcggggcggcuccuacaccaacgacaaggccugcccccugaucgcggccgucaucacccgcgaggugggguucgugguccccggccugcccggcaccauccuccggacgaccaacggggacuuccugcacuuccugccccgcguguucagcgccgugggcaacaucugcuacaccccguccaagcucaucgaguacaccgacuucgccacgagcgcgugcguccuggccgccgagugcaccaucuucaaggacgccuccgggaagcccgugcccuacugcuacgacaccaacgugcuggagggcagcgucgccuacgagucccuccggcccgacacccgcuacgugcugauggacgggagcaucauccaguucccgaacacguaccuggagggcuccgugcgggucgugaccaccuucgacagcgaguacugccgccacgggaccugcgagcgguccgaggcgggggugugcgucagcacguccggccgcugggugcucaacaacgacuacuaccggagccugcccgggguguucugcggcgucgacgccgugaaccugcucaccaacauguucacgccccugauccagcccaucggcgcccuggacaucuccgccagcaucgucgccgggggcaucguggcgaucguggugaccugccucgccuacuacuucaugcgcuuccggcgcgccuucggggaguacagccacgucguggccuucaacacccugcuguuccucauguccuucaccguccugugccugaccccgguguacagcuuccuccccggcguguacuccgucaucuaccuguaccugaccuucuaccucacgaacgacgugagcuuccuggcccacauccaguggauggugauguucacgccccugguccccuucuggaucaccaucgcguacaucaucugcaucuccaccaagcacuucuacugguucuucagcaacuaccucaagcggcgcgugguguucaacggggucuccuucggcaccuucgaggaggccgcccugugcaccuuccugcucaacaaggagauguaccugaagcugcggagcgacgugcuccugccgcugacccaguacaaccgcuaccucgcccuguacaacaaguacaaguacuucuccggcgccauggacaccacgagcuaccgggaggcggccugcugccaccuggccaaggcccucaacgacuucuccaacagcggguccgacgugcuguaccagccgccccagaccagcaucaccuccgcgguccugcaguga

SEQ ID NO: 18295 - RNA, 1506 nt, Artificial Sequence
  SARS-CoV-2__MT920024.1__non-structural protein 4 (NSP4) CDS gc
augaagaucgugaacaacuggcugaagcagcucaucaaggucacccugguguuccuguucguggccgccaucuucuaccucaucacccccguccacgugaugagcaagcacacggacuucuccagcgagaucaucggcuacaaggcgaucgacgggggcgugacccgcgacaucgccuccaccgacacgugcuucgccaacaagcacgccgacuucgacaccugguucagccagcgggggugcuccuacaccaacgacaaggccugcccccugaucgcggccgucaucacccgcgaggugggcuucgugguccccgggcugcccggcaccauccuccggacgaccaacggcgacuuccugcacuuccugccccgcguguucagcgccguggggaacaucugcuacaccccguccaagcucaucgaguacaccgacuucgccacgagcgcgugcguccuggccgccgagugcaccaucuucaaggacgccuccggcaagcccgugcccuacugcuacgacaccaacgugcuggaggggagcgucgccuacgagucccuccggcccgacacccgcuacgugcugauggacggcagcaucauccaguucccgaacacguaccuggagggguccgugcgggucgugaccaccuucgacagcgaguacugccgccacgggaccugcgagcgguccgaggcgggcgugugcgucagcacguccggccgcugggugcucaacaacgacuacuaccggagccugcccggcguguucugcggggucgacgccgugaaccugcucaccaacauguucacgccccugauccagcccaucggcgcccuggacaucuccgccagcaucgucgccggcgggaucguggcgaucguggugaccugccucgccuacuacuucaugcgcuuccggcgcgccuucggcgaguacagccacgucguggccuucaacacccugcuguuccucauguccuucaccguccugugccugaccccgguguacagcuuccuccccgggguguacuccgucaucuaccuguaccugaccuucuaccucacgaacgacgugagcuuccuggcccacauccaguggauggugauguucacgccccugguccccuucuggaucaccaucgcguacaucaucugcaucuccaccaagcacuucuacugguucuucagcaacuaccucaagcggcgcgugguguucaacggcgucuccuucagcaccuucgaggaggccgcccugugcaccuuccugcucaacaaggagauguaccugaagcugcgguccgacgugcuccugccgcugacccaguacaaccgcuaccucgcccuguacaacaaguacaaguacuucagcggggccauggacaccacguccuaccgggaggcggccugcugccaccuggccaaggcccucaacgacuucagcaacuccggcagcgacgugcuguaccagccgccccagaccuccaucaccagcgcgguccugcaguga

SEQ ID NO: 18296 - RNA, 1506 nt, Artificial Sequence
  SARS-CoV-2__MT913038.1__non-structural protein 4 (NSP4) CDS gc
augaagaucgugaacaacuggcugaagcagcucaucaaggucacccugguguuccuguucguggccgccaucuucuaccucaucacccccguccacgugaugagcaagcacacggacuucuccagcgagaucaucggcuacaaggcgaucgacgggggcgugacccgcgacaucgccuccaccgacacgugcuucgccaacaagcacgccgacuucgacaccugguucagccagcggggcggcuccuacaccaacgacaaggccugcccccugaucgcggccgucaucacccgcgaggugggguucgugguccccggccugcccggcaccauccuccggaucacgaacggggacuuccugcacuuccugccccgcguguucagcgccgugggcaacaucugcuacaccccguccaagcucaucgaguacaccgacuucgccaccagcgcgugcguccuggccgccgagugcacgaucuucaaggacgccuccgggaagcccgugcccuacugcuacgacaccaacgugcuggagggcagcgucgccuacgagucccuccggcccgacacccgcuacgugcugauggacgggagcaucauccaguucccgaacaccuaccuggagggcuccgugcgggucgugacgaccuucgacagcgaguacugccgccacgggaccugcgagcgguccgaggcgggggugugcgucagcaccuccggccgcugggugcucaacaacgacuacuaccggagccugcccgggguguucugcggcgucgacgccgugaaccugcucacgaacauguucacgccccugauccagcccaucggcgcccuggacaucuccgccagcaucgucgccgggggcaucguggcgaucguggugaccugccucgccuacuacuucaugcgcuuccggcgcgccuucggggaguacagccacgucguggccuucaacacccugcuguuccucauguccuucaccguccugugccugaccccgguguacagcuuccuccccggcguguacuccgucaucuaccuguaccugaccuucuaccucaccaacgacgugagcuuccuggcccacauccaguggauggugauguucacgccccugguccccuucuggaucaccaucgcguacaucaucugcaucuccaccaagcacuucuacugguucuucagcaacuaccucaagcggcgcgugguguucaacggggucuccuucagcaccuucgaggaggccgcccugugcacguuccugcucaacaaggagauguaccugaagcugcgguccgacgugcuccugccgcugacccaguacaaccgcuaccucgcccuguacaacaaguacaaguacuucagcggcgccauggacaccaccuccuaccgggaggcggccugcugccaccuggccaaggcccucaacgacuucagcaacuccggcagcgacgugcuguaccagccgccccagacguccaucaccagcgcgguccugcaguga

SEQ ID NO: 18297 - RNA, 1506 nt, Artificial Sequence
  SARS-CoV-2__MT913046.1__non-structural protein 4 (NSP4) CDS gc
augaagaucgugaacaacuggcugaagcagcucaucaaggucacccugguguuccuguucguggccgccaucuucuaccucaucacccccguccacgugaugagcaagcacacggacuucuccagcgagaucaucggcuacaaggcgaucgacgggggcgugacccgcgacaucgccuccaccgacacgugcuucgccaacaagcacgccgacuucgacaccugguucagccagcggggcggcuccuacaccaacgacaaggccugcccccugaucgcggccgucaucacccgcgaggugggguucgugguccccggccugcccggcaccauccuccggacgaccaacggggacuuccugcacuuccugccccgcguguucagcgccgugggcaacaucugcuacaccccguccaagcucaucgaguacaccgacuucgccacgagcgcgugcguccuggccgccgagugcaccaucuucaaggacgccuccgggaagcccgugcccuacugcuacgacaccaacgugcuggagggcagcgucgccuacgagucccuccggcccgacacccgcuacgugcugauggacgggagcaucauccaguucccgaacacguaccuggagggcuccgugcgggucgugaccaccuucgacagcgaguacugccgccacgggaccugcgagcgguccgaggcgggggugugcgucagcacguccggccgcugggugcucaacaacgacuacuaccggagccugcccgggguguucugcggcgucgacgccgugaaccugcucaccaacauguucacgccccugauccagcccaucggcgcccuggacaucuccgccagcaucgucgccgggggcaucguggcgaucguggugaccugccucgccuacuacuucaugcgcuuccggcgcgccuucggggaguacagccacgucguggccuucaacacccugcugcuccugauguccuucaccguccugugccucaccccgguguacagcuuccugcccggcguguacuccgucaucuaccuguaccucaccuucuaccugacgaacgacgugagcuuccuggcccacauccaguggauggugauguucacgccccucguccccuucuggaucaccaucgcguacaucaucugcaucuccaccaagcacuucuacugguucuucagcaacuaccugaagcggcgcgugguguucaacggggucuccuucagcaccuucgaggaggccgcccugugcaccuuccuccugaacaaggagauguaccugaagcuccgguccgacgugcugcugccgcucacccaguacaaccgcuaccuggcccuguacaacaaguacaaguacuucagcggcgccauggacaccacguccuaccgggaggcggccugcugccaccucgccaaggcccugaacgacuucagcaacuccggcagcgacgugcuguaccagccgccccagaccuccaucaccagcgcgguccugcaguga

SEQ ID NO: 18298 - RNA, 1506 nt, Artificial Sequence
  SARS-CoV-2__MT913061.1__non-structural protein 4 (NSP4) CDS gc
augaagaucgugaacaacuggcugaagcagcucaucaaggucacccugguguuccuguucguggccgccaucuucuaccucaucacccccguccacgugaugagcaagcacacggacuucuccagcgagaucaucggcuacaaggcgaucgacgggggcgugacccgcgacaucgccuccaccgacacgugcuucgccaacaagcacgccgacuucgacaccugguucagccagcgcgggggcuccuacaccaacgacaaggccugcccccugaucaccgcggucaucacccgggaggugggguucgugguccccggccugcccggcacgauccuccggaccaccaacggggacuuccugcacuuccugccccgcguguucagcgccgugggcaacaucugcuacaccccguccaagcucaucgaguacacggacuucgccaccagcgccugcguccuggcggccgagugcaccaucuucaaggacgccuccgggaagcccgugcccuacugcuacgacaccaacgugcuggagggcagcgucgccuacgagucccuccggcccgacacgcgcuacgugcugauggacgggagcaucauccaguucccgaacaccuaccuggagggcuccgugcgggucgugaccaccuucgacagcgaguacugccgccacggcacgugcgagcgguccgaggccggggugugcgucagcaccuccggccgcugggugcucaacaacgacuacuaccggagccugcccgggguguucugcggcgucgacgcggugaaccugcucaccaacauguucaccccgcugauccagcccaucggcgcccuggacaucuccgccagcaucgucgccgggggcaucguggccaucguggucacgugccucgcguacuacuucaugcgcuuccggcgcgccuucggggaguacagccacgugguggccuucaacacccugcuguuccucauguccuucaccguccugugccugacccccguguacagcuuccuccccggcguguacuccgucaucuaccuguaccugacguucuaccucaccaacgacgugagcuuccuggcccacauccaguggauggugauguucacgccccugguccccuucuggaucaccaucgccuacaucaucugcaucuccaccaagcacuucuacugguucuucagcaacuaccucaagcggcgcgugguguucaacggggucuccuucagcaccuucgaggaggcggcccugugcaccuuccugcucaacaaggagauguaccugaagcugcgguccgacgugcuccugccgcugacccaguacaaccgcuaccucgcccuguacaacaaguacaaguacuucagcggcgccauggacacgaccuccuaccgggaggccgcgugcugccaccuggccaaggcccucaacgacuucagcaacuccggcagcgacgugcuguaccagccgccccagaccuccaucaccagcgccguccugcaguga

SEQ ID NO: 18299 - RNA, 1506 nt, Artificial Sequence
  SARS-CoV-2__MT913095.1__non-structural protein 4 (NSP4) CDS gc
augaagaucgugaacaacuggcugaagcagcucaucaaggucacccugguguuccuguucguggccgccaucuucuaccucaucacccccguccacgugaugagcaagcacacggacuucuccagcgagaucaucggcuacaaggcgaucgacgggggcgugacccgcgacaucgccuccaccgacacgugcuucgccaacaagcacgccgacuucgacaccugguucagccagcggggcggcuccuacaccaacgacaaggccugcccccugaucgcggccgucaucacccgcgaggugggguucgugguccccggccugcccggcaccauccuccggacgaccaacggggacuuccugcacuuccugccccgcguguucagcgccgugggcaacaucugcuacaccccguccaagcucaucgaguacaccgacuucgccacgagcgcgugcguccuggccgccgagugcaccaucuucaaggacgccuccgggaagcccgugcccuacugcuacgacaccaacgugcuggagggcagcgucgccuacgagucccuccggcccgacacccgcuacgugcugauggacgggagcaucauccaguucccgaacacguaccuggagggcuccgugcgggucgugaccaccuucgacagcgaguacugccgccacgggaccugcgagcgguccgaggcgggggugugcgucagcacguccggccgcugggugcucaacaacgacuacuaccggagccugcccgggguguucugcggcgucgacgccgugaaccugcucaccaacauguucacgccccugauccagcccaucggcgcccuggacaucuccgccagcaucgucgccgggggcaucguggcgaucguggugaccugccucgccuacuacuucaugcgcuuccggcgcgccuucggggaguacagccacgucguggccuucaacacccugcuguuccucauguccuucaccguccugugccugaccccgguguacagcuuccuccccggcguguacuccgucaucuaccuguaccugaccuucuaccucacgaacgacgugagcuuccuggcccacauccaguggauggugauguucacgccccugguccccuucuggaucaccaucgcguacaucaucugcaucuccaccaagcacuucuacugguucuucagcaacuaccucaagcggcgcgugguguucaacggggucuccuucagcaccuucgaggaggccgcccugugcaccuuccugcucaacaaggagauguaccugaagcugcgguccgacgugcuccugccgcugacccaguacaaccgcuaccucgccuucuacaacaaguacaaguacuucagcggcgccauggacaccacguccuaccgggaggcggccugcugccaccuggccaaggcccugaacgacuucagcaacuccggcagcgacgugcucuaccagccgccccagaccuccaucaccagcgcgguccugcaguga

SEQ ID NO: 18300 - RNA, 1506 nt, Artificial Sequence
  SARS-CoV-2__MT913100.1__non-structural protein 4 (NSP4) CDS gc
augaagaucgugaacaacuggcugaagcagcucaucaaggucacccugguguuccuguucguggccgccaucuucuaccucaucacccccguccacgugaugagcaagcacacggacuucuccagcgagaucaucggcuacaaggcgaucgacgggggcgugacccgcgacaucgccuccaccgacacgugcuucgccaacaagcacgccgacuucgacaccugguucagccagcggggcggcuccuacaccaacgacaaggccugcccccugaucgcggccgucaucacccgcgaggugggguucgugguccccggccugcccggcaccauccuccggacgaccaacggggacuuccugcacuuccugccccgcguguucagcgccgugggcaacaucugcuacaccccguccaagcucaucgaguacaccgacuucgccacgagcgcgugcguccuggccgccgagugcaccaucuucaaggacgccuccgggaagcccgugcccuacugcuacgacaccaacgugcuggagggcagcgucgccuacgagucccuccggcccgacacccgcuacgugcugauggacgggagcaucauccaguucccgaacacguaccuggagggcuccgugcgggucgugaccaccuucgacagcgaguacugccgccacgggaccugcgagcgguccgaggcgggggugugcgucagcacguccggccgcugggugcucaacaacgacuacuaccggagccugcccgggguguucugcggcgucgacgccgugaaccugcucaccaacauguucacgccccugauccagcccaucggcgcccuggacaucuccgccagcaucgucgccgggggcaucguggcgaucguggugaccugccucgccuacuacuucaugcgcuuccggcgcgccuucggggaguacagccacgucguggccuucaacacccugcuguuccucauguccuucaccguccugugccugaccccgguguacagcuuccuccccggcguguacuccgucaucuaccuguaccugaccuucuaccucacgaacgacgugagcuuccuggcccacauccaguggauggugauguucacgccccugguccccuucuggaucaccaucguguacaucaucugcaucuccaccaagcacuucuacugguucuucagcaacuaccucaagcggcgcguggucuucaacgggguguccuucagcaccuucgaggaggcggcccugugcaccuuccugcucaacaaggagauguaccugaagcugcgguccgacgugcuccugccgcugacccaguacaaccgcuaccucgcccuguacaacaaguacaaguacuucagcggcgccauggacaccacguccuaccgggaggccgcgugcugccaccuggccaaggcccucaacgacuucagcaacuccggcagcgacguccuguaccagccgccccagaccuccaucaccagcgccgugcugcaguga

SEQ ID NO: 18301 - RNA, 1506 nt, Artificial Sequence
  SARS-CoV-2__MT913141.1__non-structural protein 4 (NSP4) CDS gc
augaagaucgugaacaacuggcugaagcagcucaucaaggucacccugguguuccuguucguggccgccaucuucuaccucaucacccccguccacgugaugagcaagcacaacgacuucuccagcgagaucaucggcuacaaggcgaucgacgggggcgugacgcgcgacaucgccuccaccgacacgugcuucgccaacaagcacgccgacuucgacaccugguucagccagcggggcggcuccuacaccaacgacaaggccugcccccugaucgcggccgucaucacccgcgaggugggguucgugguccccggccugcccggcaccauccuccggaccacgaacggggacuuccugcacuuccugccccgcguguucagcgccgugggcaacaucugcuacaccccguccaagcucaucgaguacaccgacuucgccaccagcgcgugcguccuggccgccgagugcacgaucuucaaggacgccuccgggaagcccgugcccuacugcuacgacaccaacgugcuggagggcagcgucgccuacgagucccuccggcccgacacccgcuacgugcugauggacgggagcaucauccaguucccgaacaccuaccuggagggcuccgugcgggucgugacgaccuucgacagcgaguacugccgccacgggaccugcgagcgguccgaggcgggggugugcgucagcaccuccggccgcugggugcucaacaacgacuacuaccggagccugcccgggguguucugcggcgucgacgccgugaaccugcucacgaacauguucacgccccugauccagcccaucggcgcccuggacaucuccgccagcaucgucgccgggggcaucguggcgaucguggugaccugccucgccuacuacuucaugcgcuuccggcgcgccuucggggaguacagccacgucguggccuucaacacccugcuguuccucauguccuucaccguccugugccugaccccgguguacagcuuccuccccggcguguacuccgucaucuaccuguaccugaccuucuaccucaccaacgacgugagcuuccuggcccacauccaguggauggugauguucacgccccugguccccuucuggaucaccaucgcguacaucaucugcaucuccaccaagcacuucuacugguucuucagcaacuaccucaagcggcgcgugguguucaacggggucuccuucagcaccuucgaggaggccgcccugugcacguuccugcucaacaaggagauguaccugaagcugcgguccgacgugcuccugccgcugacccaguacaaccgcuaccucgcccuguacaacaaguacaaguacuucagcggcgccauggacaccaccuccuaccgggaggcggccugcugccaccuggccaaggcccucaacgacuucagcaacuccggcagcgacgugcuguaccagccgccccagacguccaucaccagcgcgguccugcaguga

SEQ ID NO: 18302 - RNA, 1506 nt, Artificial Sequence
  SARS-CoV-2__MT907515.1__non-structural protein 4 (NSP4) CDS gc
augaagaucgugaacaacuggcugaagcagcucaucaaggucacccugguguuccuguucguggccgccaucuucuaccucaucacccccguccacgugaugagcaagcacacggacuucuccagcgagaucaucggcuacaaggcgaucgacgggggcgugacccgcgacaucgccuccaccgacacgugcuucgccaacaagcacgccgacuucgacaccugguucagccagcggggcggcuccuacaccaacgacaaggccugcccccugaucgcggccgucaucacccgcgaggugggguucgugguccccggccugcccggcaccauccuccggacgaccaacggggacuuccugcacuuccugccccgcguguucagcgccgugggcaacaucugcuacaccccguccaagcucaucgaguacaccgacuucgccacgagcgcgugcguccuggccgccgagugcaccaucuucaaggacgccuccgggaagcccgugcccuacugcuacgacaccaacgugcuggagggcagcgucgccuacgagucccuccggcccgacacccgcuacgugcugauggacgggagcaucauccaguucccgaacacguaccuggagggcuccgugcgggucgugaccaccuucgacagcgaguacugccgccacgggaccugcgagcgguccgaggcgggggugugcgucagcacguccggccgcugggugcucaacaacgacuacuaccggagccugcccgggguguucugcggcgucgacgccgugaaccugcucaccaacauguucacgccccugauccagcccaucggcgcccuggacaucuccgccagcaucgucgccgggggcaucguggcgaucguggugaccugccucgccuacuacuucaugcgcuuccggcgcgccuacggggaguacagccacgucguggccuucaacacccugcuguuccucauguccuucaccguccugugccugaccccgguguacagcuuccuccccggcguguacuccgucaucuaccuguaccugaccuucuaccucacgaacgacgugagcuuccuggcccacauccaguggauggugauguucacgccccugguccccuucuggaucaccaucgcguacaucaucugcaucuccaccaagcacuucuacugguucuucagcaacuaccucaagcggcgcgugguguucaacggggucuccuucagcaccuucgaggaggccgcccugugcaccuuccugcucaacaaggagauguaccugaagcugcgguccgacgugcuccugccgcugacccaguacaaccgcuaccucgcccuguacaacaaguacaaguacuucagcggcgccauggacaccacguccuaccgggaggcggccugcugccaccuggccaaggcccucaacgacuucagcaacuccggcagcgacgugcuguaccagccgccccagaccuccaucaccagcgcgguccugcaguga

SEQ ID NO: 18303 - RNA, 1506 nt, Artificial Sequence
  SARS-CoV-2__MT907517.1__non-structural protein 4 (NSP4) CDS gc
augaagaucgugaacaacuggcugaagcagcucaucaaggucacccugguguuccuguucguggccgccaucuucuaccucaucacccccguccacgugaugagcaagcacacggacuucuccagcgagaucaucggcuacaaggcgaucgacgggggcgugacccgcgacaucgccuccaccgacacgugcuucgccaacaagcacgccgacuucgacaccugguucagccagcggggcggcuccuacaccaacgacaaggccugcccccugaucgcggccgucaucacccgcgaggugggguucgugguccccggccugcccggcaccauccuccggacgaccaacggggacuuccugcacuuccugccccgcguguucagcgccgugggcaacaucugcuacaccccguccaagcucaucgaguacaccgacuucgccacgagcgcgugcguccuggccgccgagugcaccaucuucaaggacgccuccgggaagcccgugcccuacugcuacgacaccaacgugcuggagggcagcgucgccuacgagucccuccggcccgacacccgcuacgugcugauggacgggagcaucauccaguucccgaacacguaccuggagggcuccgugcgggucgugaccaccuucgacagcgaguacugccgccacgggaccugcgagcgguccgaggcgggggugugcgucagcacguccggccgcugggugcucaacaacgacuacuaccggagccugcccgggguguucugcggcgucgacgccgugaaccugcucaccaacauguccacgccccugauccagcccaucggcgcccuggacaucagcgccagcaucgucgccgggggcaucguggcgaucguggugaccugccucgccuacuacuucaugcgcuuccggcgcgccuucggggaguacucccacgucguggccuucaacacccugcuguuccucaugagcuucaccguccugugccugaccccgguguacuccuuccuccccggcguguacagcgucaucuaccuguaccugaccuucuaccucacgaacgacguguccuuccuggcccacauccaguggauggugauguucacgccccugguccccuucuggaucaccaucgcguacaucaucugcaucagcaccaagcacuucuacugguucuucuccaacuaccucaagcggcgcgugguguucaacggggucagcuucuccaccuucgaggaggccgcccugugcaccuuccugcucaacaaggagauguaccugaagcugcggagcgacgugcuccugccgcugacccaguacaaccgcuaccucgcccuguacaacaaguacaaguacuucuccggcgccauggacaccacgagcuaccgggaggcggccugcugccaccuggccaaggcccucaacgacuucuccaacagcggcuccgacgugcuguaccagccgccccagaccagcaucaccuccgcgguccugcaguga

SEQ ID NO: 18304 - RNA, 1506 nt, Artificial Sequence
  SARS-CoV-2__MT890294.1__non-structural protein 4 (NSP4) CDS gc
augaagaucgugaacaacuggcugaagcagcucaucaaggucacccugguguuccuguucguggccgccaucuucuaccucaucacccccguccacgugaugagcaagcacacggacuucuccagcgagaucaucggcuacaaggcgaucgacgggggcgugacccgcgacaucgccuccaccgacacgugcuucgccaacaagcacgccgacuucgacaccugguucagccagcggggcggcuccuacaccaacgacaaggccugcccccugaucgcggccgucaucacccgcgaggugggguucgugguccccggccugcccggcaccauccuccggacgaccaacggggacuuccugcacuuccugccccgcguguucagcgccgugggcaacaucugcuacaccccguccaagcucaucgaguacaccgacuucgccacgagcgcgugcguccuggccgccgagugcaccaucuucaaggacgccuccgggaagcccgugcccuacugcuacgacaccaacgugcuggagggcagcgucgccuacgagucccuccggcccgacacccgcuacgugcugauggacgggagcaucauccaguucccgaacacgcaccuggagggcuccgugcgggucgugaccaccuucgacagcgaguacugccgccacgggaccugcgagcgguccgaggcgggggugugcgucagcacguccggccgcugggugcucaacaacgacuacuaccggagccugcccgggguguucugcggcgucgacgccgugaaccugcucaccaacauguucacgccccugauccagcccaucggcgcccuggacaucuccgccagcaucgucgccgggggcaucguggcgaucguggugaccugccucgccuacuacuucaugcgcuuccggcgcgccuucggggaguacagccacgucguggccuucaacacccugcuguuccucauguccuucaccguccugugccugaccccgguguacagcuuccuccccggcguguacuccgucaucuaccuguaccugaccuucuaccucacgaacgacgugagcuuccuggcccacauccaguggauggugauguucacgccccugguccccuucuggaucaccaucgcguacaucaucugcaucuccaccaagcacuucuacugguucuucagcaacuaccucaagcggcgcgugguguucaacggggucuccuucagcaccuucgaggaggccgcccugugcaccuuccugcucaacaaggagauguaccugaagcugcgguccgacgugcuccugccgcugacccaguacaaccgcuaccucgcccuguacaacaaguacaaguacuucagcggcgccauggacaccacguccuaccgggaggcggccugcugccaccuggccaaggcccucaacgacuucagcaacuccggcagcgacgugcuguaccagccgccccagaccuccaucaccagcgcgguccugcaguga

SEQ ID NO: 18305 - RNA, 1506 nt, Artificial Sequence
  SARS-CoV-2__MT893001.1__non-structural protein 4 (NSP4) CDS gc
augaagaucgugaacaacuggcugaagcagcucaucaaggucacccugguguuccuguucguggccgccaucuucuaccucaucacccccguccacgugaugagcaagcacacggacuucuccagcgagaucaucggcuacaaggcgaucgacgggggcgugacccgcgacaucgccuccaccgacacgugcuucgccaacaagcacgccgacuucgacaccugguucagccagcggggcggcuccuacaccaacgacaaggccugcccccugaucgcggccgucaucacccgcgaggugggguucgugguccccggccugcccggcaccauccuccggacgaccaacggggacuuccugcacuuccugccccgcguguucagcgccgugggcaacaucugcuacaccccguccaagcucaucgaguacaccgacuucgccacgagcgcgugcguccuggccgccgagugcaccaucuucaaggacgccuccgggaagcccgugcccuacugcuacgacaccaacgugcuggagggcagcgucgccuacgagucccuccggcccgacacccgcuacgugcugauggacgggagcaucauccaguucccgaacacguaccuggagggcuccgugcgggucgugaccaccuucgacagcgaguacugccgccacgggaccugcgagcgguccgaggcgggggugugcgucagcacguccggccgcugggugcucaacaacgacuacuaccggagccugcccgggguguucugcggcgucgacgccgugaaccugcucaccaacauguucacgccccugauccagcccaucggcgcccuggacaucuccgccagcaucgucgccgggggcaucguggcgaucguggugaccugccucgccuacuacuucaugcgcuuccggcgcgccuucggggaguacagccacgucguggccuucaacacccugcuguuccucauguccuucaccguccugugccugaccccgguguaccucuuccugcccggcguguacagcgucaucuaccuguaccucaccuucuacuucacgaacgacguguccuuccuggcccacauccaguggauggugauguucacgccccugguccccuucuggaucaccaucgcguacaucaucugcaucagcaccaagcacuucuacugguucuucuccaacuaccucaagcggcgcgugguguucaacggggucagcuucuccaccuucgaggaggccgcccugugcaccuuccugcucaacaaggagauguaccugaagcugcggagcgacgugcuccugccgcugacccaguacaaccgcuaccucgcccuguacaacaaguacaaguacuucuccggcgccauggacaccacgagcuaccgggaggcggccugcugccaccuggccaaggcccucaacgacuucuccaacagcggcuccgacgugcuguaccagccgccccagaccagcaucaccuccgcgguccugcaguga

SEQ ID NO: 18306 - RNA, 1506 nt, Artificial Sequence
  SARS-CoV-2__MT893008.1__non-structural protein 4 (NSP4) CDS gc
augaagaucgugaacaacuggcugaagcagcucaucaaggucacccugguguuccuguucguggccgccaucuucuaccucaucacccccguccacgugaugagcaagcacacggacuucuccaucgagaucaucggcuacaaggcgaucgacgggggcgugacccgcgacaucgccagcaccgacacgugcuucgccaacaagcacgccgacuucgacaccugguucucccagcggggcggcagcuacaccaacgacaaggccugcccccugaucgcggccgucaucacccgcgaggugggguucgugguccccggccugcccggcaccauccuccggacgaccaacggggacuuccugcacuuccugccccgcguguucuccgccgugggcaacaucugcuacaccccgagcaagcucaucgaguacaccgacuucgccacguccgcgugcguccuggccgccgagugcaccaucuucaaggacgccagcgggaagcccgugcccuacugcuacgacaccaacgugcuggagggcuccgucgccuacgagagccuccggcccgacacccgcuacgugcugauggacggguccaucauccaguucccgaacacguaccuggagggcagcgugcgggucgugaccaccuucgacuccgaguacugccgccacgggaccugcgagcggagcgaggcgggggugugcgucuccacgagcggccgcugggugcucaacaacgacuacuaccggucccugcccgggguguucugcggcgucgacgccgugaaccugcucaccaacauguucacgccccugauccagcccaucggcgcccuggacaucagcgccuccaucgucgccgggggcaucguggcgaucguggugaccugccucgccuacuacuucaugcgcuuccggcgcgccuucggggaguacagccacgucguggccuucaacacccugcuguuccucaugagcuucaccguccugugccugaccccgguguacuccuuccuccccggcguguacagcgucaucuaccuguaccugaccuucuaccucacgaacgacguguccuuccuggcccacauccaguggauggugauguucacgccccugguccccuucuggaucaccaucgcguacaucaucugcaucagcaccaagcacuucuacugguucuucuccaacuaccucaagcggcgcgugguguucaacggggucagcuucuccaccuucgaggaggccgcccugugcaccuuccugcucaacaaggagauguaccugaagcugcggagcgacgugcuccugccgcugacccaguacaaccgcuaccucgcccuguacaacaaguacaaguacuucuccggcgccauggacaccacgagcuaccgggaggcggccugcugccaccuggccaaggcccucaacgacuucuccaacagcggcuccgacgugcuguaccagccgccccagaccagcaucaccuccgcgguccugcaguga

SEQ ID NO: 18307 - RNA, 1506 nt, Artificial Sequence
  SARS-CoV-2__MT873055.1__non-structural protein 4 (NSP4) CDS gc
augaagaucgugaacaacuggcugaagcagcucaucaaggucacccugguguuccuguucguggccgccaucuucuaccucaucacccccguccacgugaugagcaagcacacggacuucuccagcgagaucaucggcuacaaggcgaucgacgggggcgugacccgcgacaucgccuccaccgacacgugcuucgccaacaagcacgccgacuucgacaccugguucagccagcggggcggcuccuacaccaacgacaaggccugcccccugaucgcggccgucaucacccgcgagguggggaucgugguccccggccugcccggcaccauccuccggacgaccaacggggacuuccugcacuuccugccccgcguguucagcgccgugggcaacaucugcuacaccccguccaagcucaucgaguacaccgacuucgccacgagcgcgugcguccuggccgccgagugcaccaucuucaaggacgccuccgggaagcccgugcccuacugcuacgacaccaacgugcuggagggcagcgucgccuacgagucccuccggcccgacacccgcuacgugcugauggacgggagcaucauccaguucccgaacacguaccuggagggcuccgugcgggucgugaccaccuucgacagcgaguacugccgccacgggaccugcgagcgguccgaggcgggggugugcgucagcacguccggccgcugggugcucaacaacgacuacuaccggagccugcccgggguguucugcggcgucgacgccgugaaccugcucaccaacauguucacgccccugauccagcccaucggcgcccuggacaucuccgccagcaucgucgccgggggcaucguggcgaucguggugaccugccucgccuacuacuucaugcgcuuccggcgcgccuucggggaguacagccacgucguggccuucaacacccugcuguuccucauguccuucaccguccugugccugaccccgguguacagcuuccuccccggcguguacuccgucaucuaccuguaccugaccuucuaccucacgaacgacgugagcuuccuggcccacauccaguggauggugauguucacgccccugguccccuucuggaucaccaucgcguacaucaucugcaucuccaccaagcacuucuacugguucuucagcaacuaccucaagcggcgcgugguguucaacggggucuccuucagcaccuucgaggaggccgcccugugcaccuuccugcucaacaaggagauguaccugaagcugcgguccgacgugcuccugccgcugacccaguacaaccgcuaccucgcccuguacaacaaguacaaguacuucagcggcgccauggacaccacguccuaccgggaggcggccugcugccaccuggccaaggcccucaacgacuucagcaacuccggcagcgacgugcuguaccagccgccccagaccuccaucaccagcgcgguccugcaguga

SEQ ID NO: 18308 - RNA, 1506 nt, Artificial Sequence
  SARS-CoV-2__MT873076.1__non-structural protein 4 (NSP4) CDS gc
augaagaucgugaacaacuggcugaagcagcucaucaaggucacccugguguuccuguucguggccgccaucuucuaccucaucacccccguccacgugaugagcaagcacacggacuucuccagcgagaucaucggcuacaaggcgaucgacgggggcgugacccgcgacaucgccuccaccgacacgugcuucgccaacaagcacgccgacuucgacaccugguucagccagcggggcggcuccuacaccaacgacaaggccugcccccugaucgcggccgucaucacccgcgaggugggguucgugguccccggccugcccggcaccauccuccggacgaccaacggggacuuccugcacuuccugccccgcguguucagcgccgugggcaacaucugcuacaccccguccaagcucaucgaguacaccgacuucgccacgagcgcgugcguccuggccgccgagugcaccaucuucaaggacgccuccgggaagcccgugcccuacugcuacgacaccaacgugcuggagggcagcgucgccuacgagucccuccggcccgacacccgcuacgugcugauggacgggagcaucauccaguucccgaacacguaccuggagggcuccgugcgggucgugaccaccuucgacagcgaguacugccgccacgggaccugcgagcgguccgaggcgggggugugcgucagcacguccggccgcugggugcucaacaacgacuacuaccggagccugcccgggguguucugcggcgucgacgccgugaaccugcucaccaacauguucacgccccugauccagcccaucggcgcccuggacaucuccgccagcaucgucgccgggggcaucguggcgaucguggucaucugccucgccuacuacuucaugcgcuuccggcgcgccuucggggaguacagccacgugguggccuucaacacccugcuguuccucauguccuucaccguccugugccugaccccgguguacagcuuccuccccggcguguacuccgucaucuaccuguaccugaccuucuaccucaccaacgacgugagcuuccuggcccacauccaguggauggugauguucacgccccugguccccuucuggaucaccaucgcguacaucaucugcaucuccaccaagcacuucuacugguucuucagcaacuaccucaagcggcgcgugguguucaacggggucuccuucagcaccuucgaggaggccgcccugugcacguuccugcucaacaaggagauguaccugaagcugcgguccgacgugcuccugccgcugacccaguacaaccgcuaccucgcccuguacaacaaguacaaguacuucagcggcgccauggacaccaccuccuaccgggaggcggccugcugccaccuggccaaggcccucaacgacuucagcaacuccggcagcgacgugcuguaccagccgccccagacguccaucaccagcgcgguccugcaguga

SEQ ID NO: 18309 - RNA, 1506 nt, Artificial Sequence
  SARS-CoV-2__MT873134.1__non-structural protein 4 (NSP4) CDS gc
augaagaucgugaacaacuggcugaagcagcucaucaaggucacccugguguuccuguucguggccgccaucuucuaccucaucacccccguccacgugaugagcaagcacacggacuucuccagcgagaucaucggcuacaaggcgaucgacgggggcgugacccgcgacaucgccuccaccgacacgugcuucgccaacaagcacgccgacuucgacaccugguucagccagcggggcggcuccuacaccaacgacaaggccugcccccugaucgcggccgucaucacccgcgaggugggguucgugguccccggccugcccggcaccauccuccggacgaccaacggggacuuccugcacuuccugccccgcguguucagcgccgugggcaacaucugcuacaccccguccaagcucaucgaguacaccgacuucgccacgagcgcgugcguccuggccgccgagugcaccaucuucaaggacgccuccgggaagcccgugcccuacugcuacgacaccaacgugcuggagggcagcgucgccuacgagucccuccggcccgacacccgcuacgugcugauggacgggagcaucauccaguucccgaacacguaccuggagggcuccgugcgggucgugaccaccuucgacagcgaguacugccgccacgggaccugcgagcgguccgaggcgggggugugcgucagcacguccggccgcugggugcucaacaacgacuacuaccggagccugcccgggguguucugcggcgucgacgccgugaaccugcucaccaacauguucacgccccugauccagcccaucggcgcccuggacaucuccgccagcaucgucgccgggggcaucguggcgaucguggugaccugccucgccuacuacuucaugcgcuuccggcgcgccuucggggucuacagccacguggucgccuucaacacccugcuguuccucauguccuucaccgugcugugccugaccccgguguacagcuuccuccccggcgucuacuccgugaucuaccuguaccugaccuucuaccucacgaacgacgugagcuuccuggcccacauccaguggauggucauguucacgccccuggugcccuucuggaucaccaucgcguacaucaucugcaucuccaccaagcacuucuacugguucuucagcaacuaccucaagcggcgcguggucuucaacgggguguccuucagcaccuucgaggaggccgcccugugcaccuuccugcucaacaaggagauguaccugaagcugcgguccgacgugcuccugccgcugacccaguacaaccgcuaccucgcccuguacaacaaguacaaguacuucagcggcgccauggacaccacguccuaccgggaggcggccugcugccaccuggccaaggcccucaacgacuucagcaacuccggcagcgacguccuguaccagccgccccagaccuccaucaccagcgcggugcugcaguga

SEQ ID NO: 18310 - RNA, 1506 nt, Artificial Sequence
  SARS-CoV-2__MT873140.1__non-structural protein 4 (NSP4) CDS gc
augaagaucgugaacaacuggcugaagcagcucaucaaggucacccugguguuccuguucguggccgccaucuucuaccucaucacccccguccacgugaugagcaagcacacggacuucuccagcgagaucaucggcuacaaggcgaucgacgggggcgugacccgcgacaucgccuccaccgacacgugcuucgccaacaagcacgccgacuucgacaccugguucagccagcggggcggcuccuacaccaacgacaaggccugcccccugaucgcggccgucaucacccgcgaggugggguucgugguccccggccugcccggcaccauccuccggacgaccaacggggacuuccugcacuuccugccccgcguguucagcgccgugggcaacaucugcuacaccccguccaagcucaucgaguacaccgacuucgccacgagcgcgugcguccuggccgccgagugcaccaucuucaaggacgccuccgggaagcccgugcccuacugcuacgacaccaacgugcuggagggcagcgucgccuacgagucccuccggcccgacacccgcuacgugcugauggacgggagcaucauccaguucccgaacacguaccuggagggcuccgugcgggucgugaccaccuucgacagcgaguacugccgccacgggaccugcgagcgguccgaggcgggggugugcgucagcacguccggccgcugggugcucaacaacgacuacuaccggagccugcccgggguguucugcggcgucgacgccgugaaccugcucaccaacauguucaccccgcugauccagcccaucggcgcccuggacaucuccgccagcaucgucgccgggggcaucguggcgaccguggucacgugccucgccuacuacuucaugcgcuuccggcgcgccuucggggaguacagccacgugguggccuucaacacccugcuguuccucauguccuucaccguccugugccugacccccguguacagcuuccuccccggcguguacuccgucaucuaccuguaccugacguucuaccucaccaacgacgugagcuuccuggcccacauccaguggauggugauguucacgccccugguccccuucuggaucaccaucgcguacaucaucugcaucuccaccaagcacuucuacugguucuucagcaacuaccucaagcggcgcgugguguucaacggggucuccuucagcaccuucgaggaggccgcccugugcaccuuccugcucaacaaggagauguaccugaagcugcgguccgacgugcuccugccgcugacccaguacaaccgcuaccucgcccuguacaacaaguacaaguacuucagcggcgccauggacacgaccuccuaccgggaggcggccugcugccaccuggccaaggcccucaacgacuucagcaacuccggcagcgacgugcuguaccagccgccccagaccuccaucaccagcgcgguccugcaguga

SEQ ID NO: 18311 - RNA, 1506 nt, Artificial Sequence
  SARS-CoV-2__MT873324.1__non-structural protein 4 (NSP4) CDS gc
augaagaucgugaacaacuggcugaagcagcucaucaaggucacccugguguuccuguucguggccgccaucuucuaccucaucacccccguccacgugaugagcaagcacacggacuucuccagcgagaucaucggcuacaaggcgaucgacgggggcgugacccgcgacaucgccuccaccgacacgugcuucgccaacaagcacgccgacuucgacaccugguucagccagcggggcggcuccuacaccaacgacaaggccugcccccugaucgcggccgucaucacccgcgaggugggguucgugguccccggccugcccggcaccauccuccggacgaccaacggggacuuccugcacuuccugccccgcguguucagcgccgugggcaacaucugcuacaccccguccaagcucaucgaguacaccgacuucgccacgagcgcgugcguccuggccgccgagugcaccaucuucaaggacgccuccgggaagcccgugcccuacugcuacgacaccaacgugcuggagggcagcgucgccuacgagucccuccggcccgacacccgcuacgugcugauggacgggagcaucauccaguucccgaacacguaccuggagggcuccgugcgggucgugaccaccuucgacagcgaguacugccgccacgggaccugcgagcgguccgaggcgggggugugcgucagcacguccggccgcugggugcucaacaacgacuacuaccggagccugcccgggguguucugcggcgucgacgccgugaaccugcucaccaacauguucacgccccugauccagcccaucggcgcccuggacaucuccgccagcaucgucgccgggggcaucguggcgaucguggugaccugccucgccuacuacuucaugcgcuuccggcgcgccuucggggaguacagccacgucguggccuucaacacccugcuguuccucauguccuucaccguccugugccugaccccgguguacagcuuccuccccggcguguacuccaucaucuaccuguaccugaccuucuaccucacgaacgacgucagcuuccuggcccacauccaguggauggugauguucacgccccuggugcccuucuggaucaccaucgcguacaucaucugcaucuccaccaagcacuucuacugguucuucagcaacuaccucaagcggcgcgucguguucaacgggguguccuucagcaccuucgaggaggccgcccugugcaccuuccugcucaacaaggagauguaccugaagcugcgguccgacguccuccugccgcugacccaguacaaccgcuaccucgcccuguacaacaaguacaaguacuucagcggcgccauggacaccacguccuaccgggaggcggccugcugccaccuggccaaggcccucaacgacuucagcaacuccggcagcgacgugcuguaccagccgccccagaccuccaucaccagcgcggugcugcaguga

SEQ ID NO: 18312 - RNA, 1506 nt, Artificial Sequence
  SARS-CoV-2__MT873454.1__non-structural protein 4 (NSP4) CDS gc
augaagaucgugaacaacuggcugaagcagcucaucaaggucacccugguguuccuguucguggccgccaucuucuaccucaucacccccguccacgugaugagcaagcacacggacuucuccagcgagaucaucggcuacaaggcgaucgacgggggcgugacccgcgacaucgccuccaccgacacgugcuucgccaacaagcacgccgacuucgacaccugguucagccagcggggcggcuccuacaccaacgacaaggccugcccccugaucgcggccgucaucacccgcgaggugggguucgugguccccggccugcccggcaccauccuccggacgaccaacggggacuuccugcacuuccugccccgcguguucagcgccgugggcaacaucugcuacaccccguccaagcucaucgaguacaccgacuucgccacgagcgcgugcguccuggccgccgagugcaccaucuucaaggacgccuccgggaagcccgugcccuacugcuacgacaccaacgugcuggagggcagcgucgccuacgagucccuccggcccgacacccgcuacgugcugauggacgggagcaucauccaguucccgaacacguaccuggagggcuccgugcgggucgugaccaccuucgacagcgaguacugccgccacgggaccugcgagcgguccgaggcgggggugugcgucagcacguccggccgcugggugcucaacaacgacuacuaccggagccugcccgggguguucugcggcgucgacgccgugaaccugcucaccaacauguucacgccccugauccagcccaucggcgcccuggacaucuccgccagcaucgucgccgggggcaucguggcgaucguggugaccugccucgccuacuacuucaugcgcuuccggcgcgccuucggggaguacagccacgucguggccuucaacacccugcuguuccucauguccuucaccguccugugccugaccccgguguacagcuuccuccccggcguguacuccgucaucuaccuguaccugaccuucuaccucacgaacgacgugagcuuccuggcccacauccaguggauggugauguucacgccccugguccccuucuggaucaccaucgcguacaucaucugcaucuccaccaagcacuucuacugguucuucagcaacuaccucaagcggcgcgugguguucaacggggucuccuucagcaccuucgaggaggccgcccugugcaccuuccugcucaacaaggagauguaccugaagcugcgguccgacgugcuccugccgcugacccaguacaaccgcuaccucgcccuguacaacaaguacaaguacuucagcggcgccauggacaccacguccuaccgggaggcggccugcugccaccuggugaaggcccucaacgacuucagcaacuccggcagcgacguccuguaccagccgccccagaccuccaucaccagcgccgugcugcaguga

SEQ ID NO: 18313 - RNA, 1506 nt, Artificial Sequence
  SARS-CoV-2__MT877304.1__non-structural protein 4 (NSP4) CDS gc
augaagaucgugaacaacuggcugaagcagcucaucaaggucacccugguguuccuguucguggccgucaucuucuaccucaucacccccgugcacgugaugagcaagcacacggacuucuccagcgagaucaucggcuacaaggccaucgacgggggcgucacccgcgacaucgcguccaccgacacgugcuucgccaacaagcacgccgacuucgacaccugguucagccagcggggcggcuccuacaccaacgacaaggccugcccccugaucgccgcggugaucacccgcgaggugggguucgucgugcccggccugcccggcaccauccuccggacgaccaacggggacuuccugcacuuccugccccgcguguucagcgccgucggcaacaucugcuacaccccguccaagcucaucgaguacaccgacuucgccacgagcgccugcgugcuggcggccgagugcaccaucuucaaggacgccuccgggaagcccgugcccuacugcuacgacaccaacguccuggagggcagcguggccuacgagucccuccggcccgacacccgcuacgugcugauggacgggagcaucauccaguucccgaacacguaccuggagggcuccguccggguggugaccaccuucgacagcgaguacugccgccacgggaccugcgagcgguccgaggccggggucugcgugagcacguccggccgcugggugcucaacaacgacuacuaccggagccugcccggggucuucugcggcguggacgcggucaaccugcucaccaacauguucacgccccugauccagcccaucggcgcccuggacaucuccgccagcaucguggccgggggcaucguggccaucgucgugaccugccucgcguacuacuucaugcgcuuccggcgcgccuucggggaguacagccacguggucgccuucaacacccugcuguuccucauguccuucaccgugcugugccugaccccgguguacagcuuccuccccggcgucuacuccgugaucuaccuguaccugaccuucuaccucacgaacgacgugagcuuccuggcccacauccaguggauggucauguucacgccccuggugcccuucuggaucaccaucgccuacaucaucugcaucuccaccaagcacuucuacugguucuucagcaacuaccucaagcggcgcguggucuucaacgggguguccuucagcaccuucgaggaggcggcccugugcaccuuccugcucaacaaggagauguaccugaagcugcgguccgacgugcuccugccgcugacccaguacaaccgcuaccucgcccuguacaacaaguacaaguacuucagcggcgccauggacaccacguccuaccgggaggccgcgugcugccaccuggccaaggcccucaacgacuucagcaacuccggcagcgacguccuguaccagccgccccagaccuccaucaccagcgccgugcugcaguga

SEQ ID NO: 18314 - RNA, 1506 nt, Artificial Sequence
  SARS-CoV-2__MT877329.1__non-structural protein 4 (NSP4) CDS gc
augaagaucgugaacaacuggcugaagcagcucaucaaggucacccugguguuccuguucguggccgccaucuucuaccucaucacccccguccacgugaugagcaagcacacggacuucuccagcgagaucaucggcuacaaggcgaucgacgggggcgugacccgcgacaucgccuccaccgacacgugcuucgccaacaagcacgccgacuucgacaccugguucagccagcggggcggcuccuacaccaacgacaaggccugcccccugaucgcggccgucaucacccgcgaggugggguucgugguccccggccugcccggcaccauccuccggacgaccaacggggacuuccugcacuuccugccccgcguguucagcgccgugggcaacaucugcuacaccccguccaagcucaucgaguacaccgacuucgccacgagcgcgugcguccuggccgccgagugcaccaucuucaaggacgccuccgggaagcccgugcccuacugcuacgacaccaacgugcuggagggcagcgucgccuacgagucccuccggcccaacacccgcuacgugcugauggacgggagcaucauccaguucccgaacacguaccuggagggcuccgugcgggucgugaccaccuucgacagcgaguacugccgccacgggaccugcgagcgguccgaggcgggggugugcgucagcacguccggccgcugggugcucaacaacgacuacuaccggagccugcccgggguguucugcggcgucgacgccgugaaccugcucaccaacauguucacgccccugauccagcccaucggcgcccuggacaucuccgccagcaucgucgccgggggcaucguggcgaucguggugaccugccucgccuacuacuucaugcgcuuccggcgcgccuucggggaguacagccacgucguggccuucaacacccugcuguuccucauguccuucaccguccugugccugaccccgguguacagcuuccuccccggcguguacuccgucaucuaccuguaccugaccuucuaccucacgaacgacgugagcuuccuggcccacauccaguggauggugauguucacgccccugguccccuucuggaucaccaucgcguacaucaucugcaucuccaccaagcacuucuacugguucuucagcaacuaccucaagcggcgcgugguguucaacggggucuccuucagcaccuucgaggaggccgcccugugcaccuuccugcucaacaaggagauguaccugaagcugcgguccgacgugcuccugccgcugacccaguacaaccgcuaccucgcccuguacaacaaguacaaguacuucagcggcgccauggacaccacguccuaccgggaggcggccugcugccaccuggccaaggcccucaacgacuucagcaacuccggcagcgacgugcuguaccagccgccccagaccuccaucaccagcgcgguccugcaguga

SEQ ID NO: 18315 - RNA, 1506 nt, Artificial Sequence
  SARS-CoV-2__MT856682.1__non-structural protein 4 (NSP4) CDS gc
augaagaucgugaacaacuggcugaagcagcucaucaaggucacccugguguuccuguucguggccgccaucuucuaccucaucacccccguccacgugaugagcaagcacacggacuucuccagcgagaucaucggcuacaaggcgaucgacgggggcgugacccgcgacaucgccuccaccgacacgugcuucgccaacaagcacgccgacuucgacaccugguucagccagcggggcggcuccuacaccaacgacaaggccugcccccugaucgcggccgucaucacccgcgaggugggguucgugguccccagccugcccggcaccauccuccggacgaccaacggcgacuuccugcacuuccugccccgcguguucuccgccguggggaacaucugcuacaccccgagcaagcucaucgaguacaccgacuucgccacguccgcgugcguccuggccgccgagugcaccaucuucaaggacgccagcggcaagcccgugcccuacugcuacgacaccaacgugcuggagggguccgucgccuacgagagccuccggcccgacacccgcuacgugcugauggacggcuccaucauccaguucccgaacacguaccuggaggggagcgugcgggucgugaccaccuucgacuccgaguacugccgccacgggaccugcgagcggagcgaggcgggcgugugcgucuccacgagcgggcgcugggugcucaacaacgacuacuaccggucccugcccggcguguucugcggggucgacgccgugaaccugcucaccaacauguucacgccccugauccagcccaucggcgcccuggacaucagcgccagcaucgucgccggcgggaucguggcgaucguggugaccugccucgccuacuacuucaugcgcuuccggcgcgccuucggcgaguacucccacgucguggccuucaacacccugcuguuccucaugagcuucaccguccugugccugaccccgguguacuccuuccuccccgggguguacagcgucaucuaccuguaccugaccuucuaccucacgaacgacguguccuuccuggcccacauccaguggauggugauguucacgccccugguccccuucuggaucaccaucgcguacaucaucugcaucagcaccaagcacuucuacugguucuucuccaacuaccucaagcggcgcgugguguucaacggcgucagcuucuccaccuucgaggaggccgcccugugcaccuuccugcucaacaaggagauguaccugaagcugcggagcgacgugcuccugccgcugacccaguacaaccgcuaccucgcccuguacaacaaguacaaguacuucuccggggccauggacaccacgagcuaccgggaggcggccugcugccaccuggccaaggcccucaacgacuucuccaacagcggcuccgacgugcuguaccagccgccccagaccagcaucaccuccgcgguccugcaguga

SEQ ID NO: 18316 - RNA, 1506 nt, Artificial Sequence
  SARS-CoV-2__MT846007.1__non-structural protein 4 (NSP4) CDS gc
augaagaucgugaacaacuggcugaagcagcucaucaaggucacccugguguuccuguucguggccgccaucuucuaccucaucacccccguccacgugaugagcaagcacacggacuucuccagcgagaucaucggcuacaaggcgaucgacgggggcgugacccgcaacaucgccuccaccgacacgugcuucgccaacaagcacgccgacuucgacaccugguucagccagcggggcggcuccuacaccaacgacaaggccugcccccugaucgcggccgucaucacccgcgaggugggguucgugguccccggccugcccggcaccauccuccggacgaccaacggggacuuccugcacuuccugccccgcguguucagcgccgugggcaacaucugcuacaccccguccaagcucaucgaguacaccgacuucgccacgagcgcgugcguccuggccgccgagugcaccaucuucaaggacgccuccgggaagcccgugcccuacugcuacgacaccaacgugcuggagggcagcgucgccuacgagucccuccggcccgacacccgcuacgugcugauggacgggagcaucauccaguucccgaacacguaccuggagggcuccgugcgggucgugaccaccuucgacagcgaguacugccgccacgggaccugcgagcgguccgaggcgggggugugcgucagcacguccggccgcugggugcucaacaacgacuacuaccggagccugcccgggguguucugcggcgucgacgccgugaaccugcucaccaacauguucacgccccugauccagcccaucggcgcccuggacaucuccgccagcaucgucgccgggggcaucguggcgaucguggugaccugccucgccuacuacuucaugcgcuuccggcgcgccuucggggaguacagccacgucguggccuucaacacccugcuguuccucauguccuucaccguccugugccugaccccgguguacagcuuccuccccggcguguacuccgucaucuaccuguaccugaccuucuaccucacgaacgacgugagcuuccuggcccacauccaguggauggugauguucacgccccugguccccuucuggaucaccaucgcguacaucaucugcaucuccaccaagcacuucuacugguucuucagcaacuaccucaagcggcgcgugguguucaacggggucuccuucagcaccuucgaggaggccgcccugugcaccuuccugcucaacaaggagauguaccugaagcugcgguccgacgugcuccugccgcugacccaguacaaccgcuaccucgcccuguacaacaaguacaaguacuucagcggcgccauggacaccacguccuaccgggaggcggccugcugccaccuggccaaggcccucaacgacuucagcaacuccggcagcgacgugcuguaccagccgccccagaccuccaucaccagcgcgguccugcaguga

SEQ ID NO: 18317 - RNA, 1506 nt, Artificial Sequence
  SARS-CoV-2__MT846519.1__non-structural protein 4 (NSP4) CDS gc
augaagaucgugaacaacuggcugaagcagcucaucaaggucacccugguguuccuguucguggccgccaucuucuaccucaucacccccguccacgugaugagcaagcacacggacuucuccagcgagaucaucggcuacaaggcgaucgacgggggcgugacccgcgacaucgccuccaccgacacgugcuucgccaacaagcacgccgacuucgacaccugguucagccagcggggcggcuccuacaccaacgacaaggccugcccccugaucgcggccgucaucacccgcgaggugggguucgugguccccggccugcccggcaccauccuccggacgaccaacggggacuuccugcacuuccugccccgcguguucagcgccgugggcaacaucugcuacaccccguccaagcucaucgaguacaccgacuucgccacgagcgcgugcguccuggccgccgagugcaccaucuucaaggacgccuccgggaagcccgugcccuacugcuacgacaccaacgugcuggagggcagcgucgccuacgagucccuccggcccgacacccgcuacgugcugauggacgggagcaucauccaguucccgaacacguaccuggagggcuccgugcgggucgugaccaccuucgacagcgaguacugccgccacgggaccugcgagcgguccgaggcgggggugugcgucagcacguccggccgcugggugcucaacaacgacuacuaccggagccugcccgggguguucugcggcgucgacgccgugaaccugcucaccaacauguucacgccccugauccagcccaucggcgcccuggacaucuccgccagcaucgucgccgggggcaucguggcgaucguggugaccugccucgccuacuacuucaugcgcuuccggcgcgccuucggggaguacagccacgucguggccuucaacacccugcuguuccucauguccuucaccguccugugccugaccccgguguacagcuuccuccccggcguguacuccgucaucuaccuguaccugaccuucuaccucacgaacgacgugagcuuccuggcccacauccaguggauggugauguucacgccccugguccccuucuggaucaccaucgcguacaucaucugcaucuccaccaagcacuucuacugguucuucagcaacuaccucgagcggcgcgugguguucaacggggucuccuucagcaccuucgaggaggccgcccugugcaccuuccugcucaacaaggagauguaccugaagcugcgguccgacgugcuccugccgcugacccaguacaaccgcuaccucgcccuguacaacaaguacaaguacuucagcggcgccauggacaccacguccuaccgggaggcggccugcugccaccuggccaaggcccucaacgacuucagcaacuccggcagcgacgugcuguaccagccgccccagaccuccaucaccagcgcgguccugcaguga

SEQ ID NO: 18318 - RNA, 1506 nt, Artificial Sequence
  SARS-CoV-2__MT846557.1__non-structural protein 4 (NSP4) CDS gc
augaagaucgugaacaacuggcugaagcagcucaucaaggucacccugguguuccuguucguggccgccaucuucuaccucaucacccccguccacgugaugagcaagcacacggacuucuccagcgagaucaucggcuacaaggcgaucgacgggggcgugacccgcgacaucgccuccaccgacacgugcuucgccaacaagcacgccgacuucgacaccugguucagccagcggggcggcuccuacaccaacgacaaggccugcccccugaucgcggccgucaucacccgcgaggugggguucgugguccccggccugcccggcaccauccuccggacgaccaacggggacuuccugcacuuccugccccgcguguucagcgccgugggcaacaucugcuacaccccguccaagcucaucgaguacaccgacuucgccacgagcgcgugcguccuggccgccgagugcaccaucuucaaggacgccuccgggaagcccgugcccuacugcuacgacaccaacgugcuggagggcagcgucgccuacgagucccuccggcccgacauccgcuacgugcugauggacgggagcaucauccaguucccgaacaccuaccuggagggcuccgugcgggucgugacgaccuucgacagcgaguacugccgccacgggaccugcgagcgguccgaggcgggggugugcgucagcaccuccggccgcugggugcucaacaacgacuacuaccggagccugcccgggguguucugcggcgucgacgccgugaaccugcucacgaacauguucacgccccugauccagcccaucggcgcccuggacaucuccgccagcaucgucgccgggggcaucguggcgaucguggugaccugccucgccuacuacuucaugcgcuuccggcgcgccuucggggaguacagccacgucguggccuucaacacccugcuguuccucauguccuucaccguccugugccugaccccgguguacagcuuccuccccggcguguacuccgucaucuaccuguaccugaccuucuaccucaccaacgacgugagcuuccuggcccacauccaguggauggugauguucacgccccugguccccuucuggaucaccaucgcguacaucaucugcaucuccaccaagcacuucuacugguucuucagcaacuaccucaagcggcgcgugguguucaacggggucuccuucagcaccuucgaggaggccgcccugugcacguuccugcucaacaaggagauguaccugaagcugcgguccgacgugcuccugccgcugacccaguacaaccgcuaccucgcccuguacaacaaguacaaguacuucagcggcgccauggacaccaccuccuaccgggaggcggccugcugccaccuggccaaggcccucaacgacuucagcaacuccggcagcgacgugcuguaccagccgccccagacguccaucaccagcgcgguccugcaguga

SEQ ID NO: 18319 - RNA, 1506 nt, Artificial Sequence
  SARS-CoV-2__MT846600.1__non-structural protein 4 (NSP4) CDS gc
augaagaucgugaacaacuggcugaagcagcucaucaaggucacccugguguuccuguucguggccgccaucuucuaccucaucacccccguccacgugaugagcaagcacacggacuucuccagcgagaucaucggcuacaaggcgaucgacgggggcgugacccgcgacaucgccuccaccgacacgugcuucgccaacaagcacgccgacuucgacaccugguucagccagcgcgggggcuccuacaccaacgacaaggccugcccgcugaucgcggccgucaucacccgggaggugggguucgugguccccggccugcccggcaccauccuccggacgaccaacggggacuuccugcacuuccugccccgcguguucagcgccgugggcaacaucugcuacaccccguccaagcucaucgaguacaccgacuucgccacgagcgcgugcguccuggccgccgagugcaccaucuucaaggacgccuccggcaagagcgugcccuacugcuacgacaccaacgugcuggagggcuccgucgccuacgagagccuccggcccgacacccgcuacgugcugauggacggguccaucauccaguuccccaacacguaccuggagggcagcgugcgggucgugaccaccuucgacuccgaguacugccgccacgggaccugcgagcggagcgaggcgggggugugcgucuccacgagcggccgcugggugcucaacaacgacuacuaccggucccugccggggguguucugcggcgucgacgccgugaaccugcucaccaacauguucacgccccugauccagcccaucggcgcccuggacaucagcgccagcaucgucgccgggggcaucguggcgaucguggugaccugccucgccuacuacuucaugcgcuuccggcgcgccuucggggaguacucccacgucguggccuucaacacccugcuguuccucaugagcuucaccguccugugccugacccccguguacuccuuccucccgggcguguacagcgucaucuaccuguaccugaccuucuaccucacgaacgacguguccuuccuggcccacauccaguggauggugauguucacgccccugguccccuucuggaucaccaucgcguacaucaucugcaucagcaccaagcacuucuacugguucuucuccaacuaccucaagcggcgcgugguguucaacggggucagcuucuccaccuucgaggaggccgcccugugcaccuuccugcucaacaaggagauguaccugaagcugcggagcgacgugcuccugccccugacccaguacaaccgcuaccucgcccuguacaacaaguacaaguacuucuccggcgccauggacaccacgagcuaccgggaggcggccugcugccaccuggccaaggcccucaacgacuucuccaacagcggcuccgacgugcuguaccagccgccccagaccagcaucaccuccgcgguccugcaguga

SEQ ID NO: 18320 - RNA, 1506 nt, Artificial Sequence
  SARS-CoV-2__MT846623.1__non-structural protein 4 (NSP4) CDS gc
augaagaucgugaacaacuggcugaagcagcucaucaaggucacccugguguuccuguucguggccgccaucuucuaccucaucacccccguccacgugaugagcaagcacacggacuucuccagcgagaucaucggcuacaaggcgaucgacgggggcgugacccgcgacaucgccuccaccgacacgugcuucgccaacaagcacgccgacuucgacaccugguucagccagcggggcggcuccuacaccaacgacaaggccugcccccugaucgcggccgucaucacccgcgaggugggguucgugguccccggccugcccggcaccauccuccggacgaccaacggggacuuccugcacuuccugccccgcguguucagcgccgugggcaacaucugcuacaccccguccaagcucaucgaguacaccgacuucgccacgagcgcgugcguccuggccgccgagugcaccaucuucaaggacgccuccgggaagcccgugcccuacugcuacgacaccaacgugcuggagggcagcgucgccuacgagucccuccggcccgacacccgcuacgugcugauggacgggagcaucauccaguucccgaacacguaccuggagggcuccgugcgggucgugaccaccuucgacagcgaguacugccgccacgggaccugcgagcgguccgaggcgggggugugcgucagcacguccggccgcugggugcucaacaacgacuacuaccggagccugcccgggguguucugcggcgucgacgccgugaaccugcucaccaacauguucacgccccugauccagcccaucggcgcccuggacaucuccgccagcaucgucgccgggggcaucguggcgaucguggugaccugccucgccuacuacuucaugcgcuuccggcgcgccuucggggaguacagccacgucguggccuucaacacccugcuguuccucauguccuucaccguccugugccugaccccgguguacagcuuccuccccggcguguacuccgucaucuaccuguaccugaccuucuaccucacgaacgacgugagcuuccuggcccacauccaguggauggugauguucacgccccugguccccuucuggaucaccaucgcguacaucaucugcaucuccaccaagcacuucuacugguucuucagcaacuaccucaagaagcgggugguguucaacggggucuccuucagcaccuucgaggaggccgcccugugcaccuuccugcucaacaaggagauguaccugaagcugcgcuccgacgugcuccugccgcugacccaguacaaccgguaccucgcccuguacaacaaguacaaguacuucagcggcgccauggacaccacguccuaccgcgaggcggccugcugccaccuggccaaggcccucaacgacuucagcaacuccggcagcgacgugcuguaccagccgccccagaccuccaucaccagcgcgguccugcaguga

SEQ ID NO: 18321 - RNA, 1506 nt, Artificial Sequence
  SARS-CoV-2__MT843311.1__non-structural protein 4 (NSP4) CDS gc
augaagaucgugaacaacuggcugaagcagcucaucaaggucacccuggccuuccuguucguggccgcgaucuucuaccucaucacccccgugcacgucaugagcaagcacacggacuucuccagcgagaucaucggcuacaaggccaucgacgggggcgugacccgcgacaucgccuccaccgacacgugcuucgccaacaagcacgccgacuucgacaccugguucagccagcggggcggcuccuacaccaacgacaaggcgugcccccugaucgccgccgugaucacccgcgaggucggguucguggugcccggccugcccggcaccauccuccggacgaccaacggggacuuccugcacuuccugccccgcgucuucagcgccgugggcaacaucugcuacaccccguccaagcucaucgaguacaccgacuucgcgacgagcgccugcgugcuggccgccgagugcaccaucuucaaggacgccuccgggaagcccguccccuacugcuacgacaccaacgugcuggagggcagcguggcguacgagucccuccggcccgacacccgcuacguccugauggacgggagcaucauccaguucccgaacacguaccuggagggcuccgugcggguggucaccaccuucgacagcgaguacugccgccacgggaccugcgagcgguccgaggccggggugugcgugagcacguccggccgcuggguccucaacaacgacuacuaccggagccugcccgggguguucugcggcguggacgccgucaaccugcucaccaacauguucacgccccugauccagcccaucggcgcccuggacaucuccgccagcaucguggccgggggcaucgucgcgaucguggugaccugccucgccuacuacuucaugcgcuuccggcgcgccuucggggaguacagccacgucguggccuucaacacccugcuguuccucauguccuucaccgugcugugccugaccccggucuacagcuuccuccccggcguguacuccgugaucuaccuguaccugaccuucuaccucacgaacgacgucagcuuccuggcgcacauccaguggauggugauguucacgccccuggugcccuucuggaucaccaucgccuacaucaucugcaucuccaccaagcacuucuacugguucuucagcaacuaccucaagcggcgcgucguguucaacgggguguccuucagcaccuucgaggaggccgcccugugcaccuuccugcucaacaaggagauguaccugaagcugcgguccgacguccuccugccgcugacccaguacaaccgcuaccucgcccuguacaacaaguacaaguacuucagcggcgcgauggacaccacguccuaccgggaggccgccugcugccaccuggccaaggcgcucaacgacuucagcaacuccggcagcgacgugcuguaccagccgccccagaccuccaucaccagcgccgugcugcaguga

SEQ ID NO: 18322 - RNA, 1506 nt, Artificial Sequence
  SARS-CoV-2__MT843318.1__non-structural protein 4 (NSP4) CDS gc
augaagaucgugaacaacuggcugaagcagcucaucaaggucacccugguguuccuguucguggccgccaucuucuaccucaucacccccguccacgugaugagcaagcacacggacuucuccagcgagaucaucggcuacaaggcgaucgacgggggcgugacccgcgacaucgccuccaccgacacgugcuucgccaacaagcacgccgacuucgacaccugguucagccagcggggcggcuccuacaccaacgacaaggccugcccccugaucgcggccgucaucacccgcgaggugggguucgugguccccggccugcccggcaccauccuccggacgaccaacggggacuuccugcacuuccugccccgcguguucagcgccgugggcaacaucugcuacaccccguccaagcucaucgaguacaccgacuucgccacgagcgcgugcguccuggccgccgagugcaccaucuucaaggacgccuccgggaagcccgugcccuacugcuacgacaccaacgugcuggagggcagcgucgccuacgagucccuccggcccgacacccgcuacgugcugauggacgggagcaucauccaguucccgaacacguaccuggagggcuccgugcgggucgugaccaccuucgacagcgaguacugccgccacgggaccugcgagcgguccgaggcgggggugugcgucagcacguccggccgcugggugcucaacaacgacuacuaccggagccugcccgggguguucugcggcgucgacgccgugaaccugcucaccaacauguucacgccccugauccagcccaucggcgcccuggacaucuccgccagcaucgucgccgggggcaucguggcgaucguggugaccugccucgccuacuacuucaugcgcuuccggcgcgccuucggggaguacagccacgucguggccuucaacacccugcuguuccucauguccuucaccguccugugccugaccccgguguacagcuuccuccccggcguguacuccgucaucuaccuguaccugaccuucuaccucacgaacgacgugagcuuccuggcccacauccaguggauggugauguucacgccccugguccccuucuggaucaccaucgcguacaucaucugcaucuccaccaagcacuucuacugguucuucagcaacuaccucaagcggcgcgugguguucaacggggucuccuucagcaccuucgaggaggccgcccugugcaccuuccugcucaacaaggagauguaccugaagcugcgguccgacgugcuccugccgcugacccaguacaaccgcuaccucgcccuguacaacaaguacaaguacuucagcggcgccaucgacaccacguccuaccgggaggcggccugcugccaccuggccaaggcccucaacgacuucagcaacuccggcagcgacgugcuguaccagccgccccagaccuccaucaccagcgcgguccugcaguga

SEQ ID NO: 18323 - RNA, 1506 nt, Artificial Sequence
  SARS-CoV-2__MT843757.1__non-structural protein 4 (NSP4) CDS gc
augaagaucgugaacaacuggcugaagcagcucaucaaggucacccugguguuccuguucguggccgccaucuucuaccucaucacccccguccacgugaugagcaagcacacggacuucuccagcgagaucaucggcuacaaggcgaucgacgggggcgugacccgcgacaucgccuccaccgacacgugcuucgccaacaagcacgccgacuucgacaccugguucagccagcggggcggcuccuacaccaacgacaaggccugcccccugaucgcggccgucaucacccgcgaggugggguucgugguccccggccugcccggcaccauccuccggacgaccagcgacuuccugcacuuccugccccgcguguucuccgccguggggaacaucugcuacaccccgagcaagcucaucgaguacaccgacuucgccacguccgcgugcguccuggccgccgagugcaccaucuucaaggacgccagcggcaagcccgugcccuacugcuacgacaccaacgugcuggagggguccgucgccuacgagagccuccggcccgacacccgcuacgugcugauggacggcuccaucauccaguucccgaacacguaccuggaggggagcgugcgggucgugaccaccuucgacuccgaguacugccgccacgggaccugcgagcggagcgaggcgggcgugugcgucuccacgagcgggcgcugggugcucaacaacgacuacuaccggucccugcccggcguguucugcggggucgacgccgugaaccugcucaccaacauguucacgccccugauccagcccaucggcgcccuggacaucagcgccagcaucgucgccggcgggaucguggcgaucguggugaccugccucgccuacuacuucaugcgcuuccggcgcgccuucggcgaguacucccacgucguggccuucaacacccugcuguuccucaugagcuucaccguccugugccugaccccgguguacuccuuccuccccgggguguacagcgucaucuaccuguaccugaccuucuaccucacgaacgacguguccuuccuggcccacauccaguggauggugauguucacgccccugguccccuucuggaucaccaucgcguacaucaucugcaucagcaccaagcacuucuacugguucuucuccaacuaccucaagcggcgcgugguguucaacggcgucagcuucuccaccuucgaggaggccgcccugugcaccuuccugcucaacaaggagauguaccugaagcugcggagcgacgugcuccugccgcugacccaguacaaccgcuaccucgcccuguacaacaaguacaaguacuucuccggggccauggacaccacgagcuaccgggaggcggccugcugccaccuggccaaggcccucaacgacuucuccaacagcggcuccgacgugcuguaccagccgccccagaccagcaucaccuccgcgguccugcagagcuga

SEQ ID NO: 18324 - RNA, 1506 nt, Artificial Sequence
  SARS-CoV-2__MT831125.1__non-structural protein 4 (NSP4) CDS gc
augaagaacaucaacaacuggcugaagcagcucaucaaggugacccuggucuuccuguucguggccgccaucuucuaccucaucacccccgugcacgucaugagcaagcacacggacuucuccagcgagaucaucggcuacaaggcgaucgacgggggcgugacccgcgacaucgccuccaccgacacgugcuucgccaacaagcacgccgacuucgacaccugguucagccagcggggcggcuccuacaccaacgacaaggccugcccccugaucgcggccgugaucacccgcgaggucggguucguggugcccggccugcccggcaccauccuccggacgaccaacggggacuuccugcacuuccugccccgcgucuucagcgccgugggcaacaucugcuacaccccguccaagcucaucgaguacaccgacuucgccacgagcgcgugcgugcuggccgccgagugcaccaucuucaaggacgccuccgggaagcccguccccuacugcuacgacaccaacgugcuggagggcagcguggccuacgagucccuccggcccgacacccgcuacguccugauggacgggagcaucauccaguucccgaacacguaccuggagggcuccgugcggguggucaccaccuucgacagcgaguacugccgccacgggaccugcgagcgguccgaggcgggggugugcgugagcacguccggccgcuggguccucaacaacgacuacuaccggagccugcccgggguguucugcggcguggacgccgucaaccugcucaccaacauguucacgccccugauccagcccaucggcgcccuggacaucuccgccagcaucguggccgggggcaucgucgcgaucguggugaccugccucgccuacuacuucaugcgcuuccggcgcgccuucggggaguacagccacgucguggccuucaacacccugcuguuccucauguccuucaccgugcugugccugaccccggucuacagcuuccuccccggcguguacuccgugaucuaccuguaccugaccuucuaccucacgaacgacgucagcuuccuggcccacauccaguggauggugauguucacgccccuggugcccuucuggaucaccaucgcguacaucaucugcaucuccaccaagcacuucuacugguucuucagcaacuaccucaagcggcgcgucguguucaacgggguguccuucagcaccuucgaggaggccgcccugugcaccuuccugcucaacaaggagauguaccugaagcugcgguccgacguccuccugccgcugacccaguacaaccgcuaccucgcccuguacaacaaguacaaguacuucagcggcgccauggacaccacguccuaccgggaggcggccugcugccaccuggccaaggcccucaacgacuucagcaacuccggcagcgacgugcuguaccagccgccccagaccuccaucaccagcgcggugcugcaguga

SEQ ID NO: 18325 - RNA, 1506 nt, Artificial Sequence
  SARS-CoV-2__MT831217.1__non-structural protein 4 (NSP4) CDS gc
augaagaucgugaacaacuggcugaagcagcucaucaaggucacccugguguuccuguucguggccgccaucuucuaccucaucacccccguccacgugaugagcaagcacacggacuucuccagcgagaucaucggcuacaaggcgaucgacgggggcgugacccgcgacaucgccuucaccgacacgugcuucgccaacaagcacgccgacuucgacaccugguucucccagcggggcggcagcuacaccaacgacaaggccugcccccugaucgcggccgucaucacccgcgaggugggguucgugguccccggccugcccggcaccauccuccggacgaccaacggggacuuccugcacuuccugccccgcguguucuccgccgugggcaacaucugcuacaccccgagcaagcucaucgaguacaccgacuucgccacguccgcgugcguccuggccgccgagugcaccaucuucaaggacgccagcgggaagcccgugcccuacugcuacgacaccaacgugcuggagggcuccgucgccuacgagagccuccggcccgacacccgcuacgugcugauggacggguccaucauccaguucccgaacacguaccuggagggcagcgugcgggucgugaccaccuucgacuccgaguacugccgccacgggaccugcgagcggagcgaggcgggggugugcgucuccacgagcggccgcugggugcucaacaacgacuacuaccggucccugcccgggguguucugcggcgucgacgccgugaaccugcucaccaacauguucacgccccugauccagcccaucggcgcccuggacaucagcgccuccaucgucgccgggggcaucguggcgaucguggugaccugccucgccuacuacuucaugcgcuuccggcgcgccuucggggaguacagccacgucguggccuucaacacccugcuguuccucaugagcuucaccguccugugccugaccccgguguacuccuuccuccccggcguguacagcgucaucuaccuguaccugaccuucuaccucacgaacgacguguccuuccuggcccacauccaguggauggugauguucacgccccugguccccuucuggaucaccaucgcguacaucaucugcaucagcaccaagcacuucuacugguucuucuccaacuaccucaagcggcgcgugguguucaacggggucagcuucuccaccuucgaggaggccgcccugugcaccuuccugcucaacaaggagauguaccugaagcugcggagcgacgugcuccugccgcugacccaguacaaccgcuaccucgcccuguacaacaaguacaaguacuucuccggcgccauggacaccacgagcuaccgggaggcggccugcugccaccuggccaaggcccucaacgacuucuccaacagcggcuccgacgugcuguaccagccgccccagaccagcaucaccuccgcgguccugcaguga

SEQ ID NO: 18326 - RNA, 1506 nt, Artificial Sequence
  SARS-CoV-2__MT831323.1__non-structural protein 4 (NSP4) CDS gc
augaagaucgugaacaacuggcugaagcagcucaucaaggucacccugguguuccuguucguggccgccaucuucuaccucaucacccccguccacgugaugagcaagcacacggacuucuccagcgagaucaucggcuacaaggcgaucgacgggggcgugacccgcgacaucaccuccaccgacacgugcuucgccaacaagcacgccgacuucgacaccugguucagccagcgcgggggcuccuacaccaacgacaaggccugcccccugaucgccgcggucaucacccgggaggugggguucgugguccccggccugcccggcacgauccuccggaccaccaacggggacuuccugcacuuccugccccgcguguucagcgccgugggcaacaucugcuacaccccguccaagcucaucgaguacacggacuucgccaccagcgccugcguccuggcggccgagugcaccaucuucaaggacgccuccgggaagcccgugcccuacugcuacgacaccaacgugcuggagggcagcgucgccuacgagucccuccggcccgacacgcgcuacgugcugauggacgggagcaucauccaguucccgaacaccuaccuggagggcuccgugcgggucgugaccaccuucgacagcgaguacugccgccacggcacgugcgagcgguccgaggccggggugugcgucagcaccuccggccgcugggugcucaacaacgacuacuaccggagccugcccgggguguucugcggcgucgacgcggugaaccugcucaccaacauguucaccccgcugauccagcccaucggcgcccuggacaucuccgccagcaucgucgccgggggcaucguggccaucguggucacgugccucgcguacuacuucaugcgcuuccggcgcgccuucggggaguacagccacgugguggccuucaacacccugcuguuccucauguccuucaccguccugugccugacccccguguacagcuuccuccccggcguguacuccgucaucuaccuguaccugacguucuaccucaccaacgacgugagcuuccuggcccacauccaguggauggugauguucacgccccugguccccuucuggaucaccaucgccuacaucaucugcaucuccaccaagcacuucuacugguucuucagcaacuaccucaagcggcgcgugguguucaacggggucuccuucagcaccuucgaggaggcggcccugugcaccuuccugcucaacaaggagauguaccugaagcugcgguccgacgugcuccugccgcugacccaguacaaccgcuaccucgcccuguacaacaaguacaaguacuucagcggcgccauggacacgaccuccuaccgggaggccgcgugcugccaccuggccaaggcccucaacgacuucagcaacuccggcagcgacgugcuguaccagccgccccagaccuccaucaccagcgccguccugcaguga

SEQ ID NO: 18327 - RNA, 1506 nt, Artificial Sequence
  SARS-CoV-2__MT831695.1__non-structural protein 4 (NSP4) CDS gc
augaagaucgugaacaacuggcugaagcagcucaucaaggucacccugguguuccuguucguggccgccaucuucuaccucaucacccccguccacgugaugagcaagcacacggacuucuccagcgagaucaucggcuacaaggcgaucgacgggggcgugacccgcgacaucgccuccaccgacacgugcuucgccaacaagcacgccgacuucgacaccugguucagccagcggggcggcuccuacaccaacgacaaggccugcccccugaucgcggccgucaucacccgcgaggugggguucgugguccccggccugcccggcaccauccuccggacgaccaacggggacuuccugcacuuccugccccgcguguucagcgccgugggcaacaucugcuacaccccguccaagcucaucgaguacaccgacuucgccacgagcgcgugcguccuggccgccgagugcaccaucuucaaggacgccuccgggaagcccgugcccuacugcuacgacaccaacgugcuggagggcagcgucgccuacgagucccuccggcccgacacccgcuacgugcugauggacgggagcaucauccaguucccgaacacguaccuggagggcuccgugcgggucgugaccaccuucgacagcgaguacugccgccacgggaccugcgagcgguccgaggcgggggugugcgucagcacguccggccgcugggugcucaacaacgacuacuaccggagccugcccgggguguucugcggcgucgacgccgugaaccugcucaccaacauguucacgccccugauccagcccaucggcgcccuggacaucuccgccagcaucgucgccgggggcaucguggcgaucguggugaccugcuucgccuacuacuucaugcgcuuccggcgcgccuucggggaguacagccacgucguggccuucaacacccuccuguuccugauguccuucaccguccucugccugaccccgguguacagcuuccugcccggcguguacuccgucaucuaccucuaccugaccuucuaccugacgaacgacgugagcuuccucgcccacauccaguggauggugauguucacgccccugguccccuucuggaucaccaucgcguacaucaucugcaucuccaccaagcacuucuacugguucuucagcaacuaccugaagcggcgcgugguguucaacggggucuccuucagcaccuucgaggaggccgcccucugcaccuuccugcugaacaaggagauguaccucaagcugcgguccgacgugcugcucccgcugacccaguacaaccgcuaccuggcccucuacaacaaguacaaguacuucagcggcgccauggacaccacguccuaccgggaggcggccugcugccaccuggccaaggcccugaacgacuucagcaacuccggcagcgacgugcucuaccagccgccccagaccuccaucaccagcgcgguccugcaguga

SEQ ID NO: 18328 - RNA, 1506 nt, Artificial Sequence
  SARS-CoV-2__MT831697.1__non-structural protein 4 (NSP4) CDS gc
augaagaucgugaacaacuggcugaagcagcucaucaaggucacccugguguuccuguucguggccgccaucuucuaccucaucacccccguccacgugaugagcaagcacacggacuucuccagcgagaucaucggcuacaaggcgaucgacgggggcgugacccgcgacaucgccuccaccgacacgugcuucgccaacaagcacgccgacuucgacaccugguucagccagcggggcggcuccuacaccaacgacaaggccugcccccugaucgcggccgucaucacccgcgaggugggguucgugguccccggccugcccggcaccauccuccggacgaccaacggggacuuccugcacuuccugccccgcguguucagcgccgugggcaacaucugcuacaccccguccaagcucaucgaguacaccgacuucgccacgagcgcgugcguccuggccgccgagugcaccaucuucaaggacgccuccgggaagcccgugcccuacugcuacgacaccaacgugcuggagggcagcgucgccuacgagucccuccggcccgacacccgcuacgugcugauggacgggagcaucauccaguucccgaacacguaccuggagggcuccgugcgggucgugaccaucuucgacagcgaguacugccgccacgggaccugcgagcgguccgaggcgggggugugcgucagcaccuccggccgcugggugcucaacaacgacuacuaccggagccugcccgggguguucugcggcgucgacgccgugaaccugcucacgaacauguucacgccccugauccagcccaucggcgcccuggacaucuccgccagcaucgucgccgggggcaucguggcgaucguggugaccugccucgccuacuacuucaugcgcuuccggcgcgccuucggggaguacagccacgucguggccuucaacacccugcuguuccucauguccuucaccguccugugccugaccccgguguacagcuuccuccccggcguguacuccgucaucuaccuguaccugaccuucuaccucaccaacgacgugagcuuccuggcccacauccaguggauggugauguucacgccccugguccccuucuggaucaccaucgcguacaucaucugcaucuccaccaagcacuucuacugguucuucagcaacuaccucaagcggcgcgugguguucaacggggucuccuucagcaccuucgaggaggccgcccugugcacguuccugcucaacaaggagauguaccugaagcugcgguccgacgugcuccugccgcugacccaguacaaccgcuaccucgcccuguacaacaaguacaaguacuucagcggcgccauggacaccaccuccuaccgggaggcggccugcugccaccuggccaaggcccucaacgacuucagcaacuccggcagcgacgugcuguaccagccgccccagacguccaucaccagcgcgguccugcaguga

SEQ ID NO: 18329 - RNA, 1506 nt, Artificial Sequence
  SARS-CoV-2__MT831724.1__non-structural protein 4 (NSP4) CDS gc
augaagaucgugaacaacuggcugaagcagcucaucaaggucacccugguguuccuguucguggccgccaucuucuaccucaucacccccguccacgugaugagcaagcacacggacuucuccagcgagaucaucggcuacaaggcgaucgacgggggcgugacccgcgacaucgccuccaccgacacgugcuucgccaacaagcacgccgacuucgacaccugguucagccagcggggcggcuccuacaccaacgacaaggccugcccccugaucgcggccgucaucacccgcgaggugggguucgugguccccggccugcccggcaccauccuccggacgaccaacggggacuuccugcacuuccugccccgcguguucagcgccgugggcaacaucugcuacaccccguccaagcucaucgaguacaccgacuucgccacgagcgcgugcguccuggccgccgagugcaccaucuucaaggacgccuccgggaagcccgugcccuacugcuacgacaccaacgugcuggagggcagcgucgccuacgagucccuccggcccgacacccgcuacgugcugauggacgggagcaucauccaguucccgaacacguaccuggagggcuccgugcgggucgugaccaccuucgacagcgaguacugccgccacgggaccugcgagcgguccgaggcgggggugugcgucagcacguccggccgcugggugcucaacaacgacuacuaccggagccugcccgggguguucugcggcgucgacgccgugaaccugcucaccaacauguucacgccccugauccagcccaucggcgcccuggacaucuccgccagcaucgucgccgggggcaucguggcgaucguggugaccugccucgccuacuacuucaugcgcuuccggcgcgccuucugcgaguacagccacgucguggccuucaacacccugcuguuccucauguccuucaccguccugugccugaccccgguguacagcuuccuccccgggguguacuccgucaucuaccuguaccugaccuucuaccucacgaacgacgugagcuuccuggcccacauccaguggauggugauguucacgccccugguccccuucuggaucaccaucgcguacaucaucugcaucuccaccaagcacuucuacugguucuucagcaacuaccucaagcggcgcgugguguucaacggcgucuccuucagcaccuucgaggaggccgcccugugcaccuuccugcucaacaaggagauguaccugaagcugcgguccgacgugcuccugccgcugacccaguacaaccgcuaccucgcccuguacaacaaguacaaguacuucagcggggccauggacaccacguccuaccgggaggcggccugcugccaccuggccaaggcccucaacgacuucagcaacuccggcagcgacgugcuguaccagccgccccagaccuccaucaccagcgcgguccugcaguga

SEQ ID NO: 18330 - RNA, 1506 nt, Artificial Sequence
  SARS-CoV-2__MT831729.1__non-structural protein 4 (NSP4) CDS gc
augaagaucgugaacaacuggcugaagcagcucaucaaggucacccugguguuccuguucguggccgccaucuucuaccucaucacccccguccacgugaugagcaagcacacggacuucuccagcgagaucaucggcuacaaggcgaucgacgggggcgugacccgcgacaucgccuccaccgacacgugcuucgccaacaagcacgccgacuucgacaccugguucagccagcggggcggcuccuacaccaacgacaaggccugcccccugaucgcggccgucaucacccgcgaggugggguucgugguccccggccugcccggcaccauccuccggacgaccaacggggacuuccugcacuuccugccccgcguguucagcgccgugggcaacaucugcuacaccccguccaagcucaucgaguacaccgacuucgccacgagcgcgugcguccuggccgccgagugcaccaucuucaaggacgccuccgggaagcccgugcccuacugcuacgacaccaacgugcuggagggcagcgucgccuacgagucccuccggcccgacacccgcuacgugcugauggacgggagcaucauccaguucccgaacacguaccuggagggcuccgugcgggucgugaccaccuucgacagcgaguacugccgccacgggaccugcgagcgguccgaggcgggggugugcgucagcacguccggccgcugggugcucaacaacgacuacuaccggagccugcccgggguguucugcggcgucgacgccgugaaccugcucaccaacauguucacgccccugauccagcccaucggcgcccuggacaucuccgccagcaucgucgccgggggcaucguggcgaucguggugaccugccucgccuacuacuucaugcgcuuccggcgcgccuucggggaguacagccacgucguggccuucaacacccugcuguuccucauguccuucaccguccugugccugaccccgguguacagcuuccuccccggcguguacuccgucaucuaccuguaccugaccuucuaccucacgaacgacgugagcuuccuggcccacauccaguggaugguggucuucacgccccuggugcccuucuggaucaccaucgcguacaucaucugcaucuccaccaagcacuucuacugguucuucagcaacuaccucaagcggcgcguggucuucaacgggguguccuucagcaccuucgaggaggccgcccugugcaccuuccugcucaacaaggagauguaccugaagcugcgguccgacgugcuccugccgcugacccaguacaaccgcuaccucgcccuguacaacaaguacaaguacuucagcggcgccauggacaccacguccuaccgggaggcggccugcugccaccuggccaaggcccucaacgacuucagcaacuccggcagcgacguccuguaccagccgccccagaccuccaucaccagcgcggugcugcaguga

SEQ ID NO: 18331 - RNA, 1506 nt, Artificial Sequence
  SARS-CoV-2__MT831811.1__non-structural protein 4 (NSP4) CDS gc
augaagaucgugaacaacuggcugaagcagcucaucaaggucacccugguguuccuguucguggccgccaucuucuaccucaucacccccguccacgugaugagcaagcacacggacuucuccagcgagaucaucggcuacaaggcgaucgacgggggcgugacccgcgacaucgccuccaccgacacgugcuucgccaacaagcacgccgacuucgacaccugguucagccagcggggcggcuccuacaccaacgacaaggccugcccccugaucgcggccgucaucacccgcgaggugggguucgugguccccggccugcccggcaccauccuccggacgaccaacggggacuuccugcacuuccugccccgcguguucagcgccgugggcaacaucugcuacaccccguccaagcucaucgaguacaccgacuucgccacgagcgcgugcguccuggccgccgagugcaccaucuucaaggacgccuccgggaagcccgugcccuacugcuacgacaccaacgugcuggagggcagcgucgccuacgagucccuccggcccgacacccgcuacgugcugauggacgggagcaucauccaguucccgaacacguaccuggagggcuccgugcgggucgugaccaccuucgacagcgaguacugccgccacgggaccugcgagcgguccgaggcgggggugugcgucagcacguccggccgcugggugcucaacaacgacuacuaccggagccugcccgggguguucugcggcgucgacgccgugaaccugcucaccaacauguucacgccccugauccagcccaucggcgcccuggacaucuccgccagcaucgucgccgggggcaucguggcgaucguggugaccugccucgccuacuacuucaugcgcuuccggcgcgccuucggggaguacagccacgucguggccuucaacacccugcuguuccucauguccuucaccguccugugccugaccccgguguacagcuuccuccccggcguguacuccgucaucuaccuguaccugaccuucuaccucacgaacgacgugagcuuccuggcccacauccaguggauggugauguucacgccccugguccccuucuggaucaccaucgcguacaucaucugcaucuccaccaagcacuucuacugguucuucagcaacugccucaagcggcgcgugguguucaacggggucuccuucagcaccuucgaggaggccgcccugugcaccuuccugcucaacaaggagauguaccugaagcugcgguccgacgugcuccugccgcugacccaguacaaccgcuaccucgcccuguacaacaaguacaaguacuucagcggcgccauggacaccacguccuaccgggaggcggccugcugccaccuggccaaggcccucaacgacuucagcaacuccggcagcgacgugcuguaccagccgccccagaccuccaucaccagcgcgguccugcaguga

SEQ ID NO: 18332 - RNA, 1506 nt, Artificial Sequence
  SARS-CoV-2__MT834038.1__non-structural protein 4 (NSP4) CDS gc
augaagaucgugaacaacuggcugaagcagcucaucaaggucacccugguguuccuguucguggccgccaucuucuaccucaucacccccguccacgugaugagcaagcacacggacuucuccagcgagaucaucggcuacaaggcgaucgacgggggcgugacccgcgacaucgccuccaccgacacgugcuucgccaacaagcacgccgacuucgacaccugguucagccagcggggcggcuccuacaccaacgacaaggccugcccccugaucgcggccgucaucacccgcgaggugggguucgugguccccggccugcccggcaccauccuccggacgaccaacggggacuuccugcacuuccugccccgcguguucagcgccgugggcaacaucugcuacaccccguccaagcucaucgaguacaccgacuucgccacgagcgcgugcguccuggccgccgagugcaccaucuucaaggacgccuccgggaagcccgugcccuacugcuacgacaccaacgugcuggagggcagcgucgccuacgagucccuccggcccgacacccgcuacgugcugauggacgggagcaucauccaguucccgaacacguaccuggagggcuccgugcgggucgugaccaccuucgacagcgaguacugccgccacgggaccugcgagcgguccgaggcgggggugugcgucagcacguccggccgcugggugcucaacaacgacuacuaccggagccugcccgggguguucugcggcgucgacgccgugaaccugcucaccaacauguucacgccccugauccagcccaucggcgcccuggacaucuccgccagcaucgucgccgggggcaucguggcgaucguggugaccugccucgccuacuacuucaugcgcuuccggcgcgccuucggggaguacagccacgucguggccuucaacacccugcuguuccucauguccuucaccguccugugccugaccccgguguacagcuuccuccccggcguguacuccgucaucuaccuguaccugaccuucuaccucacgaacgacgugagcuuccuggcccacauccaguggauggugauguucacgccccugguccccuucuggaucaccaucgcguacaucaucugcaucuccaccaagcacuucuacugguucuucagcaacuaccucaagcggcgcgugguguucaacggggucuccuucagcaccuucgaggaggccgcccugugcaccuuccugcucaacaaggagauguaccugaagcugcgguccgacgugcuccugccgcugacccaguacaaccgcuaccucgcccuguacaacaaguacaaguacuucagcggcgccauggacaccacguccuaccgggaggcggccugcugccaccuggccaaggcccucaacgacuucagcaaccugggcuccgacgugcuguaccagccgccccagaccagcaucaccuccgcgguccugcaguga

SEQ ID NO: 18333 - RNA, 1506 nt, Artificial Sequence
  SARS-CoV-2__MT834636.1__non-structural protein 4 (NSP4) CDS gc
augaagaucgugaacaacuggcugaagcagcucaucaaggucacccugguguuccuguucguggccgccaucuucuaccucaucacccccguccacgugaugagcaagcacacggacuucuccagcgagaucaucggcuacaaggcgaucgacgggggcgugacccgcgacaucgccuccaccgacacgugcuucgccaacaagcacgccgacuucgacaccugguucagccagcggggcggcuccuacaccaacgacaaggccugcccccugaucgcggccgucaucacccgcgaggugggguucgugguccccggccugcccggcaccauccuccggacgaccaacggggacuuccugcacuuccugccccgcguguucagcgccgugggcaacaucugcuacaccccguccaagcucaucgaguacaccgacuucgccacgagcgcgugcguccuggccgccgagugcaccaucuucaaggacgccuccgggaagcccgugcccuacugcuacgacaccaacgugcuggagggcagcgucgccuacgagucccuccggcccgacacccgcuacgugcugauggacgggagcaucauccaguucccgaacacguaccuggagggcuccgugcgggucgugaccaccuucgacagcgaguacugccgccacgggaccugcgagcgguccgaggcgggggugugcgucagcacguccggccgcugggugcucaacaacgacuacuaccggagccugcccgggguguucugcggcgucgacgccgugaaccugcucaccaacauguucacgccccugauccagcccaucggcgcccuggacaucuccgccagcaucgucgccgggggcaucguggcgaucguggugaccugccucgccuacuacuucaugcgcuuccggcgcgccuucggggaguacagccacgucguggccuucaacacccugcuguuccucauguccuucaccguccugugccugaccccgguguacagcuuccuccccggcguguacuccgucaucuaccuguaccugaccuucuaccucacgaacgacgugagcuuccuggcccacauccaguggauggugauguucacgccccugguccccuucuggaucaccaucgcguacaucaucugcaucuccaccaagcacuucuacugguucuucagcaacuaccucaagcggcgcgugguguucaacggggucuccuucagcaccuucgaggaggccgcccugugcaccuuccugcucaacaaggagauguaccugaagcugcgguccgacgugcuccugccgcugacccaguacaaccgcuaccucgcccuguacaacaaguacaaguacuucagcggcgugauggacaccacguccuaccgggaggccgcgugcugccaccuggccaaggcccucaacgacuucagcaacuccggcagcgacguccuguaccagccgccccagaccuccaucaccagcgccgugcugcaguga

SEQ ID NO: 18334 - RNA, 1506 nt, Artificial Sequence
  SARS-CoV-2__MT827203.1__non-structural protein 4 (NSP4) CDS gc
augaagaucgugaacaacuggcugaagcagcucaucaaggucacccugguguuccuguucguggccgccaucuucuaccucaucacccccguccacgugaugagcaagcacacggacuucuccagcgagaucaucggcuacaaggcgaucgacgggggcgugacccgcgacaucgccuccaccgacacgugcuucgccaacaagcacgccgacuucgacaccugguucagccagcggggcggcuccuacaccaacgacaaggccugcccccugaucgcggccgucaucacccgcgaggugggguucgugguccccggccugcccggcaccauccuccggacgaccaacggggacuuccugcacuuccugccccgcguguucagcgccgugggcaacaucugcuacaccccguccaagcucaucgaguacaccgacuucgccacgagcgcgugcguccuggccgccgagugcaccaucuucaaggacgccuccgggaagcccgugcccuacugcuacgacaccaacgugcuggagggcagcgucgccuacgagucccuccggcccgacacccgcuacgugcugauggacgggagcaucauccaguucccgaacacguaccuggagggcuccgugcgggucgugaccaccuucgacagcgaguacugccgccacgggaccugcgagcgguccgaggugggggucugcgugagcacguccggccgcugggugcucaacaacgacuacuaccggagccugcccggggucuucugcggcguggacgcggucaaccugcucaccaacauguucacgccccugauccagcccaucggcgcccuggacaucuccgccagcaucguggccgggggcaucguggccaucgucgugaccugccucgcguacuacuucaugcgcuuccggcgcgccuucggggaguacagccacguggucgccuucaacacccugcuguuccucauguccuucaccgugcugugccugaccccgguguacagcuuccuccccggcgucuacuccgugaucuaccuguaccugaccuucuaccucacgaacgacgugagcuuccuggcccacauccaguggauggucauguucacgccccuggugcccuucuggaucaccaucgccuacaucaucugcaucuccaccaagcacuucuacugguucuucagcaacuaccucaagcggcgcguggucuucaacgggguguccuucagcaccuucgaggaggcggcccugugcaccuuccugcucaacaaggagauguaccugaagcugcgguccgacgugcuccugccgcugacccaguacaaccgcuaccucgcccuguacaacaaguacaaguacuucagcggcgccauggacaccacguccuaccgggaggccgcgugcugccaccuggccaaggcccucaacgacuucagcaacuccggcagcgacguccuguaccagccgccccagaccuccaucaccagcgccgugcugcaguga

SEQ ID NO: 18335 - RNA, 1506 nt, Artificial Sequence
  SARS-CoV-2__MT825091.1__non-structural protein 4 (NSP4) CDS gc
augaagaucgugaacaacuggcugaagcagcucaucaaggucacccugguguuccuguucguggccgccaucuucuaccucaucacccccguccacgugaugagcaagcacacggacuucuccagcgagaucaucggcuacaaggacaucgacgggggcgugacccgcgacaucgcguccaccgacacgugcuucgccaacaagcacgccgacuucgacaucugguucagccagcggggcggcuccuacaccaacgacaaggccugcccccugaucgccgcggucaucacccgcgaggugggguucgugguccccggccugcccggcaccauccuccggaccacgaacggggacuuccugcacuuccugccccgcguguucagcgccgugggcaacaucugcuacaccccguccaagcucaucgaguacaccgacuucgccaccagcgccugcguccuggcggccgagugcacgaucuucaaggacgccuccgggaagcccgugcaguacugcuacgacaccaacgugcaggagggcagcgucgccuacgagucccugcggcccgacacccgcuacgugcucauggacgggagcaucauccaguuccccaacaccuaccuggagggcuccgugcgggucgugacgaccuucgacagcgaguacugccgccacgggaccugcgagcgguccgaggccggggugugcgucagcaccuccggccgcugggugccgaacaacgacuacuaccggagccugcccgggguguucugcggcgucgacgcggugaaccuccugacgaacauguucacgccccugauccagcucaucggcgcccuggacaucuccgccagcaucgucgccgggggcaucguggccaucguggugaccugccuggcguacuacuucaugcgcuuccggcgcgccuucggggaguacagccacgucguggccuucaacacccuccccuuccugauguccuucaccguccacugccugaccccgguguacagcuuccuccccggcguguacuccgucaucuaccuguaccugaccuucuaccucaccaacgacgugagcuuccuggcccacauccaguggauggugauguucacgccccugguccccuucuggaucaccaucgccuacaucaucugcaucuccaccaagcacuucuacugguucuucagcaacuaccucaagcggcgcgugguguucaacggggucuccuucagcaccuucgaggaggcggcccugugcacguuccugcucaacaaggagauguaccugaagcugcgguccgacgugcuccugccgcugacccaguacaaccgcuaccucgcccuguacaacaaguacaaguacuucagcggcgccauggacaccaccuccuaccgggaggccgcgugcugccaccuggccaaggcccucaacgacuucagcaacuccggcagcgacgugcuguaccugccgccccagacguccaucaccagcgccguccuccaguga

SEQ ID NO: 18336 - RNA, 1506 nt, Artificial Sequence
  SARS-CoV-2__MT821553.1__non-structural protein 4 (NSP4) CDS gc
augaagaucgugaacaacuggcugaagcagcucaucaaggucacccugguguuccuguucguggccgccaucuucuaccucaucacccccguccacgugaugagcaagcacacggacuucuccagcgagaucaucggcuacaaggcgaucgacgggggcgugacccgcgacaucgccuccaccgacacgugcuucgccaacaagcacgccgacuucgacaccugguucagccagcggggcggcuccuacaccaacgacaaggccugcccgcugaucgcggccgucaucacccgcgaggugggguucgugguccccggccugcccggcaccauccuccggacgaccaacggggacuuccugcacuuccugccccgcguguucagcgccgugggcaacaucugcuacaccccguccaagcucaucgaguacaccgacuucgccacgagcgcgugcguccuggccgccgagugcaccaucuucaaggacgccuccgggaagcccgugcccuacugcuacgacaccaacgugcuggagggcagcgucgccuacgagucccuccggcccgacacccgcuacgugcugauggacgggagcaucauccaguucccgaacacguaccuggagggcuccgugcgggucgugaccaccuucgacagcgaguacugccgccacgggaccugcgagcgguccgaggcgggggugugcgucagcacguccggccgcugggugcucaacaacgacuacuaccggagccugcccgggguguucugcggcgucgacgccgugaaccugcucaccaacauguucacgccccugauccagcccaucggcgcccuggacaucuccgccagcaucgucgccgggggcaucguggcgaucguggugaccugccucgccuacuacuucaugcgcuuccggcgcgccuucggggaguacagccacgucguggccuucaacacccugcuguuccucauguccuucaccguccugugccugaccccgguguacagcuuccuccccggcguguacuccgucaucuaccuguaccugaccuucuaccucacgaacgacgugagcuuccuggcccacauccaguggauggugauguucacgccccugguccccuucuggaucaccaucgcguacaucaucugcaucuccaccaagcacuucuacugguucuucagcaacuaccucaagcggcgcgugguguucaacggggucuccuucagcaccuucgaggaggccgcccugugcaccuuccugcucaacaaggagauguaccugaagcugcgguccgacgugcuccugagccugacccaguacaaccgcuaccucgcccuguacaacaaguacaaguacuucuccggcgccauggacaccacgagcuaccgggaggcggccugcugccaccuggccaaggcccucaacgacuucuccaacagcggcuccgacgugcuguaccagccgccccagaccagcaucaccuccgcgguccugcaguga

SEQ ID NO: 18337 - RNA, 1506 nt, Artificial Sequence
  SARS-CoV-2__MT821707.1__non-structural protein 4 (NSP4) CDS gc
augaagaucgugaacaacuggcugaagcagcucaucaaggucacccugguguuccuguucguggccgccaucuucuaccucaucacccccguccacgugaugagcaagcacacggacuucuccagcgagaucaucggcuacaaggcgaucgacgggggcgugacccgcgacaucgccuccaccgacacgugcuucgccaacaagcacgccgacuucgacaccugguucagccagcggggcggcuccuacaucaacgacaaggccugcccccugaucgcggccgucaucacccgcgaggugggguucgugguccccggccugcccggcaccauccuccggaccacgaacggggacuuccugcacuuccugccccgcguguucagcgccgugggcaacaucugcuacaccccguccaagcucaucgaguacaccgacuucgccaccagcgcgugcguccuggccgccgagugcacgaucuucaaggacgccuccgggaagcccgugcccuacugcuacgacaccaacgugcuggagggcagcgucgccuacgagucccuccggcccgacacccgcuacgugcugauggacgggagcaucauccaguucccgaacaccuaccuggagggcuccgugcgggucgugacgaccuucgacagcgaguacugccgccacgggaccugcgagcgguccgaggcgggggugugcgucagcaccuccggccgcugggugcucaacaacgacuacuaccggagccugcccgggguguucugcggcgucgacgccgugaaccugcucacgaacauguucacgccccugauccagcccaucggcgcccuggacaucuccgccagcaucgucgccgggggcaucguggcgaucguggugaccugccucgccuacuacuucaugcgcuuccggcgcgccuucggggaguacagccacgucguggccuucaacacccugcuguuccucauguccuucaccguccugugccugaccccgguguacagcuuccuccccggcguguacuccgucaucuaccuguaccugaccuucuaccucaccaacgacgugagcuuccuggcccacauccaguggauggugauguucacgccccugguccccuucuggaucaccaucgcguacaucaucugcaucuccaccaagcacuucuacugguucuucagcaacuaccucaagcggcgcgugguguucaacggggucuccuucagcaccuucgaggaggccgcccugugcacguuccugcucaacaaggagauguaccugaagcugcgguccgacgugcuccugccgcugacccaguacaaccgcuaccucgcccuguacaacaaguacaaguacuucagcggcgccauggacaccaccuccuaccgggaggcggccugcugccaccuggccaaggcccucaacgacuucagcaacuccggcagcgacgugcuguaccagccgccccagacguccaucaccagcgcgguccugcaguga

SEQ ID NO: 18338 - RNA, 1506 nt, Artificial Sequence
  SARS-CoV-2__MT820132.1__non-structural protein 4 (NSP4) CDS gc
augaagaucgugaacaacuggcugaagcagcucaucaaggucacccugguguuccuguucguggccgccaucuucuaccucaucacccccguccacgugaugagcaagcacacggacuucuccagcgagaucaucggcuacaaggcgaucgacgggggcgugacccgcgacaucgccuccaccgacacgugcuucgccaacaagcacgccgacuucgacaccugguucagccagcggggcggcuccuacaccaacgacaaggccugcccccugaucgcggccgucaucacccgcgaggugggguucgugguccccggccugcccggcaccauccuccggacgaccaacggggacuuccugcacuuccugccccgcguguucagcgccgugggcaacaucugcuacaccccguccaagcucaucgaguacaccgacuucgccacgagcgcgugcguccuggccgccgagugcaccaucuucaaggacgccuccgggaagcccgugcccuacugcuacgacaccaacgugcuggagggcagcgucgccuacgagucccuccggcccgacacccgcuacgugcugauggacgggagcaucauccaguucccgaacacguaccuggagggcuccgugcgggucgugaccaccuucgacagcgaguacugccgccacgggaccugcgagcgguccgaggcgggggugugcgucagcacguccggccgcugggugcucaacaacgacuacuaccggagccugcccgggguguucugcggcgucgacgccgugaaccugcucaccaacauguucacgccccugauccagcccaucggcgcccuggacaucuccgccagcaucgucgccgggggcaucguggcgaucguggugaccugccucgccuacuacuucaugcgcuuccggcgcgccuucggggaguacagccacgucguggccuucaacacccugcuguuccucauguccuucaccguccugugccugaccccgguguacagcuuccuccccggcguguacuccgucaucuaccuguaccugaccuucuaccucacgaacgacgugagcuuccuggcccacauccaguggauggugauguucacgccccugguccccuucuggaucaccaucgcguacaucaucugcaucuccaccaagcacuucuacugguucuucagcaacuaccucaagcggcgcgugguguucaacggggucuccuucagcaccuucgaggaggccgcccugugcaccuuccugcucaacaaggagauguaccugaagcugcgguccgacgugcucccgcugacccaguacaaccgcuaccuggcccucuacaacaaguacaaguacuucagcggcgccauggacaccacguccuaccgggaggcggccugcugccaccuggccaaggcccugaacgacuucagcaacuccggcagcgacgugcucuaccagccgccccagaccuccaucaccagcgcgguccugcaguccuga

SEQ ID NO: 18339 - RNA, 1506 nt, Artificial Sequence
  SARS-CoV-2__MT810483.1__non-structural protein 4 (NSP4) CDS gc
augaagaucgugaacaacuggcugaagcagcucaucaaggucacccugguguuccuguucguggccgccaucuucuaccucaucacccccguccacgugaucagcaagcacacggacuucuccagcgagaucaucggcuacaaggcgaucgacgggggcgugacccgcgacaucgccuccaccgacacgugcuucgccaacaagcacgccgacuucgacaccugguucagccagcggggcggcuccuacaccaacgacaaggccugcccccugaucgcggccgucaucacccgcgaggugggguucgugguccccggccugcccggcaccauccuccggacgaccaacggggacuuccugcacuuccugccccgcguguucagcgccgugggcaacaucugcuacaccccguccaagcucaucgaguacaccgacuucgccacgagcgcgugcguccuggccgccgagugcaccaucuucaaggacgccuccgggaagcccgugcccuacugcuacgacaccaacgugcuggagggcagcgucgccuacgagucccuccggcccgacacccgcuacgugcugauggacgggagcaucauccaguucccgaacacguaccuggagggcuccgugcgggucgugaccaccuucgacagcgaguacugccgccacgggaccugcgagcgguccgaggcgggggugugcgucagcacguccggccgcugggugcucaacaacgacuacuaccggagccugcccgggguguucugcggcgucgacgccgugaaccugcucaccaacauguucacgccccugauccagcccaucggcgcccuggacaucuccgccagcaucgucgccgggggcaucguggcgaucguggugaccugccucgccuacuacuucaugcgcuuccggcgcgccuucggggaguacagccacgucguggccuucaacacccugcuguuccucauguccuucaccguccugugccugaccccgguguacagcuuccuccccggcguguacuccgucaucuaccuguaccugaccuucuaccucacgaacgacgugagcuuccuggcccacauccaguggauggugauguucacgccccugguccccuucuggaucaccaucgcguacaucaucugcaucuccaccaagcacuucuacugguucuucagcaacuaccucaagcggcgcgugguguucaacggggucuccuucagcaccuucgaggaggccgcccugugcaccuuccugcucaacaaggagauguaccugaagcugcgguccgacgugcuccugccgcugacccaguacaaccgcuaccucgcccuguacaacaaguacaaguacuucagcggcgccauggacaccacguccuaccgggaggcggccugcugccaccuggccaaggcccucaacgacuucagcaacuccggcagcgacgugcuguaccagccgccccagaccuccaucaccagcgcgguccugcaguga

SEQ ID NO: 18340 - RNA, 1506 nt, Artificial Sequence
  SARS-CoV-2__MT810494.1__non-structural protein 4 (NSP4) CDS gc
augaagaucgugaacaacuggcugaagcagcucaucaaggucacccugguguuccuguucguggccgccaucuucuaccucaucacccccguccacgugaugagcaagcacacggacuucuccagcgagaucaucggcuacaaggcgaucgacgggggcgugacccgcgacaucgccuccaccgacacgugcuucgccaacaagcacgccgacuucgacaccugguucagccagcggggcggcuccuacaccaacgacaaggccugcccccugaucgcggccgucaucacccgcgaggugggguucgugguccccggccugcccggcaccauccuccggacgaccaacggggacuuccugcacuuccugccccgcguguucagcgccgugggcaacaucugcuacaccccguccaagcucaucgaguacaccgacuucgccacgagcgcgugcguccuggccgccgagugcaccaucuucaaggacgccuccgggaagcccgugcccuacugcuacgacaccaacgugcuggagggcagcgucguguacgagucccuccggcccgacacccgcuacgugcugauggacgggagcaucauccaguucccgaacacguaccuggagggcuccguccggguggugaccaccuucgacagcgaguacugccgccacgggaccugcgagcgguccgaggccggggucugcgugagcacguccggccgcugggugcucaacaacgacuacuaccggagccugcccggggucuucugcggcguggacgcggucaaccugcucaccaacauguucacgccccugauccagcccaucggcgcccuggacaucuccgccagcaucguggccgggggcaucguggccaucgucgugaccugccucgcguacuacuucaugcgcuuccggcgcgccuucggggaguacagccacguggucgccuucaacacccugcuguuccucauguccuucaccgugcugugccugaccccgguguacagcuuccuccccggcgucuacuccgugaucuaccuguaccugaccuucuaccucacgaacgacgugagcuuccuggcccacauccaguggauggucauguucacgccccuggugcccuucuggaucaccaucgccuacaucaucugcaucuccaccaagcacuucuacugguucuucagcaacuaccucaagcggcgcguggucuucaacgggguguccuucagcaccuucgaggaggcggcccugugcaccuuccugcucaacaaggagauguaccugaagcugcgguccgacgugcuccugccgcugacccaguacaaccgcuaccucgcccuguacaacaaguacaaguacuucagcggcgccauggacaccacguccuaccgggaggccgcgugcugccaccuggccaaggcccucaacgacuucagcaacuccggcagcgacguccuguaccagccgccccagaccuccaucaccagcgccgugcugcaguga

SEQ ID NO: 18341 - RNA, 1506 nt, Artificial Sequence
  SARS-CoV-2__MT810720.1__non-structural protein 4 (NSP4) CDS gc
augaagaucgugaacaacuggcugaagcagcucaucaaggucacccugguguuccuguucguggccgccaucuucuaccucaucacccccguccacgugaugagcaagcacacggacuucuccagcgagaucaucggcuacaaggcgaucgacgggggcgugacccgcgacaucgccuccaccgacacgugcuucgccaacaagcacgccgacuucgacgccugguucagccagcggggcggcuccuacaccaacgacaaggcgugcccccugaucgccgccgucaucacccgcgaggugggguucgugguccccggccugcccggcaccauccuccggaccacgaacggggacuuccugcacuuccugccccgcguguucagcgccgugggcaacaucugcuacaccccguccaagcucaucgaguacaccgacuucgcgaccagcgccugcguccuggccgccgagugcacgaucuucaaggacgccuccgggaagcccgugcccuacugcuacgacaccaacgugcuggagggcagcgucgcguacgagucccuccggcccgacacccgcuacgugcugauggacgggagcaucauccaguucccgaacaccuaccuggagggcuccgugcgggucgugacgaccuucgacagcgaguacugccgccacgggaccugcgagcgguccgaggccggggugugcgucagcaccuccggccgcugggugcucaacaacgacuacuaccggagccugcccgggguguucugcggcgucgacgccgugaaccugcucacgaacauguucacgccccugauccagcccaucggcgcccuggacaucuccgccagcaucgucgccgggggcaucguggcgaucguggugaccugccucgccuacuacuucaugcgcuuccggcgcgccuucggggaguacagccacgucguggccuucaacacccugcuguuccucauguccuucaccguccugugccugaccccgguguacagcuuccuccccggcguguacuccgucaucuaccuguaccugaccuucuaccucaccaacgacgugagcuuccuggcgcacauccaguggauggugauguucacgccccugguccccuucuggaucaccaucgccuacaucaucugcaucuccaccaagcacuucuacugguucuucagcaacuaccucaagcggcgcgugguguucaacggggucuccuucagcaccuucgaggaggccgcccugugcacguuccugcucaacaaggagauguaccugaagcugcgguccgacgugcuccugccgcugacccaguacaaccgcuaccucgcccuguacaacaaguacaaguacuucagcggcgcgauggacaccaccuccuaccgggaggccgccugcugccaccuggccaaggcgcucaacgacuucagcaacuccggcagcgacgugcuguaccagccgccccagacguccaucaccagcgccguccugcaguga

SEQ ID NO: 18342 - RNA, 1506 nt, Artificial Sequence
  SARS-CoV-2__MT810758.1__non-structural protein 4 (NSP4) CDS gc
augaagaucgugaacaacuggcugaagcagcucaucaaggucacccugguguuccuguucguggccgccaucuucuaccucaucacccccguccacgugaugagcaagcacacggacuucuccagcgagaucaucggcuacaaggcgaucgacgggggcgugacccgcgacaucgccuccaccgacacgugcuucgccaacaagcacgccgacuucgacaccugguucagccagcggggcggcuccuacaccaacgacaaggccugcccccugaucgcggccgucaucacccgcgaggugggguucgugguccccggccugcccggcaccauccuccggacgaccaacggggacuuccugcacuuccugccccgcguguucagcgccgugggcaacaucugcuacaccccguccaagcucaucgaguacaccgacuucgccacgagcgcgugcguccuggccgccgagugcaccaucuucaaggacgccuccgggaagcccgugcccuacugcuacgacaccaacgugcuggagggcagcgucgccuacgagucccuccggcccgacacccgcuacgugcugauggacgggagcaucauccaguucccgaacacguaccuggagggcuccgugcgggucgugaccaccuucgacagcgaguacugccgccacgggaccugcgagcgguccgaggcgggggugugcgucagcacguccggccgcugggugcucaacaacgacuacuaccggagccugcccgggguguucugcggcgucgacgccgugaaccugcucaccaacauguucacgccccugauccagcccaucggcgcccuggacaucuccgccagcaucgucgccgggggcaucguggcgaucguggugaccugccucgccuacuacuucaugcgcuuccggcgcgccuucggggaguacagccacgucguggccuucaacacccugcuguuccucauguccuucaccguccugugccugaccccgguguacagcuuccuccccggcguguacuccgucaucuaccuguaccugaccuucuaccucacgaacgacgugagcuuccuggcccacauccaguggauggugauguucacgccccugguccccuucuggaucaccaucgcguacaucaucugcaucuccaccaagaacuucuacugguucuucagcaacuaccucaagcggcgcgugguguucaacggggucuccuucagcaccuucgaggaggccgcccugugcaccuuccugcucaacaaggagauguaccugaagcugcgguccgacgugcuccugccgcugacccaguacaaccgcuaccucgcccuguacaacaaguacaaguacuucagcggcgccauggacaccacguccuaccgggaggcggccugcugccaccuggccaaggcccucaacgacuucagcaacuccggcagcgacgugcuguaccagccgccccagaccuccaucaccagcgcgguccugcaguga

SEQ ID NO: 18343 - RNA, 1506 nt, Artificial Sequence
  SARS-CoV-2__MT810765.1__non-structural protein 4 (NSP4) CDS gc
augaagaucgugaacaacuggcugaagcagcucaucaaggucacccugguguuccuguucguggccgccaucuucuaccucaucacccccguccacgugauguucaagcacacggacuucagcuccgagaucaucggcuacaaggcgaucgacgggggcgugacccgcgacaucgccagcaccgacacgugcuucgccaacaagcacgccgacuucgacaccugguucucccagcggggcggcagcuacaccaacgacaaggccugcccccugaucgcggccgucaucacccgcgaggugggguucgugguccccggccugcccggcaccauccuccggacgaccaacggggacuuccugcacuuccugccccgcguguucuccgccgugggcaacaucugcuacaccccgagcaagcucaucgaguacaccgacuucgccacguccgcgugcguccuggccgccgagugcaccaucuucaaggacgccagcgggaagcccgugcccuacugcuacgacaccaacgugcuggagggcuccgucgccuacgagagccuccggcccgacacccgcuacgugcugauggacggguccaucauccaguucccgaacacguaccuggagggcagcgugcgggucgugaccaccuucgacuccgaguacugccgccacgggaccugcgagcggagcgaggcgggggugugcgucuccacgagcggccgcugggugcucaacaacgacuacuaccggucccugcccgggguguucugcggcgucgacgccgugaaccugcucaccaacauguucacgccccugauccagcccaucggcgcccuggacaucagcgccuccaucgucgccgggggcaucguggcgaucguggugaccugccucgccuacuacuucaugcgcuuccggcgcgccuucggggaguacagccacgucguggccuucaacacccugcuguuccucaugagcuucaccguccugugccugaccccgguguacuccuuccuccccggcguguacagcgucaucuaccuguaccugaccuucuaccucacgaacgacguguccuuccuggcccacauccaguggauggugauguucacgccccugguccccuucuggaucaccaucgcguacaucaucugcaucagcaccaagcacuucuacugguucuucuccaacuaccucaagcggcgcgugguguucaacggggucagcuucuccaccuucgaggaggccgcccugugcaccuuccugcucaacaaggagauguaccugaagcugcggagcgacgugcuccugccgcugacccaguacaaccgcuaccucgcccuguacaacaaguacaaguacuucuccggcgccauggacaccacgagcuaccgggaggcggccugcugccaccuggccaaggcccucaacgacuucuccaacagcggcuccgacgugcuguaccagccgccccagaccagcaucaccuccgcgguccugcaguga

SEQ ID NO: 18344 - RNA, 1506 nt, Artificial Sequence
  SARS-CoV-2__MT810782.1__non-structural protein 4 (NSP4) CDS gc
augaagaucgugaacaacuggcugaagcagcucaucaaggucacccugguguuccuguucguggccgccaucuucuaccucaucacccccguccacgugaugagcaagcacacggacuucuccagcgagaucaucggcuacaaggcgaucgacgggggcgugacccgcgacaucgccuccaccgacacgugcuucgccaacaagcacgccgacuucgacaccugguucagccagcgcgggggcuccuacaccaccgacaaggccugcccccugaucgcggccgucaucacccgggaggugggguucgugguccccggccugcccggcacgauccuccggaccaccaacggggacuuccugcacuuccugccccgcguguucagcgccgugggcaacaucugcuacaccccguccaagcucaucgaguacacggacuucgccaccagcgcgugcguccuggccgccgagugcaccaucuucaaggacgccuccgggaagcccgugcccuacugcuacgacaccaacgugcuggagggcagcgucgccuacgagucccuccggcccgacacgcgcuacgugcugauggacgggagcaucauccaguucccgaacaccuaccuggagggcuccgugcgggucgugaccaccuucgacagcgaguacugccgccacggcacgugcgagcgguccgaggcgggggugugcgucagcaccuccggccgcugggugcucaacaacgacuacuaccggagccugcccgggguguucugcggcgucgacgccgugaaccugcucaccaacauguucaccccgcugauccagcccaucggcgcccuggacaucuccgccagcaucgucgccgggggcaucguggcgaucguggucacgugccucgccuacuacuucaugcgcuuccggcgcgccuucggggaguacagccacgugguggccuucaacacccugcuguuccucauguccuucaccguccugugccugacccccguguacagcuuccuccccggcguguacuccgucaucuaccuguaccugacguucuaccucaccaacgacgugagcuuccuggcccacauccaguggauggugauguucacgccccugguccccuucuggaucaccaucgcguacaucaucugcaucuccaccaagcacuucuacugguucuucagcaacuaccucaagcggcgcgugguguucaacggggucuccuucagcaccuucgaggaggccgcccugugcaccuuccugcucaacaaggagauguaccugaagcugcgguccgacgugcuccugccgcugacccaguacaaccgcuaccucgcccuguacaacaaguacaaguacuucagcggcgccauggacacgaccuccuaccgggaggcggccugcugccaccuggccaaggcccucaacgacuucagcaacuccggcagcgacgugcuguaccagccgccccagaccuccaucaccagcgcgguccugcaguga

SEQ ID NO: 18345 - RNA, 1506 nt, Artificial Sequence
  SARS-CoV-2__MT810814.1__non-structural protein 4 (NSP4) CDS gc
augaagaucgugaacaacuggcugaagcagcucaucaaggucacccugguguuccuguucguggccgccaucuucuaccucaucacccccguccacgugaugagcaagcacacggacuucuccagcgagaucaucggcuacaaggcgaucgacgggggcgugacccgcgacaucgccuccaccgacacgugcuucgccaacaagcacgccgacuucgacaccugguucagccagcggggcggcuccuacaccaacgacaaggccugcccccugaucgcggccgucaucacccgcgaggugggguucgugguccccggccugcccggcaccauccuccggacgaccaacggggacuuccugcacuuccugccccgcguguucagcgccgugggcaacaucugcuacaccccguccaagcucaucgaguacaccgacuucgccacgagcgcgugcguccuggccgccgagugcaccaucuucaaggacgccuccgggaagcccgugcccuacugcuacgacaccaacgugcuggagggcagcgucgccuacgagucccuccggcccgacacccgcuacgugcugauggacgggagcaucauccaguucccgaacacguaccuggagggcuccgugcgggucgugaccaccuucgacagcgaguacugccgccacgggaccugcgagcgguccgaggcgggggugugcgucagcacguccggccgcugggugcucaacaacgacuacuaccggagccugcccgggguguucugcggcgucgacgccgugaaccugcucaccaacauguucacgccccugauccagcccaucggcgcccuggacaucuccgccagcaucgucgccgggggcaucguggcgaucguggugaccugccucgccuacuacuucaugcgcuuccggcgcgccuucggggaguacagccacgucguggccuucaacacccugcuguuccucauguccuucaccguccugugccugaccccgguguacagcuuccuccccggcguguacuccgucaucuaccuguaccugaccuucuaccucacgaacgacgugagcuuccuggcccacauccaguggauggugauguucacgccccugguccccuucuggaucaccaucgcguacaucaucugcaucuccaccaagcacuucuacugguucuucagcaacuaccucaagcggcgcgugguguucaacggggucuccuucagcaccuucgaggaggccgcccugugcaccuuccugcucaacaaggagauguaccugaagcugcgguccgacgugcuccugccgcugacccaguacaaccgcuaccucgugcuguacaacaaguacaaguacuucagcggcgccauggacaccacguccuaccgggaggccgcgugcugccaccuggccaaggcccucaacgacuucagcaacuccggcagcgacguccuguaccagccgccccagaccuccaucaccagcgccgugcugcaguga

SEQ ID NO: 18346 - RNA, 1506 nt, Artificial Sequence
  SARS-CoV-2__MT810842.1__non-structural protein 4 (NSP4) CDS gc
augaagaucgugaacaacuggcugaagcagcucaucaaggucacccugguguuccuguucguggccgccaucuucuaccucaucacccccguccacgugaugagcaagcacacggacuucuccagcgagaucaucggcuacaaggcgaucgacgggggcgugacccgcgacaucgccuccaccgacacgugcuucgccaacaagcacgccgacuucgacaccugguucagccagcgcgggggcuccuacaccaacgacaaggccugcccccugaucgcggccgucaucacccgggaggugggguucgugguccccggccugcccggcaccauccuccggacgaccaacggggacuuccugcacuuccugccccgcguguucagcgccgugggcaacaucugcuacaccccguccaagcucaucgaguacaccgacuucgccacgagcgcgugcguccuggccgccgagugcaccaucuucaaggacgccuccgggaagcccgugcccuacugcuacgacaccaacgugcuggagggcagcgucgccuacgagucccuccggcccgacacccgcuacgugcugauggacgggagcaucauccaguucccgaacacguaccuggagggcuccgugcgggucgugaccaccuucgacagcgaguacugccgccacugcacgugcgagcgguccgaggcgggcgugugcgucagcaccuccgggcgcugggugcucaacaacgacuacuaccggagccugcccggcguguucugcggggucgacgccgugaaccugcucaccaacauguucacgccccugauccagcccaucggcgcccuggacaucuccgccagcaucgucgccggcgggaucguggcgaucguggugaccugccucgccuacuacuucaugcgcuuccggcgcgccuucggcgaguacagccacgucguggccuucaacacccugcuguuccucauguccuucaccguccugugccugaccccgguguacagcuuccuccccgggguguacuccgucaucuaccuguaccugaccuucuaccucacgaacgacgugagcuuccuggcccacauccaguggauggugauguucacgccccugguccccuucuggaucaccaucgcguacaucaucugcaucuccaccaagcacuucuacugguucuucagcaacuaccucaagcggcgcgugguguucaacggcgucuccuucagcaccuucgaggaggccgcccugugcaccuuccugcucaacaaggagauguaccugaagcugcgguccgacgugcuccugccgcugacccaguacaaccgcuaccucgcccuguacaacaaguacaaguacuucagcggggccauggacaccacguccuaccgggaggcggccugcugccaccuggccaaggcccucaacgacuucagcaacuccggcagcgacgugcuguaccagccgccccagaccuccaucaccagcgcgguccugcaguga

SEQ ID NO: 18347 - RNA, 1506 nt, Artificial Sequence
  SARS-CoV-2__MT810897.1__non-structural protein 4 (NSP4) CDS gc
augaagaucgugaacaacuggcugaagcagcucaucaaggucacccugguguuccuguucguggccgccaucuucuaccucaucacccccguccacgugaugagcaagcacacggacuucuccagcgagaucaucggcuacaaggcgaucgacgggggcgugacccgcgacaucgccuccaccgacacgugcuucgccaacaagcacgccgacuucgacaccugguucagccagcggggcggcuccuacaccaacgacaaggccugcccccugaucgcggccgucaucacccgcgaggugggguucgugguccccggccugcccggcaccauccuccggacgaccaacggggacuuccugcacuuccugccccgcguguucagcgccgugggcaacaucugcuacaccccguccaagcucaucgaguacaccgacuucgccacgagcgcgugcguccuggccgccgagugcaccaucuucaaggaggccuccgggaagcccgugcccuacugcuacgacaccaacgugcuggagggcagcgucgccuacgagucccuccggcccgacacccgcuacgugcugauggacgggagcaucauccaguucccgaacacguaccuggagggcuccgugcgggucgugaccaccuucgacagcgaguacugccgccacgggaccugcgagcgguccgaggcgggggugugcgucagcacguccggccgcugggugcucaacaacgacuacuaccggagccugcccgggguguucugcggcgucgacgccgugaaccugcucaccaacauguucacgccccugauccagcccaucggcgcccuggacaucuccgccagcaucgucgccgggggcaucguggcgaucguggugaccugccucgccuacuacuucaugcgcuuccggcgcgccuucggggaguacagccacgucguggccuucaacacccugcuguuccucauguccuucaccguccugugccugaccccgguguacagcuuccuccccggcguguacuccgucaucuaccuguaccugaccuucuaccucacgaacgacgugagcuuccuggcccacauccaguggauggugauguucacgccccugguccccuucuggaucaccaucgcguacaucaucugcaucuccaccaagcacuucuacugguucuucagcaacuaccucaagcggcgcgugguguucaacggggucuccuucagcaccuucgaggaggccgcccugugcaccuuccugcucaacaaggagauguaccugaagcugcgguccgacgugcuccugccgcugacccaguacaaccgcuaccucgcccuguacaacaaguacaaguacuucagcggcgccauggacaccacguccuaccgggaggcggccugcugccaccuggccaaggcccucaacgacuucagcaacuccggcagcgacgugcuguaccagccgccccagaccuccaucaccagcgcgguccugcaguga

SEQ ID NO: 18348 - RNA, 1506 nt, Artificial Sequence
  SARS-CoV-2__MT810946.1__non-structural protein 4 (NSP4) CDS gc
augaagaucgugaacaacuggcugaagcagcucaucaaggucacccugguguuccuguucguggccgccaucuucuaccucaucacccccguccacgugaugagcaagcacacggacuucuccagcgagaucaucggcuacaaggcgaucgacgggggcgugacccgcgacaucgccuccaccgacacgugcuucgccaacaagcacgccgacuucgacaccugguucagccagcggggcggcuccuacaccaacgacaaggccugcccccugaucgcggccgucaucacccgcgaggugggguucgugguccccggccugcccggcaccauccuccggacgaccaacggggacuuccugcacuuccugccccgcguguucagcgccgugggcaacaucugcuacaccccguccaagcucaucgaguacaccgacuucgccacgagcgcgugcguccuggccgccgagugcaccaucuucaaggacgccuccgggaagcccgugcccuacugcuacgacaccaacgugcuggagggcagcgucgccuacgagucccuccggcccgacacccgcuacgugcugauggacgggagcaucauccaguucccgaacacguaccuggagggcuccgugcgggucgugaccaccuucgacagcgaguacugccgccacgggaccugcgagcgguccgaggcgggggugugcgucagcacguccggccgcugggugcucaacaacgacuacuaccggagccugcccgggguguucugcggcgucgacgccgugaaccugcucaccaacauguucacgccccugauccagcccaucggcgcccuggacaucuccgccagcaucgucgccgggggcgugguggcgaucgucgugaccugccucgccuacuacuucaugcgcuuccggcgcgccuucggggaguacagccacguggucgccuucaacacccugcuguuccucauguccuucaccgugcugugccugaccccgguguacagcuuccuccccggcgucuacuccgugaucuaccuguaccugaccuucuaccucacgaacgacgugagcuuccuggcccacauccaguggauggucauguucacgccccuggugcccuucuggaucaccaucgcguacaucaucugcaucuccaccaagcacuucuacugguucuucagcaacuaccucaagcggcgcguggucuucaacgggguguccuucagcaccuucgaggaggccgcccugugcaccuuccugcucaacaaggagauguaccugaagcugcgguccgacgugcuccugccgcugacccaguacaaccgcuaccucgcccuguacaacaaguacaaguacuucagcggcgccauggacaccacguccuaccgggaggcggccugcugccaccuggccaaggcccucaacgacuucagcaacuccggcagcgacguccuguaccagccgccccagaccuccaucaccagcgcggugcugcaguga

SEQ ID NO: 18349 - RNA, 1506 nt, Artificial Sequence
  SARS-CoV-2__MT810982.1__non-structural protein 4 (NSP4) CDS gc
augaagaucgugaacaacuggcugaagcagcucaucaaggucacccugguguuccuguucguggccgccaucuucuaccucaucacccccguccacgugaugagcaagcacacggacuucuccagcgagaucaucggcuacaaggcgaucgacgggggcgugacccgcgacaucgccuccaccgacacgugcuucgccaacaagcacgccgacuucgacaccugguucagccagcgcgggggcuccuacaccaacgacaaggccugcccccugaucgcggccgucaucacccgggaggugggguucgugguccccggccugcccggcaccauccuccggacgaccaacggggacuuccugcacuuccugccccgcguguucagcgccgugggcaacaucugcuacaccccguccaagcucaucgaguacaccgacuucgccacgagcgcgugcguccuggccgccgagugcaccaucuucaaggacgccuccgggaagcccgugcccuacugcuacgacaccaacgugcuggagggcagcgucgccuacgagucccuccggcccgacacccgcuacgugcugauggacgggagcaucauccaguucccgaacacguaccuggagggcuccgugcgggucgugaccaccuucgacagcgaguacugccgccacggcaucugcgagcgguccgaggcgggggugugcgucagcaccuccggccgcugggugcucaacaacgacuacuaccggagccugcccgggguguucugcggcgucgacgccgugaaccugcucacgaacauguucacgccccugauccagcccaucggcgcccuggacaucuccgccagcaucgucgccgggggcaucguggcgaucguggugaccugccucgccuacuacuucaugcgcuuccggcgcgccuucggggaguacagccacgucguggccuucaacacccugcuguuccucauguccuucaccguccugugccugaccccgguguacagcuuccuccccggcguguacuccgucaucuaccuguaccugaccuucuaccucaccaacgacgugagcuuccuggcccacauccaguggauggugauguucacgccccugguccccuucuggaucaccaucgcguacaucaucugcaucuccaccaagcacuucuacugguucuucagcaacuaccucaagcggcgcgugguguucaacggggucuccuucagcaccuucgaggaggccgcccugugcacguuccugcucaacaaggagauguaccugaagcugcgguccgacgugcuccugccgcugacccaguacaaccgcuaccucgcccuguacaacaaguacaaguacuucagcggcgccauggacaccaccuccuaccgggaggcggccugcugccaccuggccaaggcccucaacgacuucagcaacuccggcagcgacgugcuguaccagccgccccagacguccaucaccagcgcgguccugcaguga

SEQ ID NO: 18350 - RNA, 1506 nt, Artificial Sequence
  SARS-CoV-2__MT811283.1__non-structural protein 4 (NSP4) CDS gc
augaagaucgugaacaacuggcugaagcagcucaucaaggucacccugguguuccuguucguggccgccaucuucuaccucaucacccccguccacgugaugagcaagcacacggacuucuccagcgagaucaucggcuacaaggcgaucgacgggggcgugacccgcgacaucgccuccaccgacacgugcuucgccaacaagcacgccgacuucgacaccugguucagccagcggggcggcuccuacaccaacgacaaggccugcccgcugaucgcggccgucaucacccgcgaggugggguucgugguccccggccugcccggcaccauccuccggacgaccaacggggacuuccugcacuuccugccccgcguguucagcgccgugggcaacaucugcuacaccccguccaagcucaucgaguacaccgacuucgccacgagcgcgugcguccuggccgccgagugcaccaucuucaaggacgccuccgggaagcccgugcccuacugcuacgacaccaacgugcuggagggcagcgucgccuacgagucccuccggcccgacacccgcuacgugcugauggacgggagcaucauccaguucccgaacacguaccuggagggcuccgugcgggucgugaccaccuucgacagcgaguacugccgccacgggaccugcgagcgguccgaggcgggggugugcgucagcacguccggccgcugggugcucaacaacgacuacuaccggagccugcccgggguguucugcggcgucgacgccgugaaccugcucaccaacauguucacgccccugauccagcccaucggcgcccuggacaucuccgccagcaucgucgccgggggcaucguggcgaucguggugaccugccucgccuacuacuucaugcgcuuccggcgcgccuucggggaguacagccacgucguggccuucaacacccugcuguuccucauguccuucaccguccugugccugaccccgguguacagcuuccuccccggcguguacuccgucaucuaccuguaccugaccuucuaccucacgaacgacgugagcuuccuggcccacauccaguggauggugauguucaccucccugguccccuucuggaucaccaucgcguacaucaucugcaucagcaccaagcacuucuacugguucuucuccaacuaccucaagcggcgcgugguguucaacggggucagcuucuccacguucgaggaggccgcccugugcaccuuccugcucaacaaggagauguaccugaagcugcggagcgacgugcuccugccccugacccaguacaaccgcuaccucgcccuguacaacaaguacaaguacuucuccggcgccauggacaccacgagcuaccgggaggcggccugcugccaccuggccaaggcccucaacgacuucuccaacagcggcuccgacgugcuguaccagccgccccagaccagcaucaccuccgcgguccugcaguga

SEQ ID NO: 18351 - RNA, 1506 nt, Artificial Sequence
  SARS-CoV-2__MT811437.1__non-structural protein 4 (NSP4) CDS gc
augaagaucgugaacaacuggcugaagcagcucaucaaggucacccugguguuccuguucguggccgccaucuucuaccucaucacccccguccacgugaugagcaagcacacggacuucuccagcgagaucaucggcuacaaggcgaucgacgggggcgugacccgcgacaucgccuccaccgacacgugcuucgccaacaagcacgccgacuucgacaccugguucagccagcggggcggcuccuacaccaacgacaaggccugcccccugaucgcggccgucaucacccgcgaggugggguucgugguccccggccugcccggcaccauccuccggacgaccaacggggacuuccugcacuuccugccccgcguguucagcgccgugggcaacaucugcuacaccccguccaagcucaucgaguacaccgacuucgccacgagcgcgugcguccuggccgccgagugcaccaucuucaaggacgccuccgggaagcccgugcccuacugcuacgacaccaacgugcuggagggcagcgucgccuacgagaaccuccggcccgacacccgcuacgugcugauggacggguccaucauccaguucccgaacacguaccuggagggcagcgugcgggucgugaccaccuucgacuccgaguacugccgccacgggaccugcgagcggagcgaggcgggggugugcgucuccacgagcggccgcugggugcucaacaacgacuacuaccggucccugcccgggguguucugcggcgucgacgccgugaaccugcucaccaacauguucacgccccugauccagcccaucggcgcccuggacaucagcgccuccaucgucgccgggggcaucguggcgaucguggugaccugccucgccuacuacuucaugcgcuuccggcgcgccuucggggaguacagccacgucguggccuucaacacccugcuguuccucaugagcuucaccguccugugccugaccccgguguacuccuuccuccccggcguguacagcgucaucuaccuguaccugaccuucuaccucacgaacgacguguccuuccuggcccacauccaguggauggugauguucacgccccugguccccuucuggaucaccaucgcguacaucaucugcaucagcaccaagcacuucuacugguucuucuccaacuaccucaagcggcgcgugguguucaacggggucagcuucuccaccuucgaggaggccgcccugugcaccuuccugcucaacaaggagauguaccugaagcugcggagcgacgugcuccugccgcugacccaguacaaccgcuaccucgcccuguacaacaaguacaaguacuucuccggcgccauggacaccacgagcuaccgggaggcggccugcugccaccuggccaaggcccucaacgacuucuccaacagcggcuccgacgugcuguaccagccgccccagaccagcaucaccuccgcgguccugcaguga

SEQ ID NO: 18352 - RNA, 1506 nt, Artificial Sequence
  SARS-CoV-2__MT811448.1__non-structural protein 4 (NSP4) CDS gc
augaagaucgugaacaacuggcugaagcagcucaucaaggucacccugguguuccuguucguggccgccaucuucuaccucaucacccccguccacgugaugagcaagcacacggacuucuccagcgagaucaucggcuacaaggcgaucgacgggggcgugacccgcgacaucgccuccaccgacacgugcuucgccaacaagcacgccgacuucgacaccugguucagccagcggggcggcuccuacaccaacgacaaggccugcccccugaucgcggccgucaucacccgcgaggugggguucgugguccccggccugcccggcaccauccuccggacgaccaacggggacuuccugcacuuccugccccgcguguucagcgccgugggcaacaucugcuacaccccguccaagcucaucgaguacaccgacuucgccacggcggccugcguccuggccgccgagugcaccaucuucaaggacgccagcgggaagcccgugcccuacugcuacgacaccaacgugcuggagggcuccgucgcguacgagagccuccggcccgacacccgcuacgugcugauggacggguccaucauccaguucccgaacacguaccuggagggcagcgugcgggucgugaccaccuucgacuccgaguacugccgccacgggaccugcgagcggagcgaggccggggugugcgucuccacgagcggccgcugggugcucaacaacgacuacuaccggucccugcccgggguguucugcggcgucgacgccgugaaccugcucaccaacauguucacgccccugauccagcccaucggcgcccuggacaucagcgccuccaucgucgccgggggcaucguggcgaucguggugaccugccucgccuacuacuucaugcgcuuccggcgcgccuucggggaguacagccacgucguggccuucaacacccugcuguuccucaugagcuucaccguccugugccugaccccgguguacuccuuccuccccggcguguacagcgucaucuaccuguaccugaccuucuaccucacgaacgacguguccuuccuggcgcacauccaguggauggugauguucacgccccugguccccuucuggaucaccaucgccuacaucaucugcaucagcaccaagcacuucuacugguucuucuccaacuaccucaagcggcgcgugguguucaacggggucagcuucuccaccuucgaggaggccgcccugugcaccuuccugcucaacaaggagauguaccugaagcugcggagcgacgugcuccugccgcugacccaguacaaccgcuaccucgcccuguacaacaaguacaaguacuucuccggcgcgauggacaccacgagcuaccgggaggccgccugcugccaccuggccaaggcgcucaacgacuucuccaacagcggcuccgacgugcuguaccagccgccccagaccagcaucaccuccgccguccugcaguga

SEQ ID NO: 18353 - RNA, 1506 nt, Artificial Sequence
  SARS-CoV-2__MT811484.1__non-structural protein 4 (NSP4) CDS gc
augaagaucgugaacaacuggcugaagcagcucaucaaggucacccugguguuccuguucguggccgccaucuucuaccucaucacccccguccacgugaugagcaagcacacggacuucuccagcgagaucaucggcuacaaggcgaucgacgggggcgugacccgcgacaucgccuccaccgacacgugcuucgccaacaagcacgccgacuucgacaccugguucagccagcggggcggcuccuacaccaacgacaaggccugcccccugaucgcggccgucaucacccgcgaggugggguucgugguccccggccugcccggcaccauccuccggacgaccaacggggacuuccugcacuuccugccccgcguguucagcgccgugggcaacaucugcuacaccccguccaagcucaucgaguacaccgacuucgccacgagcgcgugcguccuggccgccgagugcaccaucuucaaggacgccuccgggaagcccgugcccuacugcuacgacaccaacgugcuggagggcagcgucgccuacgagucccuccggcccgacacccgcuacgugcugauggacgggagcaucauccaguucccgaacacguaccuggagggcuccgugcgggucgugaccaccuucgacagcgaguacugccgccacgggaccugcgagcgguccgaggcgggggugugcgucagcacguccggccgcugggugcucaacaacgacuacuaccggagccugcccgggguguucugcggcgucgacgccgugaaccugcucaccaacauguucacgccccugauccagcccaucggcgcccuggacaucuccgccagcaucgucgccgggggcaucguggcgaucguggugaccugccucgccuacuacuucaugcgcuuccggcgcgccuucggggaguacagccacgucguggccuucaacacccugcuguuccucauguccuucaccguccugugccugaccccgguguacagcuuccuccccggcguguacuccgucaucuaccuguaccugaccuucuaccucacgaacgacgugagcuuccuggcccacauccaguggauggugauguucacgccccugguccccuucuggaucaccaucgcguacaucaucugcaucuccaccaagcacuucuacugguucuucagcaacuaccucaagcggcgcgugguguucaacggggucuccuucagcaccuucgaggaggccgcccugugcaccuuccugcucaacaaggagauguaccugaagcugcgguccgacgugcuccugccgcugacccaguacaaccgcuaccucgcccuguacaacaaguacaaguacuucagcggcgccauggacaccacguccuaccgggaggcggccugcugccaccuggccaaggcccucaacgacuucagcaacuccggcagcgacgugcuguaccagccgccccaggcguccaucaccagcgccguccugcaguga

SEQ ID NO: 18354 - RNA, 1506 nt, Artificial Sequence
  SARS-CoV-2__MT811505.1__non-structural protein 4 (NSP4) CDS gc
augaagaucgugaacaacuggcugaagcagcucaucaaggucacccugguguuccuguucguggccgccaucuucuaccucaucacccccguccacgugaugagcaagcacacggacuucuccagcgagaucaucggcuacaaggcgaucgacgggggcgugacccgcgacaucgccuccaccgacacgugcuucgccaacaagcacgccgacuucgacaccugguucagccagcggggcggcuccuacaccaacgacaaggccugcccccugaucgcggccgucaucacccgcgaggugggguucgugguccccggccugcccggcaccauccuccggacgaccaacggggacuuccugcacuuccugccccgcguguucagcgccgugggcaacaucugcuacaccccguccaagcucaucgaguacaccgacuucgccacgagcgcgugcguccuggccgccgagugcaccaucuucaaggacgccuccgggaagcccgugcccuacugcuacgacaccaacgugcuggagggcagcgucgccuacgagucccuccggcccgacacccgcuacgugcugauggacgggagcaucauccaguucccgaacacguaccuggagggcuccgugcgggucgugaucaccuucgacagcgaguacugccgccacgggaccugcgagcgguccgaggcgggggugugcgucagcaccuccggccgcugggugcucaacaacgacuacuaccggagccugcccgggguguucugcggcgucgacgccgugaaccugcucacgaacauguucacgccccugauccagcccaucggcgcccuggacaucuccgccagcaucgucgccgggggcaucguggcgaucguggugaccugccucgccuacuacuucaugcgcuuccggcgcgccuucggggaguacagccacgucguggccuucaacacccugcuguuccucauguccuucaccguccugugccugaccccgguguacagcuuccuccccggcguguacuccgucaucuaccuguaccugaccuucuaccucaccaacgacgugagcuuccuggcccacauccaguggauggugauguucacgccccugguccccuucuggaucaccaucgcguacaucaucugcaucuccaccaagcacuucuacugguucuucagcaacuaccucaagcggcgcgugguguucaacggggucuccuucagcaccuucgaggaggccgcccugugcacguuccugcucaacaaggagauguaccugaagcugcgguccgacgugcuccugccgcugacccaguacaaccgcuaccucgcccuguacaacaaguacaaguacuucagcggcgccauggacaccaccuccuaccgggaggcggccugcugccaccuggccaaggcccucaacgacuucagcaacuccggcagcgacgugcuguaccagccgccccagacguccaucaccagcgcgguccugcaguga

SEQ ID NO: 18355 - RNA, 1506 nt, Artificial Sequence
  SARS-CoV-2__MT811523.1__non-structural protein 4 (NSP4) CDS gc
augaagaucgugaacaacuggcugaagcagcucaucaaggucacccugguguuccuguucguggccgccaucuucuaccucaucacccccguccacgugaugagcaagcacacggacuucuccagcgagaucaucggcuacaaggcgaucgacgggggcgugacccgcgacaucgccuccaccgacacgugcuucgccaacaagcacgccgacuucgacaccugguucagccagcggggcggcuccuacaccaacgacaaggccugcccccugaucgcggccgucaucacccgcgaggugggguucgugguccccggccugcccggcaccauccuccggacgaccaacggggacuuccugcacuuccugccccgcguguucagcgccgugggcaacaucugcuacaccccguccaagcucaucgaguacaccgacuucgccacgagcgcgugcguccuggccgccgagugcaccaucuucaaggacgccuccgggaagcccgugcccuacugcuacgacaccaacgugcuggagggcagcgucgccuacgagucccuccggcccgacacccgcuacgugcugauggacgggagcaucauccaguucccgaacacguaccuggagggcuccgugcgggucgugaccaccuucgacagcgaguacugccgccacgggaccugcgagcgguccgaggcgggggugugcgucagcacguccggccgcugggugcucaacaacgacuacuaccggagccugcccgggguguucugcggcgucgacgccgugaaccugcucaccaacauguucacgccccugauccagcccaucggcgcccugaacaucuccgccagcaucgucgccgggggcaucguggcgaucguggugaccugccucgccuacuacuucaugcgcuuccggcgcgccuucggggaguacagccacgucguggccuucaacacccugcuguuccucauguccuucaccguccugugccugaccccgguguacagcuuccuccccggcguguacuccgucaucuaccuguaccugaccuucuaccucacgaacgacgugagcuuccuggcccacauccaguggauggugauguucacgccccugguccccuucuggaucaccaucgcguacaucaucugcaucuccaccaagcacuucuacugguucuucagcaacuaccucaagcggcgcgugguguucaacggggucuccuucagcaccuucgaggaggccgcccugugcaccuuccugcucaacaaggagauguaccugaagcugcgguccgacgugcuccugccgcugacccaguacaaccgcuaccucgcccuguacaacaaguacaaguacuucagcggcgccauggacaccacguccuaccgggaggcggccugcugccaccuggccaaggcccucaacgacuucagcaacuccggcagcgacgugcuguaccagccgccccagaccuccaucaccagcgcgguccugcaguga

SEQ ID NO: 18356 - RNA, 1506 nt, Artificial Sequence
  SARS-CoV-2__MT811707.1__non-structural protein 4 (NSP4) CDS gc
augaagaucgugaacaacuggcugaagcagcucaucaaggucacccugguguuccuguucguggccgccaucuucuaccucaucacccccguccacgugaugagcaagcacacggacuucuccagcgagaucaucggcuacaaggcgaucgacgggggcgugacccgcgacaucgccuccaccgacacgugcuucgccaacaagcacgccgacuucgacaccugguucagccagcggggcggcuccuacaccaacgacaaggccugcccccugaucgcggccgucaucacccgcgaggugggguucgugguccccggccugcccggcaccauccuccggacgaccaacggggacuuccugcacuuccugccccgcguguucagcgccgugggcaacaucugcuacaccccguccaagcucaucgaguacaccgacuucgccacgagcgcgugcguccuggccgccgagugcaccaucuucaaggacgccuccgggaagcccgugcccuacugcuacgacaccaacgugcuggagggcagcgucgccuacgagucccuccggcccgacacccgcuacgugcugauggacgggagcaucauccaguucccgaacacguaccuggagggcuccgugcgggucgugaccaccuucgacagcgaguacugccgccacgggaccugcgagcgguccgaggcgggggugugcgucagcacguccggccgcugggugcucaacaacgacuacuaccggagccugcccggggugcugugcggcgucgacgccgugaaccuccugaccaacauguucacgccccugauccagcccaucggcgcccucgacaucuccgccagcaucgucgccgggggcaucguggcgaucguggugaccugccuggccuacuacuucaugcgcuuccggcgcgccuucggggaguacagccacgucguggccuucaacacccuccuguuccugauguccuucaccguccugugccucaccccgguguacagcuuccugcccggcguguacuccgucaucuaccuguaccucaccuucuaccugacgaacgacgugagcuuccuggcccacauccaguggauggugauguucacgccccucguccccuucuggaucaccaucgcguacaucaucugcaucuccaccaagcacuucuacugguucuucagcaacuaccugaagcggcgcgugguguucaacggggucuccuucagcaccuucgaggaggccgcccugugcaccuuccuccugaacaaggagauguaccugaagcuccgguccgacgugcugcugccgcucacccaguacaaccgcuaccuggcccuguacaacaaguacaaguacuucagcggcgccauggacaccacguccuaccgggaggcggccugcugccaccucgccaaggcccugaacgacuucagcaacuccggcagcgacgugcuguaccagccgccccagaccuccaucaccagcgcgguccugcaguga

SEQ ID NO: 18357 - RNA, 1506 nt, Artificial Sequence
  SARS-CoV-2__MT811728.1__non-structural protein 4 (NSP4) CDS gc
augaagaucgugaacaacuggcugaagcagcucaucaaggucacccugguguuccuguucguggccgccaucuucuaccucaucacccccguccacgugaugagcaagcacacggacuucuccagcgagaucaucggcuacaaggcgaucgacgggggcgugacccgcgacaucgccuccaccgacacgugcuucgccaacaagcacgccgacuucgacaccugguucagccagcggggcggcuccuacaccaacgacaaggccugcccccugaucgcggccgucaucauccgcgaggugggguucgugguccccggccugcccggcaccauccuccggaccacgaacggggacuuccugcacuuccugccccgcguguucagcgccgugggcaacaucugcuacaccccguccaagcucaucgaguacaccgacuucgccaccagcgcgugcguccuggccgccgagugcacgaucuucaaggacgccuccgggaagcccgugcccuacugcuacgacaccaacgugcuggagggcagcgucgccuacgagucccuccggcccgacacccgcuacgugcugauggacgggagcaucauccaguucccgaacaccuaccuggagggcuccgugcgggucgugacgaccuucgacagcgaguacugccgccacgggaccugcgagcgguccgaggcgggggugugcgucagcaccuccggccgcugggugcucaacaacgacuacuaccggagccugcccgggguguucugcggcgucgacgccgugaaccugcucacgaacauguucacgccccugauccagcccaucggcgcccuggacaucuccgccagcaucgucgccgggggcaucguggcgaucguggugaccugccucgccuacuacuucaugcgcuuccggcgcgccuucggggaguacagccacgucguggccuucaacacccugcuguuccucauguccuucaccguccugugccugaccccgguguacagcuuccuccccggcguguacuccgucaucuaccuguaccugaccuucuaccucaccaacgacgugagcuuccuggcccacauccaguggauggugauguucacgccccugguccccuucuggaucaccaucgcguacaucaucugcaucuccaccaagcacuucuacugguucuucagcaacuaccucaagcggcgcgugguguucaacggggucuccuucagcaccuucgaggaggccgcccugugcacguuccugcucaacaaggagauguaccugaagcugcgguccgacgugcuccugccgcugacccaguacaaccgcuaccucgcccuguacaacaaguacaaguacuucagcggcgccauggacaccaccuccuaccgggaggcggccugcugccaccuggccaaggcccucaacgacuucagcaacuccggcagcgacgugcuguaccagccgccccagacguccaucaccagcgcgguccugcaguga

SEQ ID NO: 18358 - RNA, 1506 nt, Artificial Sequence
  SARS-CoV-2__MT811737.1__non-structural protein 4 (NSP4) CDS gc
augaagaucgugaacaacuggcugaagcagcucaucaaggucacccugguguuccuguucguggccgccaucuucuaccucaucacccccguccacgugaugagcaagcacacggacuucuccagcgagaucaucggcuacaaggcgaucgacgggggcgugacccgcgacaucgccuccaccgacacgugcuucgccaacaagcacgccgacuucgacaccugguucagccagcggggcggcuccuacaccaacgacaaggccugcccccugaucgcggccgucaucacccgcgaggugggguucgugguccccggccugcccggcaccauccuccggacgaccaacggggacuuccugcacuuccugccccgcguguucagcgccgugggcaacaucugcuacaccccguccaagcucaucgaguacaccgacuucgccacgagcgcgugcguccuggccgccgagugcaccaucuucaaggacgccuccgggaagcccgugcccuacugcuacgacaccaacgugcuggagggcagcgucgccuacgagucccuccggcccgacacccgcuacgugcugauggacgggagcaucauccaguucccgaacacguaccuggagggcuccgugcgggucgugaccaccuucgacagcgaguacugccgccacgggaccugcgagcgguccgaggcgggggugugcgucagcacguccggccgcugggugcucaacaacgacuacuaccggagccugcccgggguguucugcggcgucgacgccgugaaccugcucaccaacauguucacgccccugauccagcccaucggcgcccuggacaucuccgccagcaucgucgccgggggcaucguggcgaucguggugaccugccucgccuacuacuucaugcgcuuccggcgcgccuucggggaguacagccacgucguggccuucaacacccugcuguuccucauguccuucaccguccugugccugaccccgguguacagcuuccuccccggcguguacuccgucaucuaccuguaccugaucuucuaccucaccaacgacgugagcuuccuggcccacauccaguggauggugauguucacgccccugguccccuucuggaucaccaucgcguacaucaucugcaucuccaccaagcacuucuacugguucuucagcaacuaccucaagcggcgcgugguguucaacggggucuccuucagcaccuucgaggaggccgcccugugcacguuccugcucaacaaggagauguaccugaagcugcgguccgacgugcuccugccgcugacccaguacaaccgcuaccucgcccuguacaacaaguacaaguacuucagcggcgccauggacaccaccuccuaccgggaggcggccugcugccaccuggccaaggcccucaacgacuucagcaacuccggcagcgacgugcuguaccagccgccccagacguccaucaccagcgcgguccugcaguga

SEQ ID NO: 18359 - RNA, 1506 nt, Artificial Sequence
  SARS-CoV-2__MT806775.1__non-structural protein 4 (NSP4) CDS gc
augaagaucgugaacaacuggcugaagcagcucaucaaggucacccugguguuccuguucguggccgccaucuucuaccucaucacccccguccacgugaugagcaagcacacggacuucuccagcgagaucaucggcuacaaggcgaucgacgggggcgugacccgcgacaucgccuccaccgacacgugcuucgccaacaagcacgccgacuucgacaccugguucagccagcggggcggcuccuacaccaacgacaaggccugcccccugaucgcggccgucaucacccgcgaggugggguucgugguccccggccugcccggcaccauccuccggacgaccaacggggacuuccugcacuuccugccccgcguguucagcguggucggcaacaucugcuacaccccguccaagcucaucgaguacaccgacuucgccacgagcgccugcgugcuggcggccgagugcaccaucuucaaggacgccuccgggaagcccgugcccuacugcuacgacaccaacguccuggagggcagcguggccuacgagucccuccggcccgacacccgcuacgugcugauggacgggagcaucauccaguucccgaacacguaccuggagggcuccguccggguggugaccaccuucgacagcgaguacugccgccacgggaccugcgagcgguccgaggccggggucugcgugagcacguccggccgcugggugcucaacaacgacuacuaccggagccugcccggggucuucugcggcguggacgcggucaaccugcucaccaacauguucacgccccugauccagcccaucggcgcccuggacaucuccgccagcaucguggccgggggcaucguggccaucgucgugaccugccucgcguacuacuucaugcgcuuccggcgcgccuucggggaguacagccacguggucgccuucaacacccugcuguuccucauguccuucaccgugcugugccugaccccgguguacagcuuccuccccggcgucuacuccgugaucuaccuguaccugaccuucuaccucacgaacgacgugagcuuccuggcccacauccaguggauggucauguucacgccccuggugcccuucuggaucaccaucgccuacaucaucugcaucuccaccaagcacuucuacugguucuucagcaacuaccucaagcggcgcguggucuucaacgggguguccuucagcaccuucgaggaggcggcccugugcaccuuccugcucaacaaggagauguaccugaagcugcgguccgacgugcuccugccgcugacccaguacaaccgcuaccucgcccuguacaacaaguacaaguacuucagcggcgccauggacaccacguccuaccgggaggccgcgugcugccaccuggccaaggcccucaacgacuucagcaacuccggcagcgacguccuguaccagccgccccagaccuccaucaccagcgccgugcugcaguga

SEQ ID NO: 18360 - RNA, 1506 nt, Artificial Sequence
  SARS-CoV-2__MT806779.1__non-structural protein 4 (NSP4) CDS gc
augaagaucgugaacaacuggcugaagcagcucaucaaggucacccugguguuccuguucguggccgccaucuucuaccucaucacccccguccacgugaugagcaagcacacggacuucuccagcgagaucaucggcuacaaggcgaucgacgggggcgugacccgcgacaucgccuccaccgacacgugcuucgccaacaagcacgccgacuucgacaccugguucagccagcggggcggcuccuacaccaacgacaaggccugcccccugaucgcggccgucaucacccgcgaggugggguucgugguccccggccugcccggcaccauccuccggacgaccaacggggacuuccugcacuuccugccccgcguguucagcgccgugggcaacaucugcuacaccccguccaagcucaucgaguacaccgacuucgccacgagcgcgugcguccuggccgccgagugcaccaucuucaaggacgccuccgggaagcccgugcccuacugcuacgacaccaacgugcuggagggcagcgucgccuacgagucccuccggcccgacacccgcuacgugcugauggacgggagcaucauccaguucccgaacacguaccuggagggcuccgugcgggucgugaccaccuucgacagcgaguacugccgccacgggaccugcgagcgguccgaggcgggggugugcgucagcaucuccggccgcugggugcucaacaacgacuacuaccggagccugcccgggguguucugcggcgucgacgccgugaaccugcucacgaacauguucacgccccugauccagcccaucggcgcccuggacaucuccgccagcaucgucgccgggggcaucguggcgaucguggugaccugccucgccuacuacuucaugcgcuuccggcgcgccuucggggaguacagccacgucguggccuucaacacccugcuguuccucauguccuucaccguccugugccugaccccgguguacagcuuccuccccggcguguacuccgucaucuaccuguaccugaccuucuaccucaccaacgacgugagcuuccuggcccacauccaguggauggugauguucacgccccugguccccuucuggaucaccaucgcguacaucaucugcaucuccaccaagcacuucuacugguucuucagcaacuaccucaagcggcgcgugguguucaacggggucuccuucagcaccuucgaggaggccgcccugugcacguuccugcucaacaaggagauguaccugaagcugcgguccgacgugcuccugccgcugacccaguacaaccgcuaccucgcccuguacaacaaguacaaguacuucagcggcgccauggacaccaccuccuaccgggaggcggccugcugccaccuggccaaggcccucaacgacuucagcaacuccggcagcgacgugcuguaccagccgccccagacguccaucaccagcgcgguccugcaguga

SEQ ID NO: 18361 - RNA, 1506 nt, Artificial Sequence
  SARS-CoV-2__MT800029.1__non-structural protein 4 (NSP4) CDS gc
augaagaucgugaacaacuggcugaagcagcucaucaaggucacccugguguuccuguucguggccgccaucuucuaccucaucacccccguccacgugaugagcaagcacacggacuucuccagcgagaucaucggcuacaaggcgaucgacgggggcgugacccgcgacaucgccuccaccgacacgugcuucgccaacaagcacgccgacuucgacaccugguucagccagcggggcggcuccuacaccaacgacaaggccugcccccugaucgcggccgucaucacccgcgaggugggguucgugguccccggccugcccggcaccauccuccggacgaccaacggggacuuccugcacuuccugccccgcguguucagcgccgugggcaacaucugcuacaccccguccaagcucaucgaguacaccgacuucgccacgagcgcgugcguccuggccgccgagugcaccaucuucaaggacgccuccgggaagcccgugcccuacugcuacgacaccaacgugcuggagggcagcgucgccuacgagucccuccggcccgacacccgcuacgugcugauggacgggagcaucauccaguucccgaacacguaccuggagggcuccgugcgggucgugaccaccuucgacagcgaguacugccgccacgggaccugcgagcgguccgaggcgggggugugcgucagcacguccggccgcugggugcucaacaacgacuacuaccggagccugcccgggguguucugcggcgucgacgccgugaaccugcucaccaacauguucacgccccugauccagcccaucggcgcccuggacaucuccgccagcaucgucgccgggggcaucguggcgaucguggugaccugccucgccuacuacuucaugcgcuuccggcgcgccuucggggaguacagccacgucguggccuucaacacccugcuguuccucaucuccuucaccguccugugccugaccccgguguacagcuuccuccccggcguguacuccgucaucuaccuguaccugaccuucuaccucacgaacgacgugagcuuccuggcccacauccaguggauggugauguucacgccccugguccccuucuggaucaccaucgcguacaucaucugcaucuccaccaagcacuucuacugguucuucagcaacuaccucaagcggcgcgugguguucaacggggucuccuucagcaccuucgaggaggccgcccugugcaccuuccugcucaacaaggagauguaccugaagcugcgguccgacgugcuccugccgcugacccaguacaaccgcuaccucgcccuguacaacaaguacaaguacuucagcggcgccauggacaccacguccuaccgggaggcggccugcugccaccuggccaaggcccucaacgacuucagcaacuccggcagcgacgugcuguaccagccgccccagaccuccaucaccagcgcgguccugcaguga

SEQ ID NO: 18362 - RNA, 1506 nt, Artificial Sequence
  SARS-CoV-2__MT800282.1__non-structural protein 4 (NSP4) CDS gc
augaagaucgugaacaacuggcugaagcagcucaucaaggucacccugguguuccuguucguggccgccaucuucuaccucaucacccccguccacgugaugagcaagcacacggacuucuccagcgagaucaucggcuacaaggcgaucgacgggggcgugacccgcgacaucgccuccaccgacacgugcuucgccaacaagcacgccgacuucgacaccugguucagccagcggggcggcuccuacaccaacgacaaggccugcccccugaucgcggccgucaucacccgcgaggugggguucgugguccccggccugcccggcaccauccuccggacgaccaacggggacuuccugcacuuccugccccgcguguucagcgccgugggcaacaucugcuacaccccguccaagcucaucgaguacaccgacuucgccacgagcgcgugcguccuggccgccgagugcaccaucuucaaggacgccuccgggaagcccgugcccuacugcuacgacaccaacgugcuggagggcagcgucgccuacgagucccuccggcccgacacccgcuacgugcugauggacgggagcaucauccaguucccgaacacguaccuggagggcuccgugcgggucgugaccaccuucgacagcgaguacugccgccacgggaccugcgagcgguccgaggcgggggugugcgucagcacguccggccgcugggugcucaacaacgacuacuaccggagccugcccgggguguucugcggcgucgacgccgugaaccugcucaccaacauguucacgccccugauccagcccaucggcgcccuggacaucuccgccagcaucgucgccgggggcaucguggcgaucguggugaccugccucgccuacuacuucaugcgcuuccggcgcgccuucggggaguacagccacgucguggccuucaacacccugcuguuccucauguccuucaccguccugugccugaccccgguguacagcuuccuccccggcguguacuccgucaucuaccuguaccugaccuucuaccucacgaacgacgugagcuuccuggcccacauccaguggauggugauguucacgccccugguccccuucuggaucaccaucgcguacaucaucugcaucuccaccaagcacuucuacugguucuucgggaacuaccucaagcggcgcgugguguucaacggcgucagcuucuccaccuucgaggaggccgcccugugcaccuuccugcucaacaaggagauguaccugaagcugcggagcgacgugcuccugccgcugacccaguacaaccgcuaccucgcccuguacaacaaguacaaguacuucuccggcgccauggacaccacgagcuaccgggaggcggccugcugccaccuggccaaggcccucaacgacuucuccaacagcggguccgacgugcuguaccagccgccccagaccagcaucaccuccgcgguccugcaguga

SEQ ID NO: 18363 - RNA, 1506 nt, Artificial Sequence
  SARS-CoV-2__MT800753.1__non-structural protein 4 (NSP4) CDS gc
augaagaucgugaacaacuggcugaagcagcucaucaaggucacccugguguuccuguucguggccgccaucuucuaccucaucacccccguccacgugaugagcaagcacacggacuucuccagcgagaucaucggcuacaaggcgaucgacgggggcgugacccgcgacaucgccuccaccgacacgugcuucgccaacaagcacgccgacuucgacaccugguucagccagcggggcggcuccuacaccaacgacaaggccugcccccugaucgcggccgucaucacccgcgaggugggguucgugguccccggccugcccggcaccauccuccggacgaccaacggggacuuccugcacuuccugccccgcguguucagcgccgugggcaacaucugcuacaccccguccaagcucaucgaguacaccgacuucgccacgagcgcgugcguccuggccgccgagugcaccaucuucaaggacgccuccgggaagcccgugcccuacugcuacgacaccaacgugcuggagggcagcgucgccuacgagucccuccggcccgacacccgcuacgugcugauggacgggagcaucauccaguucccgaacacguaccuggagggcuccgugcgggucgugaccaccuucgacagcgaguacugccgccacgggaccugcgagcgguccgaggcgggggugugcgucagcacguccggccgcugggugcucaacaacgacuacuaccggagccugcccgggguguucugcggcgucgacgccgugaaccugcucaccaacauguucacgccccugauccagcccaucggcgcccuggacaucuccgccagcaucgucgccgggggcaucguggcgaucguggugaccugccucgccuacuacuucaugcgcuuccggcgcgccuucggggaguacagccacgucguggccuucaacacccugcuguuccucauguccuucaccguccugugccugaccccgguguacagcuuccuccccggcguguacuccgucaucuaccuguaccugaccuucuaccucacgaacgacgugagcuuccuggcccacauccaguggauggugauguucacgccccugguccccuucuggaucaccaucgcguacaucaucugcaucuccaucaagcacuucuacugguucuucagcaacuaccucaagcggcgcgugguguucaacggggucuccuucagcaccuucgaggaggccgcccugugcaccuuccugcucaacaaggagauguaccugaagcugcgguccgacgugcuccugccgcugacccaguacaaccgcuaccucgcccuguacaacaaguacaaguacuucagcggcgccauggacaccaccuccuaccgggaggcggccugcugccaccuggccaaggcccucaacgacuucagcaacuccggcagcgacgugcuguaccagccgccccagacguccaucaccagcgcgguccugcaguga

SEQ ID NO: 18364 - RNA, 1506 nt, Artificial Sequence
  SARS-CoV-2__MT791940.1__non-structural protein 4 (NSP4) CDS gc
augaagaucgugaacaacuggcugaagcagcucaucaaggucacccugguguuccuguucguggccgccaucuucuaccucaucacccccguccacgugaugagcaagcacacggacuucuccagcgagaucaucggcuacaaggcgaucgacgggggcgugacccgcgacaucgccuccaccgacacgugcuucgccaacaagcacgccgacuucgacaccugguucagccagcggggcggcuccuacaccaacgacaaggccugcccccugaucgcggccgucaucacccgcgaggugggguucgugguccccggccugcccggcaccauccuccggacgaccaacggggacuuccugcacuuccugccccgcguguucagcgccgugggcaacaucugcuacaccccguccaagcucaucgaguacaccgacuucgccacgagcgcgugcguccuggccgccgagugcaccaucuucaaggacgccuccgggaagcccgugcccuacugcuacgacaccaacgugcuggagggcagcgucgccuacgagucccuccggcccgacacccgcuacgugcugauggacgggagcaucauccaguucccgaacacguaccuggagggcuccgugcgggucgugaccaccuucgacagcgaguacugccgccacgggaccugcgagcgguccgaggcgggggugugcgucagcacguccggccgcugggugcucaacaacgacuacuaccggagccugcccgggguguucugcggcgucgacgccgugaaccugcucaccaacauguucacgccccugauccagcccaucggcgcccuggacaucuccgccagcaucgucgccgggggcaucguggcgaucguggugaccugccucgccuacuacuucaugcgcuuccggcgcgccuucggggaguacagccacgucguggccuucaacacccugcuguuccucauguccuucaccguccugugccugaccccgguguacagcuuccuccccggcguguacuccgucaucuaccuguaccugaccuucuaccucacgaacgacgugagcuuccuggcccacauccaguggauggugaugcugacgccccucguccccuucuggaucaccaucgcguacaucaucugcaucuccaccaagcacuucuacugguucuucagcaacuaccugaagcggcgcgugguguucaacggggucuccuucagcaccuucgaggaggccgcccugugcaccuuccuccugaacaaggagauguaccugaagcuccgguccgacgugcugcugccgcucacccaguacaaccgcuaccuggcccuguacaacaaguacaaguacuucagcggcgccauggacaccacguccuaccgggaggcggccugcugccaccucgccaaggcccugaacgacuucagcaacuccggcagcgacgugcuguaccagccgccccagaccuccaucaccagcgcgguccugcaguga

SEQ ID NO: 18365 - RNA, 1506 nt, Artificial Sequence
  SARS-CoV-2__MT786815.1__non-structural protein 4 (NSP4) CDS gc
augaagaucgugaacaacuggcugaagcagcucaucaaggucacccugguguuccuguucguggccgccaucuucuaccucaucacccccguccacgugaugagcaagcacacggacuucuccagcgagaucaucggcuacaaggcgaucgacgggggcgugacccgcgacaucgccuccaccgacacgugcuucgccaacaagcacgccgacuucgacaccugguucagccagcggggcggcuccuacaccaacgacaaggccugcccgcugaucgcggccgucaucacccgcgaggugggguucgugguccccggccugcccggcaccauccuccggacgaccaacggggacuuccugcacuuccugccccgcguguucagcgccgugggcaacaucugcuacaccccguccaagcucaucgaguacaccgacuucgccacgagcgcgugcguccuggccgccgagugcaccaucuucaaggacgccuccgggaagcccgugcccuacugcuacgacaccaacgugcuggagggcagcgucgccuacgagucccuccggcccgacacccgcuacgugcugauggacgggagcaucauccaguucuccaacacguaccuggagggcagcgugcgggucgugaccaccuucgacuccgaguacugccgccacgggaccugcgagcggagcgaggcgggggugugcgucuccacgagcggccgcugggugcucaacaacgacuacuaccggucccugccggggguguucugcggcgucgacgccgugaaccugcucaccaacauguucacgccccugauccagcccaucggcgcccuggacaucagcgccagcaucgucgccgggggcaucguggcgaucguggugaccugccucgccuacuacuucaugcgcuuccggcgcgccuucggggaguacucccacgucguggccuucaacacccugcuguuccucaugagcuucaccguccugugccugacccccguguacuccuuccucccgggcguguacagcgucaucuaccuguaccugaccuucuaccucacgaacgacguguccuuccuggcccacauccaguggauggugauguucacgccccugguccccuucuggaucaccaucgcguacaucaucugcaucagcaccaagcacuucuacugguucuucuccaacuaccucaagcggcgcgugguguucaacggggucagcuucuccaccuucgaggaggccgcccugugcaccuuccugcucaacaaggagauguaccugaagcugcggagcgacgugcuccugccccugacccaguacaaccgcuaccucgcccuguacaacaaguacaaguacuucuccggcgccauggacaccacgagcuaccgggaggcggccugcugccaccuggccaaggcccucaacgacuucuccaacagcggcuccgacgugcuguaccagccgccccagaccagcaucaccuccgcgguccugcaguga

SEQ ID NO: 18366 - RNA, 1506 nt, Artificial Sequence
  SARS-CoV-2__MT786838.1__non-structural protein 4 (NSP4) CDS gc
augaagaucgugaacaacuggcugaagcagcucaucaaggucacccugguguuccuguucguggccgccaucuucuaccucaucacccccguccacgugaugagcaagcacacggacuucuccagcgagaucaucggcuacaaggcgaucgacgggggcgugacccgcgacaucgccuccaccgacacgugcuucgccaacaagcacgccgacuucgacaccugguucagccagcggggcggcuccuacaccaacgacaaggccugcccccugaucgcggccgucaucacccgcgaggugggguucgugguccccggccugcccggcaccauccuccggacgaccaacggggacuuccugcacuuccugccccgcguguucagcgccgugggcaacaucugcuacaccccguccaagcucaucgaguacaccgacuucgccacgagcgcgugcguccuggccgccgagugcaccaucuucaaggacgccuccgggaagcccgugcccuacugcuacgacaccaacgugcuggagggcagcgucgccuacgagucccuccggcccgacacccgcuacgugcugauggacgggagcaucauccaguucccgaacacguaccuggagggcuccgugcgggucgugaccaccuucgacagcgaguacugccgccacgggaccugcgagcgguccgaggcgggggugugcgucagcacguccggccgcugggugcucaacaacgacuacuaccggagccugcccgggguguucugcggcgucgacgccgugaaccugcucaccaacauguucacgccccugauccagcccaucggcgcccuggacaucuccgccagcaucgucgccgggggcaucguggcgaucguggugaccugccucgccuacuacuucaugcgcuuccggcgcgccuucggggaguacagccacgucguggccuucaacacccugcuguuccucauguccuucaccguccugugccugaccccgguguacagcuuccuccccggcguguacuccgucaucuaccuguaccugaccuucuaccucacgaacgacgugagcuuccuggcccacauccaguggauggugauguucacgccccugguccccuucuggaucaccaucgcguacaucaucugcaucuccaccaagcacuucuacugguucuucagcaacuaccucaagcggcgcgugguguucaacggggucuccuucagcaccuucgaggaggccgcccugugcaccuuccugcucaacaaggagauguaccugaagcugcgguccgacgugcuccugccgcugacccaguacaaccgcuaccucgccuucuacaacaaguacaaguacuucagcggcgccauggacaccacguccuaccgggaggcggccugcugccaccuggccaaggcccugaacgacuucagcaacuccggcagcgacgugcucuaccagccgccccagaucuccaucaccagcgcgguccugcaguga

SEQ ID NO: 18367 - RNA, 1506 nt, Artificial Sequence
  SARS-CoV-2__MT775831.1__non-structural protein 4 (NSP4) CDS gc
augaagaucgugaacaacuggcugaagcagcucaucaaggucacccugguguuccuguucguggccgccaucuucuaccucaucacccccguccacgugaugagcaagcacacggacuucuccagcgagaucaucggcuacaaggcgaucgacgggggcgugacccgcgacaucgccuccaccgacacgugcuucgccaacaagcacgccgacuucgacaccugguucagccagcggggcggcuccuacaccaacgacaaggccugcccccugaucgcggccgucaucacccgcgaggugggguucgugguccccggccugcccggcaccauccuccggacgaccaacggggacuuccugcacuuccugccccgcguguucagcgccgugggcaacaucugcuacaccccguccaagcucaucgaguacaccgacuucgccacgagcgcgugcguccuggccgccgagugcaccaucuucaaggacgccuccgggaagcccgugcccuacugcuacgacaccaacgugcuggagggcagcgucgccuacgagucccuccggcccgacacccgcuacgugcugauggacgggagcaucauccaguucccgaacacguaccuggagggcuccgugcgggucgugaccaccuucgacagcgaguacugccgccacgggaccugcgagcgguccgaggcgggggugugcgucagcacguccggccgcugggugcucaacaacgacuacuaccggagccugcccgggguguucugcggcgucgacgccgugaaccugcucaccaacauguucacgccccugauccagcccaucggcgcccuggacaucuccgccagcaucgucgccgggggcaucguggcgaucguggugaccugccucgccuacuacuucaugcgcuuccggcgcgccuucggggacuacagccacgucguggccuucaacacccugcuguuccucauguccuucaccguccugugccugaccccgguguacagcuuccuccccggcguguacuccgucaucuaccuguaccugaccuucuaccucacgaacgacgugagcuuccuggcccacauccaguggauggugauguucacgccccugguccccuucuggaucaccaucgcguacaucaucugcaucuccaccaagcacuucuacugguucuucagcaacuaccucaagcggcgcgugguguucaacggggucuccuucagcaccuucgaggaggccgcccugugcaccuuccugcucaacaaggagauguaccugaagcugcgguccgacgugcuccugccgcugacccaguacaaccgcuaccucgcccuguacaacaaguacaaguacuucagcggcgccauggacaccacguccuaccgggaggcggccugcugccaccuggccaaggcccucaacgacuucagcaacuccggcagcgacgugcuguaccagccgccccagaccuccaucaccagcgcgguccugcaguga

SEQ ID NO: 18368 - RNA, 1506 nt, Artificial Sequence
  SARS-CoV-2__MT772215.1__non-structural protein 4 (NSP4) CDS gc
augaagaucgugaacaacuggcugaagcagcucaucaaggucacccugguguuccuguucguggccgccaucuucuaccucaucacccccguccacgugaugagcaagcacacggacuucuccagcgagaucaucggcuacaaggcgaucgacgggggcgugacccgcgacaucgccuccaccgacacgugcuucgccaacaagcacgccgacuucgacaccugguucagccagcgcgggggcuccuacaccaacgacaaggccugcccccugaucgcggccgucaucacccgggaggugggguucgugguccccggccugcccggcaccauccuccggacgaccaacggggacuuccugcacuuccugccccgcguguucagcgccgugggcaacaucugcuacaccccguccaagcucaucgaguacaccgacuucgccacgagcgcgugcguccuggccgccgagugcaccaucuucaaggacgccuccgggaagcccgugcccuacugcuacgacaccaacgugcuggagggcagcgucgccuacgagucccuccggcccgacacccgcuacgugcugauggacgggagcaucauccaguucccgaacacguaccuggagggcuccgugcgggucgugaccaccuucggcagcgaguacugccgccacgggaccugcgagcgguccgaggcgggcgugugcgucagcacguccgggcgcugggugcucaacaacgacuacuaccggagccugcccggcguguucugcggcgucgacgccgugaaccugcucaccaacauguucacgccccugauccagcccaucggggcccuggacaucuccgccagcaucgucgccggcgggaucguggcgaucguggugaccugccucgccuacuacuucaugcgcuuccggcgcgccuucggcgaguacagccacgucguggccuucaacacccugcuguuccucauguccuucaccguccugugccugaccccgguguacagcuuccuccccgggguguacuccgucaucuaccuguaccugaccuucuaccucacgaacgacgugagcuuccuggcccacauccaguggauggugauguucacgccccugguccccuucuggaucaccaucgcguacaucaucugcaucuccaccaagcacuucuacugguucuucagcaacuaccucaagcggcgcgugguguucaacggcgucuccuucagcaccuucgaggaggccgcccugugcaccuuccugcucaacaaggagauguaccugaagcugcgguccgacgugcuccugccgcugacccaguacaaccgcuaccucgcccuguacaacaaguacaaguacuucagcggcgccauggacaccacguccuaccgggaggcggccugcugccaccuggccaaggcccucaacgacuucagcaacuccgggagcgacgugcuguaccagccgccccagaccuccaucaccagcgcgguccugcaguga

SEQ ID NO: 18369 - RNA, 1506 nt, Artificial Sequence
  SARS-CoV-2__MT772564.1__non-structural protein 4 (NSP4) CDS gc
augaagaucgugaacaacuggcugaagcagcucaucaaggucacccugguguuccuguucguggccgccaucuucuaccucaucacccccguccacgugaugagcaagcacacggacuucuccagcgagaucaucggcuacaaggcgaucgacgggggcgugacccgcgacaucgccuccaccgacacgugcuucgccaacaagcacgccgacuucgacaccugguucagccagcggggcggcuccuacaccaacgacaaggccugcccccugaucgcggccgucaucacccgcgaggugggguucgugguccccggccugcccggcaccauccuccggacgaccaacggggacuuccugcacuuccugccccgcguguucagcgccgugggcaacaucugcuacaccccguccaagcucaucgaguacaccgacuucgccacgagcgcgugcguccuggccgccgagugcaccaucuucaaggacgccuccgggaagcccgugcccuacugcuacgacaccaacgugcuggagggcagcgucgccuacgagucccuccggcccgacacccgcuacgugcugauggacgggagcaucauccaguucccgaacacguaccuggagggcuccgugcgggucgugaccaccuucgacagcgaguacugccgccacgggaccugcgagcgguccgaggcgggggugugcgucagcacguccggccgcugggugcucaacaacgacuacuaccggagccugcccgggguguucugcggcgucgacgccgugaaccugcucaccaacauguucacgccccugauccagcccaucggcgcccuggacaucuccgccagcaucgucgccgggggcaucguggcgaucguggugaccugccucgccuacuacuucaugcgcuuccggcgcgccuucggggaguacagccacgucguggccuucaacacccugcuguuccucauguccuucaccguccugugccugaccccgguguacagcuuccuccccggcguguacuccgucaucuaccuguaccugaccuucuaccucacgaacgacgugagcuuccuggcccacauccaguggauggugauguucacgccccugguccccuucuggaucaccaucgcguacaucaucugcaucuucaccaagcacuucuacugguucuucuccaacuaccucaagcggcgcgugguguucaacggggucagcuucuccaccuucgaggaggccgcccugugcaccuuccugcucaacaaggagauguaccugaagcugcggagcgacgugcuccugccgcugacccaguacaaccgcuaccucgcccuguacaacaaguacaaguacuucuccggcgccauggacaccacgagcuaccgggaggcggccugcugccaccuggccaaggcccucaacgacuucuccaacagcggcuccgacgugcuguaccagccgccccagaccagcaucaccuccgcgguccugcaguga

SEQ ID NO: 18370 - RNA, 1506 nt, Artificial Sequence
  SARS-CoV-2__MT764170.1__non-structural protein 4 (NSP4) CDS gc
augaagaucgugaacaacuggcugaagcagcucaucaaggucacccugguguuccuguucguggccgccaucuucuaccucaucacccccguccacgugaugagcaagcacacggacuucuccagcgagaucaucggcuacaaggcgaucgacgggggcgugacccgcgacaucgccuccaccgacacgugcuucgccaacaagcacgccgacuucgacaccugguucagccagcggggcggcuccuacaccaacgacaaggccugcccccugaucgcggccgucaucacccgcgaggugggguucgugguccccggccugcccggcaccauccuccggacgaccaacggggacuuccugcacuuccugccccgcguguucagcgccgugggcaacaucugcuacaccccguccaagcucaucgaguacaccgacuucgccacgagcgcgugcguccuggccgccgagugcaccaucuucaaggacgccuccgggaagcccgugcccuacugcuacgacaccaacgugcuggagggcagcgucgccuacgagucccuccggcccgacacccgcuacgugcugauggacgggagcaucauccaguucccgaacacguaccuggagggcuccgugcgggucgugaccaccuucgacagcgaguacugccgccacgggaccugcgagcgguccgaggcgggggugugcgucagcacguccggccgcugggugcucaacaacgacuacuaccggagccugcccgggguguucugcggcgucgacgccgugaaccugcucaccaacauguucacgccccugauccagcccaucggcgcccuggacaucuccgccagcaucgucgccgggggcaucguggcgaucguggugaccugccucgccuacuacuucaugcgcuuccggcgcgccuucggggaguacagccacgucguggccuucaacacccugcuguuccucauguccuucaccguccugugccugaccccgguguacagcuuccuccccggcguguacuccgucaucuaccuguaccugaccuucuaccucacgaacgacgugagcuuccuggcccacauccaguggauggugauguucacgccccugguccccuucuggaucaccaucgcguacaucaucuucaucuccaccaagcacuucuacugguucuucagcaacuaccucaagcggcgcgugguguucaacggggucuccuucagcaccuucgaggaggccgcccugugcaccuuccugcucaacaaggagauguaccugaagcugcgguccgacgugcuccugccgcugacccaguacaaccgcuaccucgcccuguacaacaaguacaaguacuucagcggcgccauggacaccacguccuaccgggaggcggccugcugccaccuggccaaggcccucaacgacuucagcaacuccggcagcgacgugcuguaccagccgccccagaccuccaucaccagcgcgguccugcaguga

SEQ ID NO: 18371 - RNA, 1506 nt, Artificial Sequence
  SARS-CoV-2__MT755829.1__non-structural protein 4 (NSP4) CDS gc
augaagaucgugaacaacuggcugaagcagcucaucaaggucacccugguguuccuguucguggccgccaucuucuaccucaucacccccguccacgugaugagcaagcacacggacuucuccagcgagaucaucggcuacaaggcgaucgacgggggcgugacccgcgacaucgccuccaccgacacgugcuucgccaacaagcacgccgacuucgacaccugguucagccagcggggcggcuccuacaccaacgacaaggccugcccccugaucgcggccgucaucacccgcgaggugggguucgugguccccggccugcccggcaccauccuccggacgaccaacggggacuuccugcacuuccugccccgcguguucagcgccgugggcaacaucugcuacaccccguccaagcucaucgaguacaccgacuucgccacgagcgcgugcguccuggccgccgagugcaccaucuucaaggacgccuccgggaagcccgugcccuacugcuacgacaccaacgugcuggagggcagcgucgccuacgagucccuccggcccgacacccgcuacgugcugauggacgggagcaucauccaguucccgaacacguaccuggagggcuccgugcgggucgugaccaccuucgacagcgaguacugccgccacgggaccugcgagcgguccgaggcgggggugugcgucagcacguccggccgcugggugcucaacaacgacuacuaccggagccugcccgggguguucugcggcgucgacgccgugaaccugcucaccaacauguucacgccccugauccagcccaucggcgcccuggacaucuccgccagcaucgucgccgggggcaucguggcgaucguggugaccugccucgccuacuacuucaugcgcuuccggcgcgccuucggggaguacagccacgucguggccuucaacacccugcuguuccucauguccuucaccguccugugccugaccccgguguacagcuuccuccccggcguguacuccgucaucuaccuguaccugaccuucuaccucacgaacgacgugagcuuccuggcccacauccaguggauggugauguucacgccccugguccccuucuggaucaccaucgcguacaucaucugcaucuccaccaagcacuucuacugguucuucagcaacuaccucaagcggcgcgugguguucaacggggucuccuucagcaccuucgaggaggccgcccugugcaccuuccugcucaacaaggagauguaccugaagcugcgguccgacgugcuccugccguucacccaguacaaccgcuaccuggcccucuacaacaaguacaaguacuucagcggcgccauggacaccacguccuaccgggaggcggccugcugccaccuggccaaggcccugaacgacuucagcaacuccggcagcgacgugcucuaccagccgccccagaccuccaucaccagcgcgguccugcaguga

SEQ ID NO: 18372 - RNA, 1506 nt, Artificial Sequence
  SARS-CoV-2__MT755892.1__non-structural protein 4 (NSP4) CDS gc
augaagaucgugaacaacuggcugaagcagcucaucaaggucacccugguguuccuguucguggccgccaucuucuaccucaucacccccguccacgugaugagcaagcacacggacuucuccagcgagaucaucggcuacaaggcgaucgacgggggcgugacccgcgacaucgccuccaccgacacgugcuucgccaacaagcacgccgacuucgacaccugguucagccagcgcgggggcuccuacaccaacgacaaggccugcccccugaucgcggccgucaucacccgggaggugggguucgugguccccggccugcccggcaccauccuccggacgaccaacggggacuuccugcacuuccugccccgcguguucagcgccgugggcaacaucugcuacaccccguccaagcucaucgaguacaccgacuucgccacgagcgcgugcguccuggccgccgagugcaccaucuucaaggacgccuccgggaagcccgugcccuacugcuacgacaccaacgugcuggagggcagcgucgccuacgggucccuccggcccgacacccgcuacgugcugauggacggcagcaucauccaguucccgaacacguaccuggagggcuccgugcgggucgugaccaccuucgacagcgaguacugccgccacgggaccugcgagcgguccgaggcgggcgugugcgucagcacguccgggcgcugggugcucaacaacgacuacuaccggagccugcccggcguguucugcggcgucgacgccgugaaccugcucaccaacauguucacgccccugauccagcccaucggggcccuggacaucuccgccagcaucgucgccggcgggaucguggcgaucguggugaccugccucgccuacuacuucaugcgcuuccggcgcgccuucggcgaguacagccacgucguggccuucaacacccugcuguuccucauguccuucaccguccugugccugaccccgguguacagcuuccuccccgggguguacuccgucaucuaccuguaccugaccuucuaccucacgaacgacgugagcuuccuggcccacauccaguggauggugauguucacgccccugguccccuucuggaucaccaucgcguacaucaucugcaucuccaccaagcacuucuacugguucuucagcaacuaccucaagcggcgcgugguguucaacggcgucuccuucagcaccuucgaggaggccgcccugugcaccuuccugcucaacaaggagauguaccugaagcugcgguccgacgugcuccugccgcugacccaguacaaccgcuaccucgcccuguacaacaaguacaaguacuucagcggcgccauggacaccacguccuaccgggaggcggccugcugccaccuggccaaggcccucaacgacuucagcaacuccgggagcgacgugcuguaccagccgccccagaccuccaucaccagcgcgguccugcaguga

SEQ ID NO: 18373 - RNA, 1506 nt, Artificial Sequence
  SARS-CoV-2__MT745605.1__non-structural protein 4 (NSP4) CDS gc
augaagaucgugaacaacuggcugaagcagcucaucaaggucacccugguguuccuguucguggccgccaucuucuaccucaucacccccguccacgugaugagcaagcacacggacuucuccagcgagaucaucggcuacaaggcgaucgacgggggcgugacccgcgacaucgccuccaccgacacgugcuucgccaacaagcacgccgacuucgacaccugguucagccagcggggcggcuccuacaccaacgacaaggccugcccccugaucgcggccgucaucacccgcgaggugggguucgugguccccggccugcccggcaccauccuccggacgaccaacggggacuuccugcacuuccugccccgcguguucagcgccgugggcaacaucugcuacaccccguccaagcucaucgaguacaccgacuucgccacgagcgcgugcguccuggccgccgagugcaccaucuucaaggacgccuccgggaagcccgugcccuacugcuacgacaccaacgugcuggagggcagcgucgccuacgagucccuccggcccgacacccgcuacgugcugauggacgggagcaucauccaguucccgaacaucuaccuggagggcuccgugcgggucgugacgaccuucgacagcgaguacugccgccacgggaccugcgagcgguccgaggcgggggugugcgucagcaccuccggccgcugggugcucaacaacgacuacuaccggagccugcccgggguguucugcggcgucgacgccgugaaccugcucacgaacauguucacgccccugauccagcccaucggcgcccuggacaucuccgccagcaucgucgccgggggcaucguggcgaucguggugaccugccucgccuacuacuucaugcgcuuccggcgcgccuucggggaguacagccacgucguggccuucaacacccugcuguuccucauguccuucaccguccugugccugaccccgguguacagcuuccuccccggcguguacuccgucaucuaccuguaccugaccuucuaccucaccaacgacgugagcuuccuggcccacauccaguggauggugauguucacgccccugguccccuucuggaucaccaucgcguacaucaucugcaucuccaccaagcacuucuacugguucuucagcaacuaccucaagcggcgcgugguguucaacggggucuccuucagcaccuucgaggaggccgcccugugcacguuccugcucaacaaggagauguaccugaagcugcgguccgacgugcuccugccgcugacccaguacaaccgcuaccucgcccuguacaacaaguacaaguacuucagcggcgccauggacaccaccuccuaccgggaggcggccugcugccaccuggccaaggcccucaacgacuucagcaacuccggcagcgacgugcuguaccagccgccccagacguccaucaccagcgcgguccugcaguga

SEQ ID NO: 18374 - RNA, 1506 nt, Artificial Sequence
  SARS-CoV-2__MT745655.1__non-structural protein 4 (NSP4) CDS gc
augaagaucgugaacaacuggcugaagcagcucaucaaggucacccugguguuccuguucguggccgccaucuucuaccucaucacccccguccacgugaugagcaagcacacggacuucuccagcgagaucaucggcuacaaggcgaucgacgggggcgugacccgcgacaucgccuccaccgacacgugcuucgccaacaagcacgccgacuucgacaccugguucagccagcggggcggcuccuacaccaacgacaaggccugcccccugaucgcggccgucaucacccgcgaggugggguucgugguccccggccugcccggcaccauccuccggacgaccaacggggacuuccugcacuuccugccccgcguguucagcgccgugggcaacaucugcuacaccccguccaagcucaucgaguacaccgacuucgccacgagcgcgugcguccuggccgccgagugcaccaucuucaaggacgccuccgggaagcccgugcccuacugcuacgacaccaacgugcuggagggcagcgucgccuacgagucccuccggcccgacacccgcuacgugcugauggacgggagcaucauccaguucccgaacacguaccuggagggcuccgugcgggucgugaccaccuucgacagcgaguacugccgccacgggaccugcgagcgguccgaggcgggggugugcgucagcacguccggccgcugggugcucaacaacgacuacuaccggagccugcccgggguguucugcggcgucgacgccgugaaccugcucaccaacauguucacgccccugauccagcccaucggcgcccuggacaucuccgccagcaucgucgccgggggcaucguggcgaucguggugaccugccucgccuacuacuucaugcgcuuccggcgcgccuucggggaguacagccacgucguggccuucaacacccugcuguuccucauguccuucaccguccugugccugaccccgguguacagcuuccuccccggcguguacuccgucaucuaccuguaccugaccuucuaccucacgaacgacgugagcuuccuggcccacucccaguggauggugauguucacgccccugguccccuucuggaucaccaucgcguacaucaucugcaucagcaccaagcacuucuacugguucuucuccaacuaccucaagcggcgcgugguguucaacggggucagcuucuccaccuucgaggaggccgcccugugcaccuuccugcucaacaaggagauguaccugaagcugcggagcgacgugcuccugccgcugacccaguacaaccgcuaccucgcccuguacaacaaguacaaguacuucuccggcgccauggacaccacgagcuaccgggaggcggccugcugccaccuggccaaggcccucaacgacuucuccaacagcggcuccgacgugcuguaccagccgccccagaccagcaucaccuccgcgguccugcaguga

SEQ ID NO: 18375 - RNA, 1506 nt, Artificial Sequence
  SARS-CoV-2__MT745677.1__non-structural protein 4 (NSP4) CDS gc
augaagaucgugaacaacuggcugaagcagcucaucaaggucacccugguguuccuguucguggccgccaucuucuaccucaucacccccguccacgugaugagcaagcacacggacuucuccagcgagaucaucggcuacaaggcgaucgacgggggcgugacccgcgacaucgccuccaucgacacgugcuucgccaacaagcacgccgacuucgacaccugguucagccagcggggcggcuccuacaccaacgacaaggccugcccccugaucgcggccgucaucacccgcgaggugggguucgugguccccggccugcccggcaccauccuccggaccacgaacggggacuuccugcacuuccugccccgcguguucagcgccgugggcaacaucugcuacaccccguccaagcucaucgaguacaccgacuucgccaccagcgcgugcguccuggccgccgagugcacgaucuucaaggacgccuccgggaagcccgugcccuacugcuacgacaccaacgugcuggagggcagcgucgccuacgagucccuccggcccgacacccgcuacgugcugauggacgggagcaucauccaguucccgaacaccuaccuggagggcuccgugcgggucgugacgaccuucgacagcgaguacugccgccacgggaccugcgagcgguccgaggcgggggugugcgucagcaccuccggccgcugggugcucaacaacgacuacuaccggagccugcccgggguguucugcggcgucgacgccgugaaccugcucacgaacauguucacgccccugauccagcccaucggcgcccuggacaucuccgccagcaucgucgccgggggcaucguggcgaucguggugaccugccucgccuacuacuucaugcgcuuccggcgcgccuucggggaguacagccacgucguggccuucaacacccugcuguuccucauguccuucaccguccugugccugaccccgguguacagcuuccuccccggcguguacuccgucaucuaccuguaccugaccuucuaccucaccaacgacgugagcuuccuggcccacauccaguggauggugauguucacgccccugguccccuucuggaucaccaucgcguacaucaucugcaucuccaccaagcacuucuacugguucuucagcaacuaccucaagcggcgcgugguguucaacggggucuccuucagcaccuucgaggaggccgcccugugcacguuccugcucaacaaggagauguaccugaagcugcgguccgacgugcuccugccgcugacccaguacaaccgcuaccucgcccuguacaacaaguacaaguacuucagcggcgccauggacaccaccuccuaccgggaggcggccugcugccaccuggccaaggcccucaacgacuucagcaacuccggcagcgacgugcuguaccagccgccccagacguccaucaccagcgcgguccugcaguga

SEQ ID NO: 18376 - RNA, 1506 nt, Artificial Sequence
  SARS-CoV-2__MT740431.1__non-structural protein 4 (NSP4) CDS gc
augaagaucgugaacaacuggcugaagcagcucaucaaggucacccugguguuccuguucguggccgccaucuucuaccucaucacccccguccacgugaugagcaagcacacggacuucuccagcgagaucaucggcuacaaggcgaucgacgggggcgugacccgcgacaucgccuccaccgacacgugcuucgccaacaagcacgucgacuucgacaccugguucagccagcggggcggcuccuacaccaacgacaaggccugcccccugaucgccgcggugaucacccgcgaggugggguucgucgugcccggccugcccggcaccauccuccggacgaccaacggggacuuccugcacuuccugccccgcguguucagcgccgucggcaacaucugcuacaccccguccaagcucaucgaguacaccgacuucgccacgagcgccugcgugcuggcggccgagugcaccaucuucaaggacgccuccgggaagcccgugcccuacugcuacgacaccaacguccuggagggcagcguggccuacgagucccuccggcccgacacccgcuacgugcugauggacgggagcaucauccaguucccgaacacguaccuggagggcuccguccggguggugaccaccuucgacagcgaguacugccgccacgggaccugcgagcgguccgaggccggggucugcgugagcacguccggccgcugggugcucaacaacgacuacuaccggagccugcccggggucuucugcggcguggacgcggucaaccugcucaccaacauguucacgccccugauccagcccaucggcgcccuggacaucuccgccagcaucguggccgggggcaucguggccaucgucgugaccugccucgcguacuacuucaugcgcuuccggcgcgccuucggggaguacagccacguggucgccuucaacacccugcuguuccucauguccuucaccgugcugugccugaccccgguguacagcuuccuccccggcgucuacuccgugaucuaccuguaccugaccuucuaccucacgaacgacgugagcuuccuggcccacauccaguggauggucauguucacgccccuggugcccuucuggaucaccaucgccuacaucaucugcaucuccaccaagcacuucuacugguucuucagcaacuaccucaagcggcgcguggucuucaacgggguguccuucagcaccuucgaggaggcggcccugugcaccuuccugcucaacaaggagauguaccugaagcugcgguccgacgugcuccugccgcugacccaguacaaccgcuaccucgcccuguacaacaaguacaaguacuucagcggcgccauggacaccacguccuaccgggaggccgcgugcugccaccuggccaaggcccucaacgacuucagcaacuccggcagcgacguccuguaccagccgccccagaccuccaucaccagcgccgugcugcaguga

SEQ ID NO: 18377 - RNA, 1506 nt, Artificial Sequence
  SARS-CoV-2__MT731936.1__non-structural protein 4 (NSP4) CDS gc
augaagaucgugaacaacuggcugaagcagcucaucaaggucacccugguguuccuguucguggccgccaucuucuaccucaucacccccguccacgugaugagcaagcacacggacuucuccagcgagaucaucggcuacaaggcgaucgacgggggcgugacccgcgacaucgccuccaccgacacgugcuucgccaacaagcacgccgacuucgacaccugguucagccagcgcgggggcuccuacaccaacgacaaggccugcccgcugaucgcggccgucaucacccgggaggugggguucgugguccccggccugcccggcaccauccuccggacgaccaacggggacuuccugcacuuccugccccgcguguucagcgccgugggcaacaucugcuacaccccguccaagcucaucgaguacaccgacuucgccacgagcgcgugcguccuggccgccgagugcaccaucuucaaggacgccuccggcaagagcgugcccuacugcuacgacaccaacgugcuggagggcuccgucgccuacgagagccuccggcccgacacccgcuacgugcugauggacggguccaucauccaguuccccaacacguaccuggagggcagcgugcgggucgugaccaccuucgacuccgaguacugccgccacgggaccugcgagcggagcgaggcgggggugugcgucuccacgagcggccgcugggugcucaacaacgacuacuaccggucccugccggggguguucugcggcgucgacgccgugaaccugcucaccaacauguucacgccccugauccagcccaucggcgcccuggacaucagcgccagcaucgucgccgggggcaucguggcgaucguggugaccugccucgccuacuacuucaugcgcuuccggcgcgccuucggggaguacucccacgucguggccuucaacacccugcuguuccucaugagcuucaccguccugugccugacccccguguacuccuuccucccgggcguguacagcgucaucuaccuguaccugaccuucuaccucacgaacgacguguccuuccuggcccacauccaguggauggugauguucacgccccugguccccuucuggaucaccaucgcguacaucaucugcaucagcaccaagcacuucuacugguucuucuccaacuaccucaagcggcgcgugguguucaacggggucagcuucuccaccuucgaggaggccgcccugugcaccuuccugcucaacaagggcauguaccugaagcugcggagcgacgugcuccugccccugacccaguacaaccgcuaccucgcccuguacaacaaguacaaguacuucuccggcgccauggacaccacgagcuaccgggaggcggccugcugccaccuggccaaggcccucaacgacuucuccaacagcggguccgacgugcuguaccagccgccccagaccagcaucaccuccgcgguccugcaguga

SEQ ID NO: 18378 - RNA, 1506 nt, Artificial Sequence
  SARS-CoV-2__MT706149.1__non-structural protein 4 (NSP4) CDS gc
augaagaucgugaacaacuggcugaagcagcucaucaaggucacccugguguuccuguucguggccgccaucuucuaccucaucacccccguccacgugaugagcaagcacacggacuucuccagcgagaucaucggcuacaaggcgaucgacgggggcgugacccgcgacaucgccuccaccgacacgugcuucgccaacaagcacgccgacuucgacaccugguucagccagcggggcggcuccuacaccaacgacaaggccugcccgcugaucgcggccgucaucacccgcgaggugggguucgugguccccggccugcccggcaccauccuccggacgaccaacggggacuuccugcacuuccugccccgcguguucagcgccgugggcaacaucugcuacaccccguccaagcucaucgaguacaccgacuucgccacgagcgcgugcguccuggccgccgagugcaccaucuucaaggacgccuccgggaagcccgugcccuacugcuacgacaccaacgugcuggagggcagcgucgccuacgagucccuccggagcgacacccgcuacgugcugauggacggguccaucauccaguuccccaacacguaccuggagggcagcgugcgggucgugaccaccuucgacuccgaguacugccgccacgggaccugcgagcggagcgaggcgggggugugcgucuccacgagcggccgcugggugcucaacaacgacuacuaccggucccugccggggguguucugcggcgucgacgccgugaaccugcucaccaacauguucacgccccugauccagcccaucggcgcccuggacaucagcgccagcaucgucgccgggggcaucguggcgaucguggugaccugccucgccuacuacuucaugcgcuuccggcgcgccuucggggaguacucccacgucguggccuucaacacccugcuguuccucaugagcuucaccguccugugccugacccccguguacuccuuccucccgggcguguacagcgucaucuaccuguaccugaccuucuaccucacgaacgacguguccuuccuggcccacauccaguggauggugauguucacgccccugguccccuucuggaucaccaucgcguacaucaucugcaucagcaccaagcacuucuacugguucuucuccaacuaccucaagcggcgcgugguguucaacggggucagcuucuccaccuucgaggaggccgcccugugcaccuuccugcucaacaaggagauguaccugaagcugcggagcgacgugcuccugccccugacccaguacaaccgcuaccucgcccuguacaacaaguacaaguacuucuccggcgccauggacaccacgagcuaccgggaggcggccugcugccaccuggccaaggcccucaacgacuucuccaacagcggcuccgacgugcuguaccagccgccccagaccagcaucaccuccgcgguccugcaguga

SEQ ID NO: 18379 - RNA, 1506 nt, Artificial Sequence
  SARS-CoV-2__MT706230.1__non-structural protein 4 (NSP4) CDS gc
augaagaucgugaacaacuggcugaagcagcucaucaaggucacccugguguuccuguucguggccgccaucuucuaccucaucacccccguccacgugaugagcaagcacacggacuucuccagcgagaucaucggcuacaaggcgaucgacgggggcgugacccgcgacaucgccuccaccgacacgugcuucgccaacaagcacgccgacuucgacaccugguucagccagcggggcggcuccuacaccaacgacaaggccugcccccugaucgcggccgucaucacccgcgaggugggguucgugguccccggccugcccggcaccauccuccggacgaccaacggggacuuccugcacuuccugccccgcguguucagcgccgugggcaacaucugcuacaccccguccaagcucaucgaguacaccgacuucgccacgagcgcgugcguccuggccgccgagugcaccaucuucaaggacgccuccgggaagccccugcccuacugcuacgacaccaacgugcucgagggcagcguggccuacgagucccugcggcccgacacccgcuacguccugauggacgggagcaucauccaguucccgaacacguaccucgagggcuccgugcggguggucaccaccuucgacagcgaguacugccgccacgggaccugcgagcgguccgaggcgggggugugcgugagcacguccggccgcuggguccugaacaacgacuacuaccggagccugcccgggguguucugcggcguggacgccgucaaccuccugaccaacauguucacgccccugauccagcccaucggcgcccucgacaucuccgccagcaucguggccgggggcaucgucgcgaucguggugaccugccuggccuacuacuucaugcgcuuccggcgcgccuucggggaguacagccacgucguggccuucaacacccuccuguuccugauguccuucaccgugcugugccucaccccggucuacagcuuccugcccggcguguacuccgugaucuaccuguaccucaccuucuaccugacgaacgacgucagcuuccuggcccacauccaguggauggugauguucacgccccucgugcccuucuggaucaccaucgcguacaucaucugcaucuccaccaagcacuucuacugguucuucagcaacuaccugaagcggcgcgucguguucaacgggguguccuucagcaccuucgaggaggccgcccugugcaccuuccuccugaacaaggagauguaccugaagcuccgguccgacguccugcugccgcucacccaguacaaccgcuaccuggcccuguacaacaaguacaaguacuucagcggcgccauggacaccacguccuaccgggaggcggccugcugccaccucgccaaggcccugaacgacuucagcaacuccggcagcgacgugcuguaccagccgccccagaccuccaucaccagcgcggugcugcaguga

SEQ ID NO: 18380 - RNA, 1506 nt, Artificial Sequence
  SARS-CoV-2__MT706254.1__non-structural protein 4 (NSP4) CDS gc
augaagaucgugaacaacuggcugaagcagcucaucaaggucacccugguguuccuguucguggccgccaucuucuaccucaucacccccguccacgugaugagcaagcacacggacuucuccagcgagaucaucggcuacaaggcgaucgacgggggcgugacccgcgacaucgccuccaccgacacgugcuucgccaacaagcacgccgacuucgacaccugguucagccagcggggcggcuccuacaccaacgacaaggccugcccccugaucgcggccgucaucacccgcgaggugggguucgugguccccggccugcccggcaccauccuccggacgaccaacggggacuuccugcacuuccugccccgcguguucagcgccgugggcaacaucugcuacaccccguccaagcucaucgaguacaccgacuucgccacgagcgcgugcguccuggccgccgagugcaccaucuucaaggacgccuccgggaagcccgugcccuacugcuacgacaccaacgugcuggagggcagcgucgccuacgagucccuccggcccgacacccgcuacgugcugauggacgggagcaucauccaguucccgaacacguaccuggagggcuccgugcgggucgugaccaccuucgacagcgaguacugccgccacgggaccugcgagcgguccgaggcgggggugugcgucagcacguccggccgcugggugcucaacaacgacuacuaccggagccugcccgggguguucugcggcgucgacgccgugaaccugcucaccaacauguucacgccccugauccagcccaucggcgcccuggacaucuccgccagcaucgucgccgggggcaucguggcgaucguggugaccugccucgccuacuacuucaugcgcuuccggcgcgccuucggggaguacagccacgucguggccuucaacacccugcuguuccucauguccuucaccguccugugccugaccccgguguacagcuuccuccccggcguguacuccgucaucuaccuguaccugaccuucuaccucacgaacgacgugagcuuccuggcccacauccaguggauggugauguucacgccccugguccccuucuggaugaccaucgcguacaucaucugcaucuccaccaagcacuucuacugguucuucagcaacuaccucaagcggcgcgugguguucaacggggucuccuucagcaccuucgaggaggccgcccugugcaccuuccugcucaacaaggagauguaccugaagcugcgguccgacgugcuccugccgcugacccaguacaaccgcuaccucgcccuguacaacaaguacaaguacuucagcggcgccauggacaccacguccuaccgggaggcggccugcugccaccuggccaaggcccucaacgacuucagcaacuccggcagcgacgugcuguaccagccgccccagaccuccaucaccagcgcgguccugcaguga

SEQ ID NO: 18381 - RNA, 1506 nt, Artificial Sequence
  SARS-CoV-2__MT706307.1__non-structural protein 4 (NSP4) CDS gc
augaagaucgugaacaacuggcugaagcagcucaucaaggucacccugguguuccuguucguggccgccaucuucuaccucaucacccccguccacgugaugagcaagcacacggacuucuccagcgagaucaucggcuacaaggcgaucgacgggggcgugacccgcgacaucgccuccaccgacacgugcuucgccaacaagcacgccgacuucgacaccugguucagccagcggggcggcuccuacaccaacgacaaggccugcccccugaucgcggccgucaucacccgcgaggugggguucgugguccccggccugcccggcaccauccuccggacgaccaacggggacuuccugcacuuccugccccgcguguucagcgccgugggcaacaucugcuacaccccguccaagcucaucgaguacaccgacuucgccacgagcgcgugcguccuggccgccgagugcaccaucuucaaggacgccuccgggaagcccgugcccuacugcuacgacaccaacgugcuggagggcagcgucgccuacgagucccuccggcccgacacccgcuacgugcugauggacgggagcaucauccaguucccgaacacguaccuggagggcuccgugcgggucgugaccaccuucgacagcgaguacugccgccacgggaccugcgagcgguccgaggcgggggugugcgucagcacguccggccgcugggugcucaacaacgacuacuaccggagccugcccgggguguucugcggcgucgacgccgugaaccugcucaccaacauguucacgccccugauccagcccaucggcgcccuggacaucuccgccagcaucgucgccgggggcaucguggcgaucguggugaccugccucgccuacuacuucaugcgcuuccggcgcgccuucggggaguacagccacgucguggccuucaacauccugcuguuccucauguccuucaccguccugugccugaccccgguguacagcuuccuccccggcguguacuccgucaucuaccuguaccugaccuucuaccucaccaacgacgugagcuuccuggcccacauccaguggauggugauguucacgccccugguccccuucuggaucaccaucgcguacaucaucugcaucuccaccaagcacuucuacugguucuucagcaacuaccucaagcggcgcgugguguucaacggggucuccuucagcaccuucgaggaggccgcccugugcacguuccugcucaacaaggagauguaccugaagcugcgguccgacgugcuccugccgcugacccaguacaaccgcuaccucgcccuguacaacaaguacaaguacuucagcggcgccauggacaccaccuccuaccgggaggcggccugcugccaccuggccaaggcccucaacgacuucagcaacuccggcagcgacgugcuguaccagccgccccagacguccaucaccagcgcgguccugcaguga

SEQ ID NO: 18382 - RNA, 1506 nt, Artificial Sequence
  SARS-CoV-2__MT706334.1__non-structural protein 4 (NSP4) CDS gc
augaagaucgugaacaacuggcugaagcagcucaucaaggucacccugguguuccuguucguggccgccaucuucuaccucaucacccccguccacgugaugagcaagcacacggacuucuccagcgagaucaucggcuacaaggcgaucgacgggggcgugacccgcgacaucgccuccaccgacacgugcuucgccaacaagcacgccgacuucgacaccugguucagccagcggggcggcuccuacaccaacgacaaggccugcccccugaucgcggccgucaucacccgcgaggugggguucgugguccccggccugcccggcaccauccuccggacgaccaacggggacuuccugcacuuccugccccgcguguucagcgccgugggcaacaucugcuacaccccguccaagcucaucgaguacaccgacuucgccacgagcgcgugcguccuggccgccgagugcaccaucuucaaggacgccuccgggaagcccgugcccuacugcuacgacaccaacgugcuggagggcagcgucgccuacgagucccuccggcccgacacccgcuacgugcugauggacgggagcaucauccaguucccgaacacguaccuggagggcuccgugcgggucgugaccaccuucgacagcgaguacugccgccacgggaccugcgagcgguccgaggcgggggugugcgucagcacguccggccgcugggugcucaacaacgacuacuaccggagccugcccgggguguucugcggcgucgacgccgugaaccugcucaccaacauguucacgccccugauccagcccaucggcgcccuggacaucuccgccagcaucgucgccgggggcaucguggcgaucguggugaccugccucgccuacuacuucaugcgcuuccggcgcgccuucggggaguacagccacgucguggccuucaacacccugcuguuccucauguccuucaccguccugugccugaccccgguguacagcuuccuccccggcguguacuccgucaucuaccuguaccugaccuucuaccucacgaacgacgugagcuuccuggcccacauccaguggauggugauguucacgccccugguccccuucuggaucaccaucgcguacaucaucugcaucuccaccaagcacuucuacugguucuucagcaacuaccucaagcggcgcgugguguucaacggggucuccuucagcaccuucgaggaggccgcccugugcaccuuccugcucaacaaggagauguaccugaagcugcggggcgacgugcuccugccgcugacccaguacaaccgcuaccucgcccuguacaacaaguacaaguacuucuccggcgccauggacaccacgagcuaccgggaggcggccugcugccaccuggccaaggcccucaacgacuucuccaacagcggguccgacgugcuguaccagccgccccagaccagcaucaccuccgcgguccugcaguga

SEQ ID NO: 18383 - RNA, 1506 nt, Artificial Sequence
  SARS-CoV-2__MT706437.1__non-structural protein 4 (NSP4) CDS gc
augaagaucgugaacaacuggcugaagcagcucaucaaggucacccugguguuccuguucguggccgccaucuucuaccucaucacccccguccacgugaugagcaagcacacggacuucuccagcgagaucaucggcuacaaggcgaucgacgggggcgugacccgcgacaucgccuccaccgacacgugcuucgccaacaagcacgccgacuucgacaccugguucagccagcggggcggcuccuacaccaacgacaaggccugcccccugaucgcggccgucaucacccgcgaggugggguucgugguccccggccugcccggcaccauccuccggacgaccaacggggacuuccugcacuuccugccccgcguguucagcgccgugggcaacaucugcuacaccccguccaagcucaucgaguacaccgacuucgccacgagcgcgugcguccuggccgccgagugcaccaucuucaaggacgccuccgggaagcccgugcccuacugcuacgacaccaacgugcuggagggcagcgucgccuacgagucccuccggcccgacacccgcuacgugcugauggacgggagcaucauccaguucccgaacacguaccuggagggcuccgugcgggucgugaccaccuucgacagcgaguacugccgccacgggaccugcgagcgguccgaggcgggggugugcgucagcacguccggccgcugggugcucaacaacgacuacuaccggagccugcccgggguguucugcggcgucgacgccgugaaccugcucaccaacauguucacgccccugauccagcccaucggcgcccuggacaucuccgccagcaucgucgccgggggcaucguggcgaucguggugaccugccucgccuacuacuucaugcgcuuccggcgcgccuucggggaguacagccacgucguggccuucaacacccugcuguuccucauguccuucaccguccugugccugaccccgguguacagcuuccuccccggcguguacuccgucaucuaccuguaccugaccuucuaccucacgaacgacgugagcuuccuggcccacauccaguggauggugauguucacgccccugguccccuucugggugaccaucgcguacaucaucugcaucuccaccaagcacuucuacugguucuucagcaacuaccucaagcggcgcguggucuucaacgggguguccuucagcaccuucgaggaggccgcccugugcaccuuccugcucaacaaggagauguaccugaagcugcgguccgacgugcuccugccgcugacccaguacaaccgcuaccucgcccuguacaacaaguacaaguacuucagcggcgccauggacaccacguccuaccgggaggcggccugcugccaccuggccaaggcccucaacgacuucagcaacuccggcagcgacguccuguaccagccgccccagaccuccaucaccagcgcggugcugcaguga

SEQ ID NO: 18384 - RNA, 1506 nt, Artificial Sequence
  SARS-CoV-2__MT704022.1__non-structural protein 4 (NSP4) CDS gc
augaagaucgugaacaacuggcugaagcagcucaucaaggucacccugguguuccuguucguggccgccaucuucuaccucaucacccccguccacgugaugagcaagcacacggacuucuccagcgagaucaucggcuacaaggcgaucgacgggggcgugacccgcgacaucgccuccaccgacacgugcuucgccaacaagcacgccgacuucgacaccugguucagccagcggggcggcuccuacaccaacgacaaggccugcccccugaucgcggccgucaucacccgcgaggugggguucgugguccccggccugcccggcaccauccuccggacgaccaacggggacuuccugcacuuccugccccgcguguucagcgccgugggcaacaucugcuacaccccguccaagcucaucgaguacaccgacuucgccacgagcgcgugcguccuggccgccgagugcaccaucuucaaggacgccuccgggaagcccgugcccuacugcuacgacaccaacgugcuggagggcagcgucgccuacgagucccuccggcccgacacccgcuacgugcugauggacgggagcaucauccaguucccgaacacguaccuggagggcuccgugcgggucgugaccaccuucgacagcgaguacugccgccacgggaccugcgagcgguccgaggcgggggugugcgucagcacguccggccgcugggugcucaacaacgacuacuaccggagccugcccgggguguucugcggcgucgacgccgugaaccugcucaccaacauguucacgccccugauccagcccaucggcgcccuggacaucuccgccagcaucgucgccgggggcaucguggcgaucaucgugaccugccucgccuacuacuucaugcgcuuccggcgcgccuucggggaguacagccacgucguggccuucaacacccugcuguuccucauguccuucaccgugcugugccugaccccggucuacagcuuccuccccggcguguacuccgugaucuaccuguaccugaccuucuaccucacgaacgacgucagcuuccuggcccacauccaguggauggugauguucacgccccuggugcccuucuggaucaccaucgcguacaucaucugcaucuccaccaagcacuucuacugguucuucagcaacuaccucaagcggcgcgucguguucaacgggguguccuucagcaccuucgaggaggccgcccugugcaccuuccugcucaacaaggagauguaccugaagcugcgguccgacguccuccugccgcugacccaguacaaccgcuaccucgcccuguacaacaaguacaaguacuucagcggcgccauggacaccacguccuaccgggaggcggccugcugccaccuggccaaggcccucaacgacuucagcaacuccggcagcgacgugcuguaccagccgccccagaccuccaucaccagcgcggugcugcaguga

SEQ ID NO: 18385 - RNA, 1506 nt, Artificial Sequence
  SARS-CoV-2__MT704064.1__non-structural protein 4 (NSP4) CDS gc
augaagaucgugaacaacuggcugaagcagcucaucaaggucacccugguguuccuguucguggccgccaucuucuaccucaucacccccguccacgugaugagcaagcacacggacuucuccagcgagaucaucggcuacaaggcgaucgacgggggcgugacccgcgacaucgccuccaccgacacgugcuucgccaacaagcacgccgacuucgacaccugguucagccagcggggcggcuccuacaccaacgacaaggccugcccccugaucgcggccgucaucacccgcgaggugggguucgugguccccggccugcccggcaccauccuccggacgaccaacggggacuuccugcacuuccugccccgcguguucagcgccgugggcaacaucugcuacaccccguccaagcucaucgaguacaccgacuucgccacgagcgcgugcguccuggccgccgagugcaccaucuucaaggacgccuccgggaagcccgugcccuacugcuacgacaccaacgugcuggagggcagcgucgccuacgagucccuccggcccgacacccgcuacgugcugauggacgggagcaucauccaguucccgaacacguaccuggagggcuccgugcgggucgugaccaccuucgacagcgaguacugccgccacgggaccugcgagcgguccgaggcgggggugugcgucagcacguccggccgcugggugcucaacaacgacuucuaccggagccugcccgggguguucugcggcgucgacgccgugaaccugcucaccaacauguucacgccccugauccagcccaucggcgcccuggacaucuccgccagcaucgucgccgggggcaucguggcgaucguggugaccugccucgccuacuacuucaugcgcuuccggcgcgccuucggggaguacagccacgucguggccuucaacacccugcuguuccucauguccuucaccguccugugccugaccccgguguacagcuuccuccccggcguguacuccgucaucuaccuguaccugaccuucuaccucacgaacgacgugagcuuccuggcccacauccaguggauggugauguucacgccccugguccccuucuggaucaccaucgcguacaucaucugcaucuccaccaagcacuucuacugguucuucagcaacuaccucaagcggcgcgugguguucaacggggucuccuucagcaccuucgaggaggccgcccugugcaccuuccugcucaacaaggagauguaccugaagcugcgguccgacgugcuccugccgcugacccaguacaaccgcuaccucgcccuguacaacaaguacaaguacuucagcggcgccauggacaccacguccuaccgggaggcggccugcugccaccuggccaaggcccucaacgacuucagcaacuccggcagcgacgugcuguaccagccgccccagaccuccaucaccagcgcgguccugcaguga

SEQ ID NO: 18386 - RNA, 1506 nt, Artificial Sequence
  SARS-CoV-2__MT704121.1__non-structural protein 4 (NSP4) CDS gc
augaagaucgugaacaacuggcugaagcagcucaucaaggucacccugguguuccuguucguggccgccaucuucuaccucaucacccccguccacgugaugagcaagcacacggacuucuccagcgagaucaucggcuacaaggcgaucgacgggggcgugacccgcgacaucgccuccaccgacacgugcuucgccaacaagcacgccgacuucgacaccugguucagccagcggggcggcuccuacaccaacgacaaggccugcccccugaucgcggccgucaucacccgcgaggugggguucgugguccccggccugcccggcaccauccuccggacgaccaacggggacuuccugcacuuccugccccgcguguucagcgccgugggcaacaucugcuacaccccguccaagcucaucgaguacaccgacuucgccacgagcgcgugcguccuggccgccgagugcaccaucuucaaggacgccuccgggaagcccgugcccuacugcuacgacaccaacgugcuggagggcagcgucgccuacgagucccuccggcccgacacccgcuacgugcugauggacgggagcaucauccaguucccgaacacguacuucgagggcuccgugcgggucgugaccaccuucgacagcgaguacugccgccacgggaccugcgagcgguccgaggcgggggugugcgucagcacguccggccgcugggugcugaacaacgacuacuaccggagccuccccgggguguucugcggcgucgacgccgugaaccugcugaccaacauguucacgccccucauccagcccaucggcgcccuggacaucuccgccagcaucgucgccgggggcaucguggcgaucguggugaccugccuggccuacuacuucaugcgcuuccggcgcgccuucggggaguacagccacgucguggccuucaacacccuccuguuccugauguccuucaccguccucugccugaccccgguguacagcuuccugcccggcguguacuccgucaucuaccucuaccugaccuucuaccugacgaacgacgugagcuuccucgcccacauccaguggauggugauguucacgccccugguccccuucuggaucaccaucgcguacaucaucugcaucuccaccaagcacuucuacugguucuucagcaacuaccugaagcggcgcgugguguucaacggggucuccuucagcaccuucgaggaggccgcccucugcaccuuccugcugaacaaggagauguaccucaagcugcgguccgacgugcugcucccgcugacccaguacaaccgcuaccuggcccucuacaacaaguacaaguacuucagcggcgccauggacaccacguccuaccgggaggcggccugcugccaccuggccaaggcccugaacgacuucagcaacuccggcagcgacgugcucuaccagccgccccagaccuccaucaccagcgcgguccugcaguga

SEQ ID NO: 18387 - RNA, 1506 nt, Artificial Sequence
  SARS-CoV-2__MT704136.1__non-structural protein 4 (NSP4) CDS gc
augaagaucgugaacaacuggcugaagcagcucaucaaggucacccugguguuccuguucguggccgccaucuucuaccucaucacccccguccacgugaugagcaagcacacggacuucuccagcgagaucaucggcuacaaggcgaucgacgggggcgugacccgcgacaucgccuccaccgacacgugcuucgccaacaagcacgccgacuucgacaccugguucagccagcggggcggcuccuacaccaacgacaaggccugcccccugaucgcggccgucaucacccgcgaggugggguucgugguccccggccugcccggcaccauccuccggacgaccaacggggacuuccugcacuuccugccccgcguguucagcgccgugggcaacaucugcuacaccccguccaagcucaucgaguacaccgacuucgccacgagcgcgugcguccuggccgccgagugcaccaucuucaaggacgccuccgggaagcccgugcccuacugcuacgacaccaacgugcuggagggcagcgucgccuacgagucccuccggcccgacacccgcuacgugcugauggacgggagcaucauccaguucccgaacacguaccuggagggcuccgugcgggucgugaccaccuucgacagcgaguacugccgccacgggaccugcgagcgguccgaggcgggggugugcgucagcacguccggccgcugggugcucaacaacgacuacuaccggagccugcccgggguguucugcggcgucgacgccgugaaccugcucaccaacauguucacgccccugauccagcccaucggcgcccuggacaucuccgccagcaucgucgccgggggcaucguggcgaucguggugaccugccucgccuacuacuucaugcgcuuccggcgcgccuucggggaguacagccacgucguggccuucaacacccugcuguucuucauguccuucaccguccucugccugaccccgguguacagcuuccugcccggcguguacuccgucaucuaccucuaccugaccuucuaccugacgaacgacgugagcuuccucgcccacauccaguggauggugauguucacgccccugguccccuucuggaucaccaucgcguacaucaucugcaucuccaccaagcacuucuacugguucuucagcaacuaccugaagcggcgcgugguguucaacggggucuccuucagcaccuucgaggaggccgcccucugcaccuuccugcugaacaaggagauguaccucaagcugcgguccgacgugcugcucccgcugacccaguacaaccgcuaccuggcccucuacaacaaguacaaguacuucagcggcgccauggacaccacguccuaccgggaggcggccugcugccaccuggccaaggcccugaacgacuucagcaacuccggcagcgacgugcucuaccagccgccccagaccuccaucaccagcgcgguccugcaguga

SEQ ID NO: 18388 - RNA, 1506 nt, Artificial Sequence
  SARS-CoV-2__MT683386.1__non-structural protein 4 (NSP4) CDS gc
augaagaucgugaacaacuggcugaagcagcucaucaaggucacccugguguuccuguucguggccgccaucuucuaccucaucacccccguccacgugaugagcaagcacacggacuucuccagcgagaucaucggcuacaaggcgaucgacgggggcgugacccgcgacaucgccuccaccgacacgugcuucgccaacaagcacgccgacuucgacaccugguucagccagcggggcggcuccuacaccaacgacaaggccugcccccugaucgcggccgucaucacccgcgaggugggguucgugguccccggccugcccggcaccauccuccggacgaccaacggggacuuccugcacuuccugccccgcguguucagcgccgugggcaacaucugcuacaccccguccaagcucaucgaguacaccgacuucgccacgagcgcgugcguccuggccgccgagugcaccaucuucaaggacgccuccgggaagcccgugcccuacugcuacgacaccaacgugcuggagggcagcgucgccuacgagucccuccggcccgacacccgcuacgugcugauggacgggagcaucauccaguucccgaacacguaccuggagggcuccgugcgggucgugaccaccuucgacagcgaguacugccgccacgggaccugcgagcgguccgaggcgggggugugcgucagcacguccggccgcugggugcucaacaacgacuacuaccggagccugcccgggguguucugcggcgucgacgccgugaaccugcucaccaacauguucacgccccugauccagcccaucggcgcccuggacaucuccgccagcaucgucgccgggggcaucguggcgauccucgugaccugccuggccuacuacuucaugcgcuuccggcgcgccuucggggaguacagccacgucguggccuucaacacccuccuguuccugauguccuucaccgugcugugccucaccccggucuacagcuuccugcccggcguguacuccgugaucuaccuguaccucaccuucuaccugacgaacgacgucagcuuccuggcccacauccaguggauggugauguucacgccccucgugcccuucuggaucaccaucgcguacaucaucugcaucuccaccaagcacuucuacugguucuucagcaacuaccugaagcggcgcgucguguucaacgggguguccuucagcaccuucgaggaggccgcccugugcaccuuccuccugaacaaggagauguaccugaagcuccgguccgacguccugcugccgcucacccaguacaaccgcuaccuggcccuguacaacaaguacaaguacuucagcggcgccauggacaccacguccuaccgggaggcggccugcugccaccucgccaaggcccugaacgacuucagcaacuccggcagcgacgugcuguaccagccgccccagaccuccaucaccagcgcggugcugcaguga

SEQ ID NO: 18389 - RNA, 1506 nt, Artificial Sequence
  SARS-CoV-2__MT627391.1__non-structural protein 4 (NSP4) CDS gc
augaagaucgugaacaacuggcugaagcagcucaucaaggucacccugguguuccuguucguggccgccaucuucuaccucaucacccccguccacgugaugagcaagcacacggacuucuccagcgagaucaucggcuacaaggcgaucgacgggggcgugacccgcgacaucgccuccaccgacacgugcuucgccaacaagcacgccgacuucgacaccugguucagccagcggggcggcuccuacaccaacgacaaggccugcccccugaucgcggccgucaucacccgcgaggugggguucgugguccccggccugcccggcaccauccuccggacgaccaacggggacuuccugcacuuccugccccgcguguucagcgccgugggcaacaucugcuacaccccguccaagcucaucgaguacaccgacuucgccacgagcgcgugcguccuggccgccgagugcaccaucuucaaggacgccuccgggaagcccgugcccuacugcuacgacaccaacgugcuggagggcagcgucgccuacgagucccuccggcccgacacccgcuacgugcugauggacgggagcaucauccaguucccgaacacguaccuggagggcuccgugcgggucgugaccaccuucgacagcgaguacugccgccacgggaccugcgagcgguccgaggcgggggugugcgucagcacguccggccgcugggugcucaacaacgacuacuaccggagccugcccgggguguucugcggcgucgacgccgugaaccugcucaccaacauguucacgccccugauccagcccaucggcgcccuggacaucuccgccagcaucgucgccgggggcaucguggcgaucguggugaccugccucgccuacuacuucaugcgcuuccggcgcgccuucggggccuacagccacgucguggccuucaacacccugcuguuccucauguccuucaccguccugugccugaccccgguguacagcuuccuccccggcguguacuccgucaucuaccuguaccugaccuucuaccucacgaacgacgugagcuuccuggcgcacauccaguggauggugauguucacgccccugguccccuucuggaucaccaucgccuacaucaucugcaucuccaccaagcacuucuacugguucuucagcaacuaccucaagcggcgcgugguguucaacggggucuccuucagcaccuucgaggaggccgcccugugcaccuuccugcucaacaaggagauguaccugaagcugcgguccgacgugcuccugccgcugacccaguacaaccgcuaccucgcccuguacaacaaguacaaguacuucagcggcgcgauggacaccacguccuaccgggaggccgccugcugccaccuggccaaggcgcucaacgacuucagcaacuccggcagcgacgugcuguaccagccgccccagaccuccaucaccagcgccguccugcaguga

SEQ ID NO: 18390 - RNA, 1506 nt, Artificial Sequence
  SARS-CoV-2__MT678839.1__non-structural protein 4 (NSP4) CDS gc
augaagaucgugaacaacuggcugaagcagcucaucaaggucacccugguguuccuguucguggccgccaucuucuaccucaucacccccguccacgugaugagcaagcacacggacuucuccagcgagaucaucggcuacaaggcgaucgacgggggcgugacccgcgacaucgccuccaccgacacgugcuucgccaacaagcacgccgacuucgacaccugguucagccagcggggcggcuccuacaccaacgacaaggccugcccccugaucgcggccgucaucacccgcgaggugggguucgugguccccggccugcccagcaccauccuccggacgaccaacggcgacuuccugcacuuccugccccgcguguucuccgccguggggaacaucugcuacaccccgagcaagcucaucgaguacaccgacuucgccacguccgcgugcguccuggccgccgagugcaccaucuucaaggacgccagcggcaagcccgugcccuacugcuacgacaccaacgugcuggagggguccgucgccuacgagagccuccggcccgacacccgcuacgugcugauggacggcuccaucauccaguucccgaacacguaccuggaggggcccgugcgggucgugaccaccuucgacagcgaguacugcggccacgggaccugcgagcgcuccgaggcgggggugugcgucagcacguccggccggugggugcucaacaacgacuacuaccgcagccugcccgggguguucugcggcgucgacgccgugaaccugcucaccaacauguucacgccccugauccagccgaucggcgcccuggacaucuccgccagcaucgucgccgggggcaucguggcgaucguggugaccugccucgccuacuacuucaugcgguuccgccgggccuucggggaguacagccacgucguggccuucaacacccugcuguuccucauguccuucaccguccugugccugacccccguguacagcuuccuccccggcguguacuccgucaucuaccuguaccugaccuucuaccucacgaacgacgugagcuuccuggcccacauccaguggauggugauguucacgccccuggucccguucuggaucaccaucgcguacaucaucugcaucuccaccaagcacuucuacugguucuucagcaacuaccucaagcgccgggugguguucaacggggucuccuucagcaccuucgaggaggccgcccugugcaccuuccugcucaacaaggagauguaccugaagcugcgcuccgacgugcuccugccccugacccaguacaaccgguaccucgcccuguacaacaaguacaaguacuucagcggcgccauggacaccacguccuaccgcgaggcggccugcugccaccuggccaaggcccucaacgacuucagcaacuccggcagcgacgugcuguaccagccgccccagaccuccaucaccagcgcgguccugcaguga

SEQ ID NO: 18391 - RNA, 1506 nt, Artificial Sequence
  SARS-CoV-2__MT611440.1__non-structural protein 4 (NSP4) CDS gc
augaagaucgugaacaacuggcugaagcagcucaucaaggucacccugguguuccuguucguggccgccaucuucuaccucaucacccccguccacgugaugagcaagcacacggacuucuccagcgagaucaucggcuacaaggcgaucgacgggggcgugacccgcgacaucgccuccaccgacacgugcuucgccaacaagcacgccgacuucgacaccugguucagccagcggggcggcuccuacaccaacgacaaggccugcccccugaucgcggccgucaucacccgcgaggugggguucgugguccccggccugcccggcaccauccuccggacgaccaacggggacuuccugcacuuccugccccgcguguucagcgccgugggcaacaucugcuacaccccguccaagcucaucgaguacaccgacuucgccacgagcgcgugcguccuggccgccgagugcaccaucuucaaggacgccuccgggaagcccgugcccuacugcuacgacaccaacgugcuggagggcagcgucgccuacgagucccuccggcccgacacccgcuacgugcugauggacgggagcaucauccaguucccgaacacguaccuggagggcuccgugcgggucgugaccaccuucgacagcgaguacugccgccacgggaccugcgagcgguccgaggcgggggugugcgucagcacguccggccgcugggugcucaacaacgacuacuaccggagccugcccgggguguucugcggcgucgacgccgugaaccugcucaccaacauguucacgccccugauccagcccaucggcgcccuggacaucuccgccagcaucgucgccgggggcaucguggcgaucguggugaccugccucgccuacuacuucaugcgcuuccggcgcgccuucggggaguacagccacgucguggccuucaacacccugcuguuccucauguccuucaccguccugugccugaccccgguguacagcuuccuccccggcguguacuccgucaucuaccuguaccugaccuucuaccucacgaacgacgugagcuuccuggcccacauccaguggauggugauguucacgccccugguccccuucuggaucaccaucgcguacaucaucugcaucuccaccaagcacuucuacugguucuucagcaacuaccucaagcggcgcgugguguucaacggggucuccuucagcaccuucgaggaggccgcccugugcaccuuccugcucaacaaggagauguaccugaagcugcgguccgacgugcuccugccgcugacccaguacaaccgcuaccucgcccuguacaacaaguacaaguacuucagcggcgccauggacaccacguccuaccgggaggcggccugcugccaccuggccaaggcccucaacgacuucagcaacuccggcagcgacgugcuguaccagccgccccagaccuccaucaccagcgcgauccugcaguga

SEQ ID NO: 18392 - RNA, 1506 nt, Artificial Sequence
  SARS-CoV-2__MT648830.1__non-structural protein 4 (NSP4) CDS gc
augaagaucgugaacaacuggcugaagcagcucaucaaggucacccugguguuccuguucguggccgccaucuucuaccucaucacccccguccacgugaugagcaagcacacggacuucuccagcgagaucaucggcuacaaggcgaucgacgggggcgugacccgcgacaucgccuccaccgacacgugcuucgccaacaagcacgccgacuucgacaccugguucagccagcggggcggcuccuacaccaacgacaaggccugcccccugaucgcggccgucaucacccgcgaggugggguucgugguccccggccugcccggcaccauccuccggacgaccaacggggacuuccugcacuuccugccccgcguguucagcgccgugggcaacaucugcuacaccccguccaagcucaucgaguacaccgacuucgccacgagcgcgugcguccuggccgccgagugcaccaucuucaaggacgccuccgggaagcccgugcccuacugcuacgacaccaacgugcuggagggcagcgucgccuacgagucccuccggcccgacacccgcuacgugcugauggacgggagcaucauccaguucccgaacacguaccuggagggcuccgugcgggucgugaccaccuucgacagcgaguacugccgccacgggaccugcgagcgguccgaggcgggggugugcgucagcacguccggccgcugggugcucaacaacgacuacuaccggagccugcccgggguguucugcggcgucgacgccgugaaccugcucaccaacauguucacgccccugauccagcccaucggcgcccuggacaucuccgccagcaucgucgccgggggcaucguggcgaucguggugaccugccucgccuacuacuucaugcgcuuccggcgcgccuucggggaguacagccacgucguggccuucaacacccugcuguuccucauguccuucaccguccugugccugaccccgguguacagcuuccuccccggcguguacuccgucaucuaccuguaccugaccuucuaccucacgaacgacgugagcuuccuggcccacauccaguggauggugauguucacgccccugguccccuucuggaucaccaucgcguacaucaucugcaucuccaccaagcacuucuacugguucuucagcaacuaccucaagcggcgcgugguguucaacggggucuccuucagcaccuucgaggaggccgcccugugcaccuuccugcucaacaaggagauguaccugaagcugcgguccgacgugcuccugccgcugacccaguacaaccgcuaccucgcccuguacaacaaguacaaguacuucagcggcgccauggacaccacguccuaccgggaggcggccugcugccaccugagcaaggcccucaacgacuucuccaacagcggcuccgacgugcuguaccagccgccccagaccagcaucaccuccgccguccugcaguga

SEQ ID NO: 18393 - RNA, 1506 nt, Artificial Sequence
  SARS-CoV-2__MT641509.1__non-structural protein 4 (NSP4) CDS gc
augaagaucgugaacaacuggcugaagcagcucaucaaggucacccugguguuccuguucguggccgccaucuucuaccucaucacccccguccacgugaugagcaagcacacggacuucuccagcgagaucaucggcuacaaggcgaucgacgggggcgugacccgcgacaucgccuccaccgacacgugcuucgccaacaagcacgccgacuucgacaccugguucagccagcggggcggcuccuacaccaacgacaaggccugcccccugaucgcggccgucaucacccgcgaggugggguucgugguccccggccugcccggcaccauccuccggacgaccaacggggacuuccugcacuuccugccccgcguguucagcgccgugggcaacaucugcuacaccccguccaagcucaucgaguacaccgacuucgccacgagcgcgugcguccuggccgccgagugcaccaucuucaaggacgccuccgggaagcccgugcccuacugcuacgacaccaacgugcuggagggcagcgucgccuacgagucccuccggcccgacacccgcuacgugcugauggacgggagcaucauccaguucccgaacacguaccuggagggcuccgugcgggucgugaccaccuucgacagcgaguacugccgccacgggaccugcgagcgguccgaggcgggggugugcgucagcacguccggccgcugggugcucaacaacgacuacuaccggagccugcccgggguguucugcggcgucgacgccgugaaccugcucaucaacauguucacgccccugauccagcccaucggcgcccuggacaucuccgccagcaucgucgccgggggcaucguggcgaucguggugaccugccucgccuacuacuucaugcgcuuccggcgcgccuucggggaguacagccacgucguggccuucaacacccugcuguuccucauguccuucaccguccugugccugaccccgguguacagcuuccuccccggcguguacuccgucaucuaccuguaccugaccuucuaccucaccaacgacgugagcuuccuggcccacauccaguggauggugauguucacgccccugguccccuucuggaucaccaucgcguacaucaucugcaucuccaccaagcacuucuacugguucuucagcaacuaccucaagcggcgcgugguguucaacggggucuccuucagcaccuucgaggaggccgcccugugcacguuccugcucaacaaggagauguaccugaagcugcgguccgacgugcuccugccgcugacccaguacaaccgcuaccucgcccuguacaacaaguacaaguacuucagcggcgccauggacaccaccuccuaccgggaggcggccugcugccaccuggccaaggcccucaacgacuucagcaacuccggcagcgacgugcuguaccagccgccccagacguccaucaccagcgcgguccugcaguga

SEQ ID NO: 18394 - RNA, 1506 nt, Artificial Sequence
  SARS-CoV-2__MT641646.1__non-structural protein 4 (NSP4) CDS gc
augaagaucgugaacaacuggcugaagcagcucaucaaggucacccugguguuccuguucguggccgccaucuucuaccucaucacccccguccacgugaugagcaagcacacggacuucuccagcgagaucaucggcuacaaggcgaucgacgggggcgugacccgcgacaucgccuccaccgacacgugcuucgccaacaagcacgccgacuucgacaccugguucagccagcggggcggcuccuacaccaacgacaaggccugcccccugaucgcggccgucaucacccgcgaggugggguucgugguccccggccugcccggcaccauccuccggacgaccaacggggacuuccugcacuuccugccccgcguguucagcgccgugggcaacaucugcuacaccccguccaagcucaucgaguacaccgacuucgccacgagcgcgugcguccuggccgccgagugcaccaucuucaaggacgccuccgggaagcccgugcccuacugcuacgacaccaacgugcuggagggcagcgucgccuacgagucccuccggcccgacacccgcuacgugcugauggacgggagcaucauccaguucccgaacacguaccuggagggcuccgugcgggucgugaccaccuucgacagcgaguacugccgccacgggaccugcgagcgguccgaggcgggggugugcgucagcacguccggccgcugggugcucaacaacgacuacuaccggagccugcccgggguguucugcggcgucgacguggucaaccugcucaccaacauguucacgccccugauccagcccaucggcgcccuggacaucuccgccagcaucguggccgggggcaucguggccaucgucgugaccugccucgcguacuacuucaugcgcuuccggcgcgccuucggggaguacagccacguggucgccuucaacacccugcuguuccucauguccuucaccgugcugugccugaccccgguguacagcuuccuccccggcgucuacuccgugaucuaccuguaccugaccuucuaccucacgaacgacgugagcuuccuggcccacauccaguggauggucauguucacgccccuggugcccuucuggaucaccaucgccuacaucaucugcaucuccaccaagcacuucuacugguucuucagcaacuaccucaagcggcgcguggucuucaacgggguguccuucagcaccuucgaggaggcggcccugugcaccuuccugcucaacaaggagauguaccugaagcugcgguccgacgugcuccugccgcugacccaguacaaccgcuaccucgcccuguacaacaaguacaaguacuucagcggcgccauggacaccacguccuaccgggaggccgcgugcugccaccuggccaaggcccucaacgacuucagcaacuccggcagcgacguccuguaccagccgccccagaccuccaucaccagcgccgugcugcaguga

SEQ ID NO: 18395 - RNA, 1506 nt, Artificial Sequence
  SARS-CoV-2__MT641677.1__non-structural protein 4 (NSP4) CDS gc
augaagaucgugaacaacuggcugaagcagcucaucaaggucacccugguguuccuguucguggccgccaucuucuaccucaucacccccguccacgugaugagcaagcacacggacuucuccagcgagaucaucggcuacaaggcgaucgacgggggcgugacccgcgacaucgccuccaccgacacgugcuucgccaacaagcacgccgacuucgacaccugguucagccagcggggcggcuccuacaccaacgacaaggccugcccccugaucgcggccgucaucacccgcgaggugggguucgugguccccggccugcccggcaccauccuccggacgaccaacggggacuuccugcacuuccugccccgcguguucagcgccgugggcaacaucugcuacaccccguccaagcucaucgaguacaccgacuucgccacgagcgcgugcguccuggccgccgagugcaccaucuucaaggacgccuccgggaagcccgugcccuacugcuacgacaccaacgugcuggagggcagcgucgccuacgagucccuccggcccgacacccgcuacgugcugauggacgggagcaucauccaguucccgaacacguaccuggagggcuccgugcgggucgugaccaccuucgacagcgaguacugccgccacgggaccugcgagcgguccgaggcgggggugugcgucagcacguccggccgcugggugcucaacaacgacuacuaccggagccugcccgggguguucugcggcgucgacgccgugaaccugcucaccaacauguucacgccccugauccagcccaucggcgcccuggacaucuccgccagcaucgucgccgggggcaucguggcgaucguggugaccugccucgccuacuacuucaugcgcuuccggcgcgccuucggggaguacagccacgucguggccuucaacacccugcuguuccucauguccuucaccguccugugccugaccccgguguacagcuuccuccccggcguguacuccgucaucuaccuguaccugaccuucuaccucacgaacgacgugagcuuccuggcccacauccaguggauggugauguucacgccccugguccccuucuggaucaccaucgcguacaucaucugcaucuccaccaagcacuucuacugguucuucagcaacuaccucaagcggcgcgugguguucaacggggucuccuucagcaccuucgaggaggccgcccugugcaccuuccugcucaacaaggagauguaccugaagcugcgguccgacgugcuccugccgcugacccaguacaaccgcuaccucgcccuguacaacaaguacaaguacuucagcggcgccauggacaccacguccuaccgggaggcggccugcugccaccugaccaaggcccucaacgacuucagcaacuccggcagcgacgugcuguaccagccgccccagaccuccaucaccagcgccguccugcaguga

SEQ ID NO: 18396 - RNA, 1506 nt, Artificial Sequence
  SARS-CoV-2__MT641679.1__non-structural protein 4 (NSP4) CDS gc
augaagaucgugaacaacuggcugaagcagcucaucaaggucacccugguguuccuguucguggccgccaucuucuaccucaucacccccguccacgugaugagcaagcacacggacuucuccagcgagaucaucggcuacaaggcgaucgacgggggcgugacccgcgacaucgccuccaccgacacgugcuucgccaacaagcacgccgacuucgacaccugguucagccagcgggucggguccuacaccaacgacaaggccugcccccugaucgcggccgugaucacccgcgaggugggcuucgucgugcccgggcugcccggcaccauccuccggacgaccaacggcgacuuccugcacuuccugccccgcguguucagcgccgucgggaacaucugcuacaccccguccaagcucaucgaguacaccgacuucgccacgagcgcgugcgugcuggccgccgagugcaccaucuucaaggacgccuccggcaagcccgugcccuacugcuacgacaccaacguccuggaggggagcguggccuacgagucccuccggcccgacacccgcuacgugcugauggacggcagcaucauccaguucccgaacacguaccuggagggguccguccggguggugaccaccuucgacagcgaguacugccgccacgggaccugcgagcgguccgaggcgggcgucugcgugagcacguccggccgcugggugcucaacaacgacuacuaccggagccugcccggcgucuucugcgggguggacgccgucaaccugcucaccaacauguucacgccccugauccagcccaucggcgcccuggacaucuccgccagcaucguggccggcgggaucguggcgaucgucgugaccugccucgccuacuacuucaugcgcuuccggcgcgccuucggcgaguacagccacguggucgccuucaacacccugcuguuccucauguccuucaccgugcugugccugaccccgguguacagcuuccuccccggggucuacuccgugaucuaccuguaccugaccuucuaccucacgaacgacgugagcuuccuggcccacauccaguggauggucauguucacgccccuggugcccuucuggaucaccaucgcguacaucaucugcaucuccaccaagcacuucuacugguucuucagcaacuaccucaagcggcgcguggucuucaacggcguguccuucagcaccuucgaggaggccgcccugugcaccuuccugcucaacaaggagauguaccugaagcugcgguccgacgugcuccugccgcugacccaguacaaccgcuaccucgcccuguacaacaaguacaaguacuucagcggggccauggacaccacguccuaccgggaggcggccugcugccaccuggccaaggcccucaacgacuucagcaacuccggcagcgacguccuguaccagccgccccagaccuccaucaccagcgcggugcugcaguga

SEQ ID NO: 18397 - RNA, 1506 nt, Artificial Sequence
  SARS-CoV-2__MT641710.1__non-structural protein 4 (NSP4) CDS gc
augaagaucgugaacaacuggcugaagcagcucaucaaggucacccugguguuccuguucguggccgccaucuucuaccucaucacccccguccacgugaugagcaagcacacggacuucuccagcgagaucaucggcuacaaggcgaucgacgggggcgugacccgcgacaucgccuccaccgacacgugcuucgccaacaagcacgccgacuucgacaccugguucagccagcggggcggcuccuacaccaacgacaaggccugcccccugaucgcggccgucaucacccgcgaggugggguucgugguccccggccugcccggcaccauccuccggacgaccaacggggacuuccugcacuuccugccccgcguguucagcgccgugggcaacaucugcuacaccccguccaagcucaucgaguacaccgacuucgccacgagcgcgugcguccuggccgccgagugcaccaucuucaaggacgccuccgggaagcccgugcccuacugcuacgacaccaacgugcuggagggcagcgucgccuacgagucccuccggcccgacacccgcuacgugcugauggacgggagcaucauccaguucccgaacacguaccuggagggcuccgugcgggucgugaccaccuucgacagcgaguacugccgccacgggaccugcgagcgguccgaggcgggggugugcgucagcacguccggccgcugggugcucaacaacgacuacuaccggagccugcccgggguguucugcggcgucgacgccgugaaccugcucaccaacauguucacgccccugauccagcccaucggcgcccuggacaucuccgccagcaucgucgccgggggcaucguggcgaucguggugaccugccucgccuacuacuucaugcgcuuccggcgcgccuucggggaguacagcuacgucguggccuucaacacccugcuguuccucauguccuucaccguccugugccugaccccgguguacagcuuccuccccggcguguacuccgucaucuaccuguaccugaccuucuaccucacgaacgacgugagcuuccuggcccacauccaguggauggugauguucacgccccugguccccuucuggaucaccaucgcguacaucaucugcaucuccaccaagcacuucuacugguucuucagcaacuaccucaagcggcgcgugguguucaacggggucuccuucagcaccuucgaggaggccgcccugugcaccuuccugcucaacaaggagauguaccugaagcugcgguccgacgugcuccugccgcugacccaguacaaccgcuaccucgcccuguacaacaaguacaaguacuucagcggcgccauggacaccacguccuaccgggaggcggccugcugccaccuggccaaggcccucaacgacuucagcaacuccggcagcgacgugcuguaccagccgccccagaccuccaucaccagcgcgguccugcaguga

SEQ ID NO: 18398 - RNA, 1506 nt, Artificial Sequence
  SARS-CoV-2__MT642243.1__non-structural protein 4 (NSP4) CDS gc
augaagaucgugaacaacuggcugaagcagcucaucaaggucauccugguguuccuguucguggccgccaucuucuaccucaucacccccguccacgugaugagcaagcacaccgacuucuccagcgagaucaucggcuacaaggcgaucgacgggggcgugacgcgcgacaucgccuccaccgacacgugcuucgccaacaagcacgccgacuucgacaccugguucagccagcggggcggcuccuacaccaacgacaaggccugcccccugaucgcggccgucaucacccgcgaggugggguucgugguccccggccugcccggcaccauccuccggaccacgaacggggacuuccugcacuuccugccccgcguguucagcgccgugggcaacaucugcuacaccccguccaagcucaucgaguacaccgacuucgccaccagcgcgugcguccuggccgccgagugcacgaucuucaaggacgccuccgggaagcccgugcccuacugcuacgacaccaacgugcuggagggcagcgucgccuacgagucccuccggcccgacacccgcuacgugcugauggacgggagcaucauccaguucccgaacaccuaccuggagggcuccgugcgggucgugacgaccuucgacagcgaguacugccgccacgggaccugcgagcgguccgaggcgggggugugcgucagcaccuccggccgcugggugcucaacaacgacuacuaccggagccugcccgggguguucugcggcgucgacgccgugaaccugcucacgaacauguucacgccccugauccagcccaucggcgcccuggacaucuccgccagcaucgucgccgggggcaucguggcgaucguggugaccugccucgccuacuacuucaugcgcuuccggcgcgccuucggggaguacagccacgucguggccuucaacacccugcuguuccucauguccuucaccguccugugccugaccccgguguacagcuuccuccccggcguguacuccgucaucuaccuguaccugaccuucuaccucaccaacgacgugagcuuccuggcccacauccaguggauggugauguucacgccccugguccccuucuggaucaccaucgcguacaucaucugcaucuccaccaagcacuucuacugguucuucagcaacuaccucaagcggcgcgugguguucaacggggucuccuucagcaccuucgaggaggccgcccugugcacguuccugcucaacaaggagauguaccugaagcugcgguccgacgugcuccugccgcugacccaguacaaccgcuaccucgcccuguacaacaaguacaaguacuucagcggcgccauggacaccaccuccuaccgggaggcggccugcugccaccuggccaaggcccucaacgacuucagcaacuccggcagcgacgugcuguaccagccgccccagacguccaucaccagcgcgguccugcaguga

SEQ ID NO: 18399 - RNA, 1506 nt, Artificial Sequence
  SARS-CoV-2__MT642326.1__non-structural protein 4 (NSP4) CDS gc
augaagaucgugaacaacuggcugaagcagcucaucaaggucacccugguguuccuguucguggccgccaucuucuaccucaucacccccguccacgugaugagcaagcacacggacuucuccagcgagaucaucggcuacaaggcgaucgacgggggcgugacccgcgacaucgccuccaccgacacgugcuucgccaacaagcacgccgacuucgacaccugguucagccagcggggcggcuccuacaccaacgacaaggccugcccccugaucgcggccgucaucacccgcgaggugggguucgugguccccggccugcccggcaccauccuccggacgaccaacggggacuuccugcacuuccugccccgcguguucagcgccgugggcaacaucugcuacaccccguccaagcucaucgaguacaccgacuucgccacgagcgcgugcguccuggccgccgagugcaccaucuucaaggacgccuccgggaagcccgugcccuacugcuacgacaccaacgugcuggagggcagcgucgccuacgagucccuccggcccgacacccgcuacgugcugauggacgggagcaucauccaguucccgaacacguaccuggagggcuccgugcgggucgugaccaccuucgacagcgaguacugccgccacgggaccugcgagcgguccgaggcgggggugugcgucagcacguccggccgcuggguguucaacaacgacuacuaccggagccuccccgggguguucugcggcgucgacgccgugaaccugcugaccaacauguucacgccccucauccagcccaucggcgcccuggacaucuccgccagcaucgucgccgggggcaucguggcgaucguggugaccugccuggccuacuacuucaugcgcuuccggcgcgccuucggggaguacagccacgucguggccuucaacacccuccuguuccugauguccuucaccguccucugccugaccccgguguacagcuuccugcccggcguguacuccgucaucuaccucuaccugaccuucuaccugacgaacgacgugagcuuccucgcccacauccaguggauggugauguucacgccccugguccccuucuggaucaccaucgcguacaucaucugcaucuccaccaagcacuucuacugguucuucagcaacuaccugaagcggcgcgugguguucaacggggucuccuucagcaccuucgaggaggccgcccucugcaccuuccugcugaacaaggagauguaccucaagcugcgguccgacgugcugcucccgcugacccaguacaaccgcuaccuggcccucuacaacaaguacaaguacuucagcggcgccauggacaccacguccuaccgggaggcggccugcugccaccuggccaaggcccugaacgacuucagcaacuccggcagcgacgugcucuaccagccgccccagaccuccaucaccagcgcgguccugcaguga

SEQ ID NO: 18400 - RNA, 1506 nt, Artificial Sequence
  SARS-CoV-2__MT642360.1__non-structural protein 4 (NSP4) CDS gc
augaagaucgugaacaacuggcugaagcagcucaucaaggucacccugguguuccuguucguggccgccaucuucuaccucaucacccccguccacgugaugagcaagcacacggacuucuccagcgagaucaucggcuacaaggcgaucgacgggggcgugacccgcgacaucgccuccaccgacacgugcuucgccaacaagcacgccgacuucgacaccugguucagccagcggggcggcuccuacaccaacgacaaggccugcccccugaucgcggccgucaucacccgcgaggugggguucgugguccccggccugcccggcaccauccuccggacgaccaacggggacuuccugcacuuccugccccgcguguucagcgccgugggcaacaucugcuacaccccguccaagcucaucgaguacaucgacuucgccaccagcgcgugcguccuggccgccgagugcacgaucuucaaggacgccuccgggaagcccgugcccuacugcuacgacaccaacgugcuggagggcagcgucgccuacgagucccuccggcccgacacccgcuacgugcugauggacgggagcaucauccaguucccgaacaccuaccuggagggcuccgugcgggucgugacgaccuucgacagcgaguacugccgccacgggaccugcgagcgguccgaggcgggggugugcgucagcaccuccggccgcugggugcucaacaacgacuacuaccggagccugcccgggguguucugcggcgucgacgccgugaaccugcucacgaacauguucacgccccugauccagcccaucggcgcccuggacaucuccgccagcaucgucgccgggggcaucguggcgaucguggugaccugccucgccuacuacuucaugcgcuuccggcgcgccuucggggaguacagccacgucguggccuucaacacccugcuguuccucauguccuucaccguccugugccugaccccgguguacagcuuccuccccggcguguacuccgucaucuaccuguaccugaccuucuaccucaccaacgacgugagcuuccuggcccacauccaguggauggugauguucacgccccugguccccuucuggaucaccaucgcguacaucaucugcaucuccaccaagcacuucuacugguucuucagcaacuaccucaagcggcgcgugguguucaacggggucuccuucagcaccuucgaggaggccgcccugugcacguuccugcucaacaaggagauguaccugaagcugcgguccgacgugcuccugccgcugacccaguacaaccgcuaccucgcccuguacaacaaguacaaguacuucagcggcgccauggacaccaccuccuaccgggaggcggccugcugccaccuggccaaggcccucaacgacuucagcaacuccggcagcgacgugcuguaccagccgccccagacguccaucaccagcgcgguccugcaguga

SEQ ID NO: 18401 - RNA, 1506 nt, Artificial Sequence
  SARS-CoV-2__MT627615.1__non-structural protein 4 (NSP4) CDS gc
augaagaucgugaacaacuggcugaagcagcucaucaaggucacccugguguuccuguucguggccgccaucuucuaccucaucacccccguccacgugaugagcaagcacacggacuucuccagcgaggugaucggcuacaaggcgaucgacgggggcgucacccgcgacaucgccuccaccgacacgugcuucgccaacaagcacgccgacuucgacaccugguucagccagcggggcggcuccuacaccaacgacaaggccugcccccugaucgcggccgugaucacccgcgaggugggguucgucgugcccggccugcccggcaccauccuccggacgaccaacggggacuuccugcacuuccugccccgcguguucagcgccgucggcaacaucugcuacaccccguccaagcucaucgaguacaccgacuucgccacgagcgcgugcgugcuggccgccgagugcaccaucuucaaggacgccuccgggaagcccgugcccuacugcuacgacaccaacguccuggagggcagcguggccuacgagucccuccggcccgacacccgcuacgugcugauggacgggagcaucauccaguucccgaacacguaccuggagggcuccguccggguggugaccaccuucgacagcgaguacugccgccacgggaccugcgagcgguccgaggcgggggucugcgugagcacguccggccgcugggugcucaacaacgacuacuaccggagccugcccggggucuucugcggcguggacgccgucaaccugcucaccaacauguucacgccccugauccagcccaucggcgcccuggacaucuccgccagcaucguggccgggggcaucguggcgaucgucgugaccugccucgccuacuacuucaugcgcuuccggcgcgccuucggggaguacagccacguggucgccuucaacacccugcuguuccucauguccuucaccgugcugugccugaccccgguguacagcuuccuccccggcgucuacuccgugaucuaccuguaccugaccuucuaccucacgaacgacgugagcuuccuggcccacauccaguggauggucauguucacgccccuggugcccuucuggaucaccaucgcguacaucaucugcaucuccaccaagcacuucuacugguucuucagcaacuaccucaagcggcgcguggucuucaacgggguguccuucagcaccuucgaggaggccgcccugugcaccuuccugcucaacaaggagauguaccugaagcugcgguccgacgugcuccugccgcugacccaguacaaccgcuaccucgcccuguacaacaaguacaaguacuucagcggcgccauggacaccacguccuaccgggaggcggccugcugccaccuggccaaggcccucaacgacuucagcaacuccggcagcgacguccuguaccagccgccccagaccuccaucaccagcgcggugcugcaguga

SEQ ID NO: 18402 - RNA, 1506 nt, Artificial Sequence
  SARS-CoV-2__MT628156.1__non-structural protein 4 (NSP4) CDS gc
augaagaucgugaacaacuggcugaagcagcucaucaaggucacccugguguuccuguucguggccgccaucuucuaccucaucacccccguccacgugaugagcaagcacacggacuucuccagcgagaucaucggcuacaaggcgaucgacgggggcgugacccgcgacaucgccuccaccgacacgugcuucgccaacaagcacgccgacuucgacaccugguucagccagcggggcggcuccuacaccaacgacaaggccugcccccugaucgcggccgucaucacccgcgaggugggguucgugguccccggccugcccggcaccauccuccggacgaccaacggggacuuccugcacuuccugccccgcguguucagcgccgugggcaacaucugcuacaccccguccaagcucaucgaguacaccgacuucgccacgagcgcgugcguccuggccgccgagugcaccaucuucaaggacgccuccgggaagcccgugcccuacugcuacgacaccaacgugcuggagggcagcgucgccuacgagucccuccggcccgacacccgcuacgugcugauggacgggagcaucauccaguucccgaacacguaccuggagggcuccgugcgggucgugaccaccuucgacagcgaguacugccgccacgggaccugcgagcgguccgaggcgggggugugcgucagcacguccggccgcugggugcucaacaacgacuacuaccggagccugcccgggguguucugcggcgucgacgccgugaaccugcucaccaacauguucacgccccugauccagcccaucggcgcccuggacaucuccgccagcaucgucgccgggggcaucguggcgaucguggucaccagccucgccuacuacuucaugcgcuuccggcgcgccuucggggaguacucccacgugguggccuucaacacccugcuguuccucaugagcuucaccguccugugccugaccccgguguacuccuuccuccccggcguguacagcgucaucuaccuguaccugaccuucuaccucacgaacgacguguccuuccuggcccacauccaguggauggugauguucacgccccugguccccuucuggaucaccaucgcguacaucaucugcaucagcaccaagcacuucuacugguucuucuccaacuaccucaagcggcgcgugguguucaacggggucagcuucuccaccuucgaggaggccgcccugugcaccuuccugcucaacaaggagauguaccugaagcugcggagcgacgugcuccugccgcugacccaguacaaccgcuaccucgcccuguacaacaaguacaaguacuucuccggcgccauggacaccacgagcuaccgggaggcggccugcugccaccuggccaaggcccucaacgacuucuccaacagcggcuccgacgugcuguaccagccgccccagaccagcaucaccuccgcgguccugcaguga

SEQ ID NO: 18403 - RNA, 1506 nt, Artificial Sequence
  SARS-CoV-2__MT628225.1__non-structural protein 4 (NSP4) CDS gc
augaagaucgugaacaacuggcugaagcagcucaucaaggucacccugguguuccuguucguggccgccaucuucuaccucaucacccccguccacgugaugagcaagcacacggacuucuccagcgagaucaucggcuacaaggcgaucgacgggggcgugacccgcgacaucgccuccaccgacacgugcuucgccaacaagcacgccgacuucgacaccugguucagccagcggggcggcuccuacaccaacgacaaggccugcccccugaucgcggccgucaucacccgcgaggugggguucgugguccccggccugcccggcaccauccuccggacgaccaacggggacuuccugcacuuccugccccgcguguucagcgccgugggcaacaucugcuacaccccguccaagcucaucgaguacaccgacuucgccacgagcgcgugcguccuggccgccgagugcaccaucuucaaggacgccuccgggaagcccgugcccuacugcuacgacaccaacgugcuggagggcagcgucgccuacgagucccuccggcccgacacccgcuacgugcugauggacgggagcaucauccaguucccgaacacguaccuggagggcuucgugcgggucgugaccaccuucgacuccgaguacugccgccacgggaccugcgagcggagcgaggcgggggugugcgucuccacgagcggccgcugggugcucaacaacgacuacuaccggucccugcccgggguguucugcggcgucgacgccgugaaccugcucaccaacauguucacgccccugauccagcccaucggcgcccuggacaucagcgccuccaucgucgccgggggcaucguggcgaucguggugaccugccucgccuacuacuucaugcgcuuccggcgcgccuucggggaguacagccacgucguggccuucaacacccugcuguuccucaugagcuucaccguccugugccugaccccgguguacuccuuccuccccggcguguacagcgucaucuaccuguaccugaccuucuaccucacgaacgacguguccuuccuggcccacauccaguggauggugauguucacgccccugguccccuucuggaucaccaucgcguacaucaucugcaucagcaccaagcacuucuacugguucuucuccaacuaccucaagcggcgcgugguguucaacggggucagcuucuccaccuucgaggaggccgcccugugcaccuuccugcucaacaaggagauguaccugaagcugcggagcgacgugcuccugccgcugacccaguacaaccgcuaccucgcccuguacaacaaguacaaguacuucuccggcgccauggacaccacgagcuaccgggaggcggccugcugccaccuggccaaggcccucaacgacuucuccaacagcggcuccgacgugcuguaccagccgccccagaccagcaucaccuccgcgguccugcaguga

SEQ ID NO: 18404 - RNA, 1506 nt, Artificial Sequence
  SARS-CoV-2__MT632520.1__non-structural protein 4 (NSP4) CDS gc
augaagaucgugaacaacuggcugaagcagcucaucaaggucacccugguguuccuguucguggucgccaucuucuaccucaucacccccgugcacgugaugagcaagcacacggacuucuccagcgagaucaucggcuacaaggccaucgacgggggcgucacccgcgacaucgcguccaccgacacgugcuucgccaacaagcacgccgacuucgacaccugguucagccagcggggcggcuccuacaccaacgacaaggccugcccccugaucgccgcggugaucacccgcgaggugggguucgucgugcccggccugcccggcaccauccuccggacgaccaacggggacuuccugcacuuccugccccgcguguucagcgccgucggcaacaucugcuacaccccguccaagcucaucgaguacaccgacuucgccacgagcgccugcgugcuggcggccgagugcaccaucuucaaggacgccuccgggaagcccgugcccuacugcuacgacaccaacguccuggagggcagcguggccuacgagucccuccggcccgacacccgcuacgugcugauggacgggagcaucauccaguucccgaacacguaccuggagggcuccguccggguggugaccaccuucgacagcgaguacugccgccacgggaccugcgagcgguccgaggccggggucugcgugagcacguccggccgcugggugcucaacaacgacuacuaccggagccugcccggggucuucugcggcguggacgcggucaaccugcucaccaacauguucacgccccugauccagcccaucggcgcccuggacaucuccgccagcaucguggccgggggcaucguggccaucgucgugaccugccucgcguacuacuucaugcgcuuccggcgcgccuucggggaguacagccacguggucgccuucaacacccugcuguuccucauguccuucaccgugcugugccugaccccgguguacagcuuccuccccggcgucuacuccgugaucuaccuguaccugaccuucuaccucacgaacgacgugagcuuccuggcccacauccaguggauggucauguucacgccccuggugcccuucuggaucaccaucgccuacaucaucugcaucuccaccaagcacuucuacugguucuucagcaacuaccucaagcggcgcguggucuucaacgggguguccuucagcaccuucgaggaggcggcccugugcaccuuccugcucaacaaggagauguaccugaagcugcgguccgacgugcuccugccgcugacccaguacaaccgcuaccucgcccuguacaacaaguacaaguacuucagcggcgccauggacaccacguccuaccgggaggccgcgugcugccaccuggccaaggcccucaacgacuucagcaacuccggcagcgacguccuguaccagccgccccagaccuccaucaccagcgccgugcugcaguga

SEQ ID NO: 18405 - RNA, 1506 nt, Artificial Sequence
  SARS-CoV-2__MT632793.1__non-structural protein 4 (NSP4) CDS gc
augaagaucgugaacaacuggcugaagcagcucaucaaggucacccugguguuccuguucguggccgccaucuucuaccucaucacccccguccacgugaugagcaagcacacggacuucuccagcgagaucaucggcuacaaggcgaucgacgggggcgugacccgcgacaucgccuccaccgacacgugcuucgccaacaagcacgccgacuucgacaccugguucagccagcggggcggcuccuacaccaacgacaaggccugcccccugaucgcggccgucaucacccgcgaggugggguucgugguccccggccugcccggcaccauccuccggacgaccaacggggacuuccugcacuuccugccccgcguguucagcgccgugggcaacaucugcuacaccccguccaagcucaucgaguacaccgacuucgccacgagcgcgugcguccuggccgccgagugcaccaucuucaaggacgccuccgggaagcccgugcccuacugcuacgacaccaacgugcuggagggcagcgucgccuacgagucccuccggcccgacacccgcuacgugcugauggacgggagcaucauccaguucccgaacacguaccuggagggcuccgugcgggucgugaccaccuucgacuucgaguacugccgccacgggaccugcgagcggagcgaggcgggggugugcgucuccacgagcggccgcugggugcucaacaacgacuacuaccggucccugcccgggguguucugcggcgucgacgccgugaaccugcucaccaacauguucacgccccugauccagcccaucggcgcccuggacaucagcgccuccaucgucgccgggggcaucguggcgaucguggugaccugccucgccuacuacuucaugcgcuuccggcgcgccuucggggaguacagccacgucguggccuucaacacccugcuguuccucaugagcuucaccguccugugccugaccccgguguacuccuuccuccccggcguguacagcgucaucuaccuguaccugaccuucuaccucacgaacgacguguccuuccuggcccacauccaguggauggugauguucacgccccugguccccuucuggaucaccaucgcguacaucaucugcaucagcaccaagcacuucuacugguucuucuccaacuaccucaagcggcgcgugguguucaacggggucagcuucuccaccuucgaggaggccgcccugugcaccuuccugcucaacaaggagauguaccugaagcugcggagcgacgugcuccugccgcugacccaguacaaccgcuaccucgcccuguacaacaaguacaaguacuucuccggcgccauggacaccacgagcuaccgggaggcggccugcugccaccuggccaaggcccucaacgacuucuccaacagcggcuccgacgugcuguaccagccgccccagaccagcaucaccuccgcgguccugcaguga

SEQ ID NO: 18406 - RNA, 1506 nt, Artificial Sequence
  SARS-CoV-2__MT633007.1__non-structural protein 4 (NSP4) CDS gc
augaagaucgugaacaacuggcugaagcagcucaucaaggucacccugguguuccuguucguggccgccaucuucuaccucaucacccccguccacgugaugagcaagcacacggacuucuccagcgagaucaucggcuacaaggcgaucgacgggggcgugacccgcgacaucgccuccaccgacacgugcuucgccaacaagcacgccgacuucgacaccugguucagccagcggggcggcuccuacaccaacgacaaggccugcccccugaucgcggccgucaucacccgcgaggugggguucgugguccccggccugcccggcaccauccuccggacgaccaacggggacuuccugcacuuccugccccgcguguucagcgccgugggcaacaucugcuacaccccguccaagcucaucgaguacaccgacuucgccacgagcgcgugcguccuggccgccgagugcaccaucuucaaggacgccuccgggaagcccgugcccuacugcuacgacaccaacgugcuggagggcagcgucgccuacgagucccuccggcccgacacccgcuacgugcugauggacgggagcaucauccaguucccgaacacguaccuggagggcuccgugcgggucgugaccaccuucgacagcgaguacugccgccacgggaccugcgagcgguccgaggcgggggugugcgucagcacguccggccgcugggugcucaacaacgacuacuaccggagccugcccgggguguucugcggcgucgacgccgugaaccugcucaccaacauguucacgccccugauccagcccaucggcgcccuggacaucuccgccagcaucgucgccgggggcaucguggcgaucguggugaccugccucgccuacuacuucaugcgcuuccggcgcgccuucggggaguacagccacgucguggccuucaacacccugcuguuccucauguccuucaucguccugugccugaccccgguguacagcuuccuccccggcguguacuccgucaucuaccuguaccugaccuucuaccucaccaacgacgugagcuuccuggcccacauccaguggauggugauguucacgccccugguccccuucuggaucaccaucgcguacaucaucugcaucuccaccaagcacuucuacugguucuucagcaacuaccucaagcggcgcgugguguucaacggggucuccuucagcaccuucgaggaggccgcccugugcacguuccugcucaacaaggagauguaccugaagcugcgguccgacgugcuccugccgcugacccaguacaaccgcuaccucgcccuguacaacaaguacaaguacuucagcggcgccauggacaccaccuccuaccgggaggcggccugcugccaccuggccaaggcccucaacgacuucagcaacuccggcagcgacgugcuguaccagccgccccagacguccaucaccagcgcgguccugcaguga

SEQ ID NO: 18407 - RNA, 1506 nt, Artificial Sequence
  SARS-CoV-2__MT609566.1__non-structural protein 4 (NSP4) CDS gc
augaagaucgugaacaacuggcugaagcagcucaucaaggucacccugguguuccuguucguggccgccaucuucuaccucaucacccccguccacgugaugagcaagcacacggacuucuccagcgagaucaucggcuacaaggcgaucgacgggggcgugacccgcgacaucgccuccaccgacacgugcuucgccaacaagcacgccgacuucgacaccugguucagccagcggggcggcuccuacaccaacgacaaggccugcccccugaucgcggccgucaucacccgcgaggugggguucgugguccccggccugcccggcaccauccuccggacgaccaacggggacuuccugcacuuccugccccgcguguucagcgccgugggcaacaucugcuacaccccguccaagcucaucgaguacaccgacuucgccacgagcgcgugcguccuggccgccgagugcaccaucuucaaggacgccuccgggaagcccgugcccuacugcuacgacaccaacgugcuggagggcagcgucgccuacgagucccuccggcccgacacccgcuacgugcugauggacgggagcaucauccaguucccgaacacguaccuggagggcuccgugcgggucgugaccaccuucgacagcgaguacugccgccacgggaccugcgagcgguccgaggcgggggugugcgucagcacguccggccgcugggugcucaacaacgacuacuaccggagccugcccgggguguucugcggcgucgacgccgugaaccugcucaccaacauguucacgccccugauccagcccaucggcgcccuggacaucuccgccagcaucgucgccgggggcaucguggcgaucguggugaccugccucgccuacuacuucaugcgcuuccggcgcgccuucggggaguacagccacgucguggccuucaacacccugcuguuccucauguccuucaccguccugugccugaccccgguguacagcuuccuccccggcguguacuccgucaucuaccuguaccugaccuucuaccucacgaacgacgugagcuuccuggcccacauccaguggauggugauguucacgccccugguccccuucuggaucaccaucgcguacaucaucugcaucuccaccaagcacuucuacugguucuucagcaacuaccucaagcggcgcgugguguucaacggggucuccuucagcaccuucgaggaggccgcccugugcaccuuccugcucaacaaggagauguaccugaagcugcgguccgacgugcuccugccgcugacccaguacaaccgcuaccucgcccuguacaacaaguacaaguacuucagcggcgccauggacaccaucuccuaccgggaggcggccugcugccaccuggccaaggcccucaacgacuucagcaacuccggcagcgacgugcuguaccagccgccccagacguccaucaccagcgcgguccugcaguga

SEQ ID NO: 18408 - RNA, 1506 nt, Artificial Sequence
  SARS-CoV-2__MT609577.1__non-structural protein 4 (NSP4) CDS gc
augaagaucgugaacaacuggcugaagcagcucaucaaggucacccugguguuccuguucguggccgccaucuucuaccucaucacccccguccacgugaugagcaagcacacggacuucuccagcgagaucaucggcuacaaggcgaucgacgggggcgugacccgcgacaucgccuccaccgacacgugcuucgccaacaagcacgccgacuucgacaccugguucagccagcggggcggcuccuacaccaacgacaaggccugcccccugaucgcggccgucaucacccgcgaggugggguucgugguccccggccugcccggcaccauccuccggacgaccaacggggacuuccugcacuuccugccccgcguguucagcgccgugggcaacaucugcuacaccccguccaagcucaucgaguacaccgacuucgccacgagcgcgugcguccuggccgccgagugcaccaucuucaaggacgccuccgggaagcccgugcccuacugcuacgacaccaacgugcuggagggcagcgucgccuacgagucccuccggcccgacacccgcuacgugcugauggacgggagcaucauccaguucccgaacacguaccuggagggcuccgugcgggucgugaccaccuucgacagcgaguacugccgccacgggaccugcgagcgguccgaggcgggggugugcgucagcacguccggccgcugggugcucaacaacgacuacuaccggagccugcccgggguguucugcggcgucgacgccgugaaccugcucaccaacauguucacgccccugauccagcccaucggcgcccuggacaucuccgccagcaucgucgccgggggcaucguggcgaucguggugaccugccucgccuacuacuucaugcgcuuccggcgcgccuucggggaguacagccacgucguggccuucaacacccugcuguuccucauguccuucaccguccugugccugaccccgguguacagcuuccuccccggcguguacuccgucaucuaccuguacuucaccuucuaccugacgaacgacgugagcuuccucgcccacauccaguggauggugauguucacgccccugguccccuucuggaucaccaucgcguacaucaucugcaucuccaccaagcacuucuacugguucuucagcaacuaccugaagcggcgcgugguguucaacggggucuccuucagcaccuucgaggaggccgcccucugcaccuuccugcugaacaaggagauguaccucaagcugcgguccgacgugcugcucccgcugacccaguacaaccgcuaccuggcccucuacaacaaguacaaguacuucagcggcgccauggacaccacguccuaccgggaggcggccugcugccaccuggccaaggcccugaacgacuucagcaacuccggcagcgacgugcucuaccagccgccccagaccuccaucaccagcgcgguccugcaguga

SEQ ID NO: 18409 - RNA, 1506 nt, Artificial Sequence
  SARS-CoV-2__MT601291.1__non-structural protein 4 (NSP4) CDS gc
augaagaucgugaacaacuggcugaagcagcucaucaaggucacccugguguuccuguucguggccgccaucuucuaccucaucacccccguccacgugaugagcaagcacacggacuucuccagcgagaucaucggcuacaaggcgaucgacgggggcgugacccgcgacaucgccuccaccgacacgugcuucgccaacaagcacgccgacuucgacaccugguucagccagcggggcggcuccuacaccaacgacaaggccugcccccugaucgcggccgucaucacccgcgaggugggguucgugguccccggccugcccggcaccauccuccggacgaccaacggggacuuccugcacuuccugccccgcguguucagcgccgugggcaacaucugcuacaccccguccaagcucaucgaguacaccgacuucgccacgagcgcgugcguccuggccgccgagugcaccaucuucaaggacgccuccgggaagcccgugcccuacugcuacgacaccaacgugcuggagggcagcgucgccuacgagucccuccggcccgacacccgcuacgugcugauggacgggagcaucauccaguucccgaacacguaccuggagggcuccgugcgggucgugaccaccuucgacagcgaguacugccgccacgggaccugcgagcgguccgaggcgggggugugcgucagcacguccggccgcugggugcucaacaacgacuacuaccggagccugcccgggguguucugcggcgucgacgccgugaaccugcucaccaacauguucacgccccugauccagcccaucggcgcccuggacaucuccgccagcaucgucgccgggggcaucguggcgaucguggugaccugccucgccuacuacuucaugcgcuuccggcgcgccuucggggaguacagccacgucguggccuucaacacccugcuguuccucauguccuucaccguccugugccugaccccgguguacagcuuccuccccggcguguacuccgucaucuaccuguaccugaccuucuaccucacgaacgacgugagcuuccuggcccacauccaguggauggugauguucacgccccugguccccuucuggaucaccaucgcguacaucaucugcaucuccaccaagcacuucuacugguucuucagcaacuaccucaagcggcgcguguucuucaacgggguguccuucagcaccuucgaggaggccgcccugugcaccuuccugcucaacaaggagauguaccugaagcugcgguccgacguccuccugccgcugacccaguacaaccgcuaccucgcccuguacaacaaguacaaguacuucagcggcgccauggacaccacguccuaccgggaggcggccugcugccaccuggccaaggcccucaacgacuucagcaacuccggcagcgacgugcuguaccagccgccccagaccuccaucaccagcgcggugcugcaguga

SEQ ID NO: 18410 - RNA, 1506 nt, Artificial Sequence
  SARS-CoV-2__MT585084.1__non-structural protein 4 (NSP4) CDS gc
augaagaucgugaacaacuggcugaagcagcucaucaaggucacccugguguuccuguucguggccgccaucuucuaccucaucacccccguccacgugaugagcaagcacacggacuucuccagcgagaucaucggcuacaaggcgaucgacgggggcgugacccgcgacaucgccuccaccgacacgugcuucgccaacaagcacgccgacuucgacaccugguucagccagcggggcggcuccuacaccaacgacaaggccugcccccugaucgcggccgucaucacccgcgaggugggguucgugguccccggccugcccggcaugauccuccggaccacgaacggggacuuccugcacuuccugccccgcguguucagcgccgugggcaacaucugcuacaccccguccaagcucaucgaguacaccgacuucgccaccagcgcgugcguccuggccgccgagugcacgaucuucaaggacgccuccgggaagcccgugcccuacugcuacgacaccaacgugcuggagggcagcgucgccuacgagucccuccggcccgacacccgcuacgugcugauggacgggagcaucauccaguucccgaacaccuaccuggagggcuccgugcgggucgugacgaccuucgacagcgaguacugccgccacgggaccugcgagcgguccgaggcgggggugugcgucagcaccuccggccgcugggugcucaacaacgacuacuaccggagccugcccgggguguucugcggcgucgacgccgugaaccugcucacgaacauguucacgccccugauccagcccaucggcgcccuggacaucuccgccagcaucgucgccgggggcaucguggcgaucguggugaccugccucgccuacuacuucaugcgcuuccggcgcgccuucggggaguacagccacgucguggccuucaacacccugcuguuccucauguccuucaccguccugugccugaccccgguguacagcuuccuccccggcguguacuccgucaucuaccuguaccugaccuucuaccucaccaacgacgugagcuuccuggcccacauccaguggauggugauguucacgccccugguccccuucuggaucaccaucgcguacaucaucugcaucuccaccaagcacuucuacugguucuucagcaacuaccucaagcggcgcgugguguucaacggggucuccuucagcaccuucgaggaggccgcccugugcacguuccugcucaacaaggagauguaccugaagcugcgguccgacgugcuccugccgcugacccaguacaaccgcuaccucgcccuguacaacaaguacaaguacuucagcggcgccauggacaccaccuccuaccgggaggcggccugcugccaccuggccaaggcccucaacgacuucagcaacuccggcagcgacgugcuguaccagccgccccagacguccaucaccagcgcgguccugcaguga

SEQ ID NO: 18411 - RNA, 1506 nt, Artificial Sequence
  SARS-CoV-2__MT499215.1__non-structural protein 4 (NSP4) CDS gc
augaagaucgugaacaacuggcugaagcagcucaucaaggucacccugguguuccuguucguggccgccaucuucuaccucaucacccccguccacgugaugagccgccacacggacuucuccagcgagaucaucggcuacaaggcgaucgacgggggcgugacccgggacaucgccuccaccgacacgugcuucgccaacaagcacgccgacuucgacaccugguucagccagcgcgggggcuccuacaccaacgacaaggccugcccccugaucgcggccgucaucacccgggaggugggguucgugguccccggccugcccggcaccauccuccgcacgaccaacggggacuuccugcacuuccugccccggguguucagcgccgugggcaacaucugcuacaccccguccaagcucaucgaguacaccgacuucgccacgagcgcgugcguccuggccgccgagugcaccaucuucaaggacgccuccgggaagcccgugcccuacugcuacgacaccaacgugcuggagggcagcgucgccuacgagucccuccgccccgacacccgguacgugcugauggacgggagcaucauccaguucccgaacacguaccuggagggcuccgugcgcgucgugaccaccuucgacagcgaguacugccggcacgggaccugcgagcgcuccgaggcgggcgugugcgucagcacguccggccggugggugcucaacaacgacuacuaccgcagccugcccgggguguucugcggcgucgacgccgugaaccugcucaccaacauguucacgccccugauccagcccaucggcgcccuggacaucuccgccagcaucgucgccgggggcaucguggcgaucguggugaccugccucgccuacuacuucaugcgguuccgccgggccuucggggaguacagccacgucguggccuucaacacccugcuguuccucauguccuucaccguccugugccugaccccgguguacagcuuccuccccggcguguacuccgucaucuaccuguaccugaccuucuaccucacgaacgacgugagcuuccuggcccacauccaguggauggugauguucacgccccugguccccuucuggaucaccaucgcguacaucaucugcaucuccaccaagcacuucuacugguucuucagcaacuaccucaagcgccgggugguguucaacggggucuccuucagcaccuucgaggaggccgcccugugcaccuuccugcucaacaaggagauguaccugaagcugcgcuccgacgugcuccugccgcugacccaguacaaccgguaccucgcccuguacaacaaguacaaguacuucagcggcgccauggacaccacguccuaccgcgaggcggccugcugccaccuggccaaggcccucaacgacuucagcaacuccggcagcgacgugcuguaccagccgccccagaccuccaucaccagcgcgguccugcaguga

SEQ ID NO: 18412 - RNA, 1506 nt, Artificial Sequence
  SARS-CoV-2__MT499217.1__non-structural protein 4 (NSP4) CDS gc
augaagaucgugaacaacuggcugaagcagcucaucaaggucacccugguguuccuguucguggccgccaucuucuaccucaucacccccguccacgugaugagccgccacacggacuucuccagcgagaucaucggcuacaaggcgaucgacgggggcgugacccgggacaucgccuccaccgacacgugcuucgccaacaagcacgccgacuucgacaccugguucaaccagcgcgggggcagcuacaccaacgacaaggccugcccccugaucgcggccgucaucacccgggaggugggguucgugguccccggccugcccggcaccauccuccgcacgaccaacggggacuuccugcacuuccugccccggguguucuccgccgugggcaacaucugcuacaccccgagcaagcucaucgaguacaccgacuucgccacguccgcgugcguccuggccgccgagugcaccaucuucaaggacgccagcgggaagcccgugcccuacugcuacgacaccaacgugcuggagggcuccgucgccuacgagagccuccgccccgacacccgguacgugcugauggacggguccaucauccaguucccgaacacguaccuggagggcagcgugcgcgucgugaccaccuucgacuccgaguacugccggcacgggaccugcgagcgcagcgaggcgggcgugugcgucuccacgagcggccggugggugcucaacaacgacuacuaccgcucccugcccgggguguucugcggcgucgacgccgugaaccugcucaccaacauguucacgccccugauccagcccaucggcgcccuggacaucagcgccuccaucgucgccgggggcaucguggcgaucguggugaccugccucgccuacuacuucaugcgguuccgccgggccuucggggaguacagccacgucguggccuucaacacccugcuguuccucaugagcuucaccguccugugccugaccccgguguacuccuuccuccccggcguguacagcgucaucuaccuguaccugaccuucuaccucacgaacgacguguccuuccuggcccacauccaguggauggugauguucacgccccugguccccuucuggaucaccaucgcguacaucaucugcaucagcaccaagcacuucuacugguucuucuccaacuaccucaagcgccgggugguguucaacggggucagcuucuccaccuucgaggaggccgcccugugcaccuuccugcucaacaaggagauguaccugaagcugcgcagcgacgugcuccugccgcugacccaguacaaccgguaccucgcccuguacaacaaguacaaguacuucuccggcgccauggacaccacgagcuaccgcgaggcggccugcugccaccuggccaaggcccucaacgacuucuccaacagcggcuccgacgugcuguaccagccgccccagaccagcaucaccuccgcgguccugcaguga

SEQ ID NO: 18413 - RNA, 1506 nt, Artificial Sequence
  SARS-CoV-2__MT576530.1__non-structural protein 4 (NSP4) CDS gc
augaagaucgugaacaacuggcugaagcagcucaucaaggucacccugguguuccuguucguggccgccaucuucuaccucaucacccccguccacgugaugagcaagcacacggacuucuccagcgagaucaucggcuacaaggcgaucgacgggggcgugacccgcgacaucgccuccaccgacacgugcuucgccaacaaguacgccgacuucgacaccugguucagccagcggggcggcuccuacaccaacgacaaggccugcccccugaucgcggccgucaucacccgcgaggugggguucgugguccccggccugcccggcaccauccuccggacgaccaacggggacuuccugcacuuccugccccgcguguucagcgccgugggcaacaucugcuacaccccguccaagcucaucgaguacaccgacuucgccacgagcgcgugcguccuggccgccgagugcaccaucuucaaggacgccuccgggaagcccgugcccuacugcuacgacaccaacgugcuggagggcagcgucgccuacgagucccuccggcccgacacccgcuacgugcugauggacgggagcaucauccaguucccgaacacguaccuggagggcuccgugcgggucgugaccaccuucgacagcgaguacugccgccacgggaccugcgagcgguccgaggcgggggugugcgucagcacguccggccgcugggugcucaacaacgacuacuaccggagccugcccgggguguucugcggcgucgacgccgugaaccugcucaccaacauguucacgccccugauccagcccaucggcgcccuggacaucuccgccagcaucgucgccgggggcaucguggcgaucguggugaccugccucgccuacuacuucaugcgcuuccggcgcgccuucggggaguacagccacgucguggccuucaacacccugcuguuccucauguccuucaccguccugugccugaccccgguguacagcuuccuccccggcguguacuccgucaucuaccuguaccugaccuucuaccucacgaacgacgugagcuuccuggcccacauccaguggauggugauguucacgccccugguccccuucuggaucaccaucgcguacaucaucugcaucuccaccaagcacuucuacugguucuucagcaacuaccucaagcggcgcgugguguucaacggggucuccuucagcaccuucgaggaggccgcccugugcaccuuccugcucaacaaggagauguaccugaagcugcgguccgacgugcuccugccgcugacccaguacaaccgcuaccucgcccuguacaacaaguacaaguacuucagcggcgccauggacaccacguccuaccgggaggcggccugcugccaccuggccaaggcccucaacgacuucagcaacuccggcagcgacgugcuguaccagccgccccagaccuccaucaccagcgcgguccugcaguga

SEQ ID NO: 18414 - RNA, 1506 nt, Artificial Sequence
  SARS-CoV-2__MT520390.1__non-structural protein 4 (NSP4) CDS gc
augaagaucgugaacaacuggcugaagcagcucaucaaggucacccugguguuccuguucguggccgccaucuucuaccucaucacccccguccacgugaugagcaagcacacggacuucuccagcgagaucaucggcuacaaggcgaucgacgggggcgugacccgcgacaucgccuacaccgacacgugcuucgccaacaagcacgccgacuucgacaccugguucucccagcggggcggcagcuacaccaacgacaaggccugcccccugaucgcggccgucaucacccgcgaggugggguucgugguccccggccugcccggcaccauccuccggacgaccaacggggacuuccugcacuuccugccccgcguguucuccgccgugggcaacaucugcuacaccccgagcaagcucaucgaguacaccgacuucgccacguccgcgugcguccuggccgccgagugcaccaucuucaaggacgccagcgggaagcccgugcccuacugcuacgacaccaacgugcuggagggcuccgucgccuacgagagccuccggcccgacacccgcuacgugcugauggacggguccaucauccaguucccgaacacguaccuggagggcagcgugcgggucgugaccaccuucgacuccgaguacugccgccacgggaccugcgagcggagcgaggcgggggugugcgucuccacgagcggccgcugggugcucaacaacgacuacuaccggucccugcccgggguguucugcggcgucgacgccgugaaccugcucaccaacauguucacgccccugauccagcccaucggcgcccuggacaucagcgccuccaucgucgccgggggcaucguggcgaucguggugaccugccucgccuacuacuucaugcgcuuccggcgcgccuucggggaguacagccacgucguggccuucaacacccugcuguuccucaugagcuucaccguccugugccugaccccgguguacuccuuccuccccggcguguacagcgucaucuaccuguaccugaccuucuaccucacgaacgacguguccuuccuggcccacauccaguggauggugauguucacgccccugguccccuucuggaucaccaucgcguacaucaucugcaucagcaccaagcacuucuacugguucuucuccaacuaccucaagcggcgcgugguguucaacggggucagcuucuccaccuucgaggaggccgcccugugcaccuuccugcucaacaaggagauguaccugaagcugcggagcgacgugcuccugccgcugacccaguacaaccgcuaccucgugcuguacaacaaguacaaguacuucuccggcgccauggacaccacgagcuaccgggaggccgcgugcugccaccuggccaaggcccucaacgacuucuccaacagcggcuccgacguccuguaccagccgccccagaccagcaucaccuccgccgugcugcaguga

SEQ ID NO: 18415 - RNA, 1506 nt, Artificial Sequence
  SARS-CoV-2__MT539163.1__non-structural protein 4 (NSP4) CDS gc
augaagaucgugaacaacuggcugaagcagcucaucaaggucacccugguguuccuguucguggccgccaucuucuaccucaucacccccguccacgugaugagcaagcacacggacuucuccagcgagaucaucggcuacaaggcgaucgacgggggcgugacccgcgacaucgccuccaccgacacgugcuucgccaacaagcacgccgacuucgacaccugguucagccagcggggcggcuccuacaccaacgacaaggccugcccccugaucgcggccgucaucacccgcgaggugggguucgugguccccggccugcccggcaccauccuccggacgaccaacggggacuuccugcacuuccugccccgcguguucagcgccgugggcaacaucugcuacaccccguccaagcucaucgaguacaccgacuucgccacgagcgcgugcguccuggccgccgagugcaccaucuucaaggacgccuccgggaagcccgugcccuacugcuacgacaccaacgugcuggagggcagcgucgccuacgagucccuccggcccgacacccgcuacgugcugauggacgggagcaucauccaguucccgaacacguaccuggagggcuccgugcgggucgugaccaccuucgacagcgaguacugccgccacgggaccugcgagcgguccgaggcgggggugugcgucagcacguccggccgcugggugcucaacaacgacuacuaccggagccugcccgggguguucugcggcgucgacgccgugaaccugcucaccaacauguucacgccccugauccagcccaucggcgcccuggacaucuccgccagcaucgucgccgggggcaucguggcgaucguggugaccugccucgccuacuacuucaugcgcuuccggcgcgccuucggggaguacagccacgucguggccuucuccacccugcuguuccucaugagcuucaccguccugugccugaccccgguguacuccuuccuccccggcguguacagcgucaucuaccuguaccugaccuucuaccucacgaacgacguguccuuccuggcccacauccaguggauggugauguucacgccccugguccccuucuggaucaccaucgcguacaucaucugcaucagcaccaagcacuucuacugguucuucuccaacuaccucaagcggcgcgugguguucaacggggucagcuucuccaccuucgaggaggccgcccugugcaccuuccugcucaacaaggagauguaccugaagcugcggagcgacgugcuccugccgcugacccaguacaaccgcuaccucgcccuguacaacaaguacaaguacuucuccggcgccauggacaccacgagcuaccgggaggcggccugcugccaccuggccaaggcccucaacgacuucuccaacagcggcuccgacgugcuguaccagccgccccagaccagcaucaccuccgcgguccugcaguga

SEQ ID NO: 18416 - RNA, 1506 nt, Artificial Sequence
  SARS-CoV-2__MT407653.1__non-structural protein 4 (NSP4) CDS gc
augaagaucgugaacaacuggcugaagcagcucaucaaggucacccugguguuccuguucguggccgccaucuucuaccucaucacccccguccacgugaugagcaagcacacggacuucuccagcgagaucaucggcuacaaggcgaucgacgggggcgugacccgcgacaucgccuccaccgacacgugcuucgccaacaagcacgccgacuucgacaccugguucagccagcggggcggcuccuacaccaacgacaaggccugcccccugaucgcggccgucaucacccgcgaggugggguucgugguccccggccugcccggcaccauccuccggacgaccaacggggacuuccugcacuuccugccccgcguguucagcgccgugggcaacaucugcuacaccccguccaagcucaucgaguacaccgacuucgccacgagcgcgugcguccuggccgccgagugcaccaucuucaaggacgccuccgggaagcccgugcccuacugcuacgacaccaacgugcuggagggcagcgucgccuacgagucccuccggcccgacacccgcuacgugcugauggacgggagcaucauccaguucccgaacacguaccuggagggcuccgugcgggucgugaccaccuucgacagcgaguacugccgccacgggaccugcgagcgguccgaggcgggggugugcgucagcacguccggccgcugggugcucaacaacgacuacuaccggagccugcccgggguguucugcggcgucgacgccgugaaccugcucaccaacauguucacgccccugaugcagcccaucggcgcccuggacaucuccgccagcaucgucgccgggggcaucguggcgaucguggugaccugccucgccuacuacuucaugcgcuuccggcgcgccuucggggaguacagccacgucguggccuucaacacccugcuguuccucauguccuucaccguccugugccugaccccgguguacagcuuccuccccggcguguacuccgucaucuaccuguaccugaccuucuaccucacgaacgacgugagcuuccuggcccacauccaguggauggugauguucacgccccugguccccuucuggaucaccaucgcguacaucaucugcaucuccaccaagcacuucuacugguucuucagcaacuaccucaagcggcgcgugguguucaacggggucuccuucagcaccuucgaggaggccgcccugugcaccuuccugcucaacaaggagauguaccugaagcugcgguccgacgugcuccugccgcugacccaguacaaccgcuaccucgcccuguacaacaaguacaaguacuucagcggcgccauggacaccacguccuaccgggaggcggccugcugccaccuggccaaggcccucaacgacuucagcaacuccggcagcgacgugcuguaccagccgccccagaccuccaucaccagcgcgguccugcaguga

SEQ ID NO: 18417 - RNA, 1506 nt, Artificial Sequence
  SARS-CoV-2__MT535503.1__non-structural protein 4 (NSP4) CDS gc
augaagaucgugaacaacuggcugaagcagcucaucaaggucacccugguguuccuguucguggccgccaucuucuaccucaucacccccguccacgugaugagcaagcacacggacuucuccagcgagaucaucggcuacaaggcgaucgacgggggcgugacccgcgacaucgccuccaccgacacgugcuucgccaacaagcacgccgacuucagccagcggggcggcuccuacaccaacgacaaggccugcccccugaucgcggccgucaucacccgcgaggugggguucgugguccccggccugcccggcaccauccuccggaccacgaacggggacuuccugcacuuccugccccgcguguucagcgccgugggcaacaucugcuacaccccguccaagcucaucgaguacaccgacuucgccaccagcgcgugcguccuggccgccgagugcacgaucuucaaggacgccuccgggaagcccgugcccuacugcuacgacaccaacgugcuggagggcagcgucgccuacgagucccuccggcccgacacccgcuacgugcugauggacgggagcaucauccaguucccgaacaccuaccuggagggcuccgugcgggucgugacgaccuucgacagcgaguacugccgccacgggaccugcgagcgguccgaggcgggggugugcgucagcaccuccggccgcugggugcucaacaacgacuacuaccggagccugcccgggguguucugcggcgucgacgccgugaaccugcucacgaacauguucacgccccugauccagcccaucggcgcccuggacaucuccgccagcaucgucgccgggggcaucguggcgaucguggugaccugccucgccuacuacuucaugcgcuuccggcgcgccuucggggaguacagccacgucguggccuucaacacccugcuguuccucauguccuucaccguccugugccugaccccgguguacagcuuccuccccggcguguacuccgucaucuaccuguaccugaccuucuaccucaccaacgacgugagcuuccuggcccacauccaguggauggugauguucacgccccugguccccuucuggaucaccaucgcguacaucaucugcaucuccaccaagcacuucuacugguucuucagcaacuaccucaagcggcgcgugguguucaacggggucuccuucagcaccuucgaggaggccgcccugugcacguuccugcucaacaaggagauguaccugaagcugcgguccgacgugcuccugccgcugacccaguacaaccgcuaccucgcccuguacaacaaguacaaguacuucagcggcgccauggacaccaccuccuaccgggaggcggccugcugccaccuggccaaggcccucaacgacuucagcaacuccggcagcgacgugcuguaccagccgccccagacguccaucaccagcgcgguccugcaguccggguuccgcuga

SEQ ID NO: 18418 - RNA, 1506 nt, Artificial Sequence
  SARS-CoV-2__MT533204.1__non-structural protein 4 (NSP4) CDS gc
augaagaucgugaacaacuggcugaagcagcucaucaaggucacccugguguuccuguucguggccgccaucuucuaccucaucacccccguccacgugaugagcaagcacacggacuucuccagcgagaucaucggcuacaaggcgaucgacgggggcgugacccgcgacaucgccuccaccgacacgugcuucgccaacaagcacgccgacuucgacaccugguucagccagcggggcggcuccuacaccaacgacaaggccugcccccugaucgcggccgucaucacccgcgaggugggguucgugguccccggccugcccggcaccauccuccggacgaccaacggggacuuccugcacuuccugccccgcguguucagcgccgugggcaacaucugcuacaccccguccaagcucaucgaguacaccgacuucgccacgagcgcgugcguccuggccgccgagugcaccaucuucaaggacgccuccgggcggcccgugcccuacugcuacgacaccaacgugcuggagggcagcgucgccuacgagucccuccgccccgacacccgguacgugcugauggacgggagcaucauccaguucccgaacacguaccuggagggcuccgugcgcgucgugaccaccuucgacagcgaguacugccggcacgggaccugcgagcgcuccgaggcgggggugugcgucagcacguccggccggugggugcucaacaacgacuacuaccgcagccugcccgggguguucugcggcgucgacgccgugaaccugcucaccaacauguucacgccccugauccagcccaucggcgcccuggacaucuccgccagcaucgucgccgggggcaucguggcgaucguggugaccugccucgccuacuacuucaugcgguuccgccgggccuucggggaguacagccacgucguggccuucaacacccugcuguuccucauguccuucaccguccugugccugaccccgguguacagcuuccuccccggcguguacuccgucaucuaccuguaccugaccuucuaccucacgaacgacgugagcuuccuggcccacauccaguggauggugauguucacgccccugguccccuucuggaucaccaucgcguacaucaucugcaucuccaccaagcacuucuacugguucuucagcaacuaccucaagcgccgggugguguucaacggggucuccuucagcaccuucgaggaggccgcccugugcaccuuccugcucaacaaggagauguaccugaagcugcgcuccgacgugcuccugccgcugacccaguacaaccgguaccucgcccuguacaacaaguacaaguacuucagcggcgccauggacaccacguccuaccgcgaggcggccugcugccaccuggccaaggcccucaacgacuucagcaacuccggcagcgacgugcuguaccagccgccccagaccuccaucaccagcgcgguccugcaguga

SEQ ID NO: 18419 - RNA, 1506 nt, Artificial Sequence
  SARS-CoV-2__MT512440.1__non-structural protein 4 (NSP4) CDS gc
augaagaucgugaacaacuggcugaagcagcucaucaaggucacccugguguuccuguucguggccgccaucuucuaccucaucacccccguccacgugaugagcaagcacacggacuucuccagcgagaucaucggcuacaaggcgaucgacgggggcgugacccgcgacaucgccuccaccgacacgugcuucgccaacaagcacgccgacuucgacaccugguucagccagcggggcggcuccuacaccaacgacaaggccugcccccugaucgcggccgucaucacccgcgaggugggguucgugguccccggccugcccggcaccauccuccggacgaccaacggggacuuccugcacuuccugccccgcguguucagcgccgugggcaacaucugcuacaccccguccaagcucaucgaguacaccgacuucgccacgagcgcgugcguccuggccgccgagugcaccaucuucaaggacgccuccgggaagcccgugcccuacugcuacgacaccaacgugcuggagggcagcgucgccuacgagucccuccggcccgacacccgcuacgugcugauggacgggagcaucauccaguucccgaacacguaccuggagggcuccgugcgggucgugaccaccuucgacagcgaguacugccgccacgggaccugcgagcgguccgaggcgggggugugcgucagcacguccggccgcugggugcucaacaacgacuacuaccggagccugcccgggguguucugcggcgucgacgccgugaaccugcucaccaacauguucacgccccugauccagcccaucggcgcccuggacaucuccgccagcaucgucgccgggggcaucguggcgaucguggugaccugccucgccuacuacuucaugcgcuuccggcgcgccuucggggaguacagccacgucguggccuucaacacccugcuguuccucauguccuucaccguccugugccugaccccgguguacagcuuccuccccggcguguacuccgucaucuaccuguaccugaccuucuaccucacgaacgacgugagcuuccuggcccacauccaguggauggugauguucacgccccugguccccuucuggaucaccaucgcguacaucaucugcaccuccaccaagcacuucuacugguucuucagcaacuaccucaagcggcgcgugguguucaacggggucuccuucagcaccuucgaggaggccgcccugugcaccuuccugcucaacaaggagauguaccugaagcugcgguccgacgugcuccugccgcugacccaguacaaccgcuaccucgcccuguacaacaaguacaaguacuucagcggcgccauggacacgaccuccuaccgggaggcggccugcugccaccuggccaaggcccucaacgacuucagcaacuccggcagcgacgugcuguaccagccgccccagaccuccaucaccagcgcgguccugcaguga

SEQ ID NO: 18420 - RNA, 1506 nt, Artificial Sequence
  SARS-CoV-2__MT509489.1__non-structural protein 4 (NSP4) CDS gc
augaagaucgugaacaacuggcugaagcagcucaucaaggucacccugguguuccuguucguggccgccaucuucuaccucaucacccccguccacgugaugagcaagcacacggacuucuccagcgagaucaucggcuacaaggugaucgacgggggcgucacccgcgacaucgcguccaccgacacgugcuucgccaacaagcacgccgacuucgacaccugguucagccagcggggcggcuccuacaccaacgacaaggccugcccccugaucgccgcggugaucacccgcgaggugggguucgucgugcccggccugcccggcaccauccuccggacgaccaacggggacuuccugcacuuccugccccgcguguucagcgccgucggcaacaucugcuacaccccguccaagcucaucgaguacaccgacuucgccacgagcgccugcgugcuggcggccgagugcaccaucuucaaggacgccuccgggaagcccgugcccuacugcuacgacaccaacguccuggagggcagcguggccuacgagucccuccggcccgacacccgcuacgugcugauggacgggagcaucauccaguucccgaacacguaccuggagggcuccguccggguggugaccaccuucgacagcgaguacugccgccacgggaccugcgagcgguccgaggccggggucugcgugagcacguccggccgcugggugcucaacaacgacuacuaccggagccugcccggggucuucugcggcguggacgcggucaaccugcucaccaacauguucacgccccugauccagcccaucggcgcccuggacaucuccgccagcaucguggccgggggcaucguggccaucgucgugaccugccucgcguacuacuucaugcgcuuccggcgcgccuucggggaguacagccacguggucgccuucaacacccugcuguuccucauguccuucaccgugcugugccugaccccgguguacagcuuccuccccggcgucuacuccgugaucuaccuguaccugaccuucuaccucacgaacgacgugagcuuccuggcccacauccaguggauggucauguucacgccccuggugcccuucuggaucaccaucgccuacaucaucugcaucuccaccaagcacuucuacugguucuucagcaacuaccucaagcggcgcguggucuucaacgggguguccuucagcaccuucgaggaggcggcccugugcaccuuccugcucaacaaggagauguaccugaagcugcgguccgacgugcuccugccgcugacccaguacaaccgcuaccucgcccuguacaacaaguacaaguacuucagcggcgccauggacaccacguccuaccgggaggccgcgugcugccaccuggccaaggcccucaacgacuucagcaacuccggcagcgacguccuguaccagccgccccagaccuccaucaccagcgccgugcugcaguga

SEQ ID NO: 18421 - RNA, 1506 nt, Artificial Sequence
  SARS-CoV-2__MT506886.1__non-structural protein 4 (NSP4) CDS gc
augaagaucgugaacaacuggcugaagcagcucaucaaggucacccugguguuccuguucguggccgccaucuucuaccucaucacccccguccacgugaugagcaagcacacggacuucuccagcgagaucaucggcuacaaggcgaucgacgggggcgugacccgcgacaucgccuccaccgacacgugcuucgccaacaagcacgccgacuucgacaccugguucagccagcggggcggcuccuacaccaacgacaaggccugcccccugaucgcggccgucaucacccgcgaggugggguucgugguccccggccugcccggcaccauccuccggacgaccaacggggacuuccugcacuuccugccccgcguguucagcgccgugggcaacaucugcuacaccccguccaagcucgucgaguacaccgacuucgccacgagcgcgugcgugcuggccgccgagugcaccaucuucaaggacgccuccgggaagcccgugcccuacugcuacgacaccaacguccuggagggcagcguggccuacgagucccuccggcccgacacccgcuacgugcugauggacgggagcaucauccaguucccgaacacguaccuggagggcuccguccggguggugaccaccuucgacagcgaguacugccgccacgggaccugcgagcgguccgaggcgggggucugcgugagcacguccggccgcugggugcucaacaacgacuacuaccggagccugcccggggucuucugcggcguggacgccgucaaccugcucaccaacauguucacgccccugauccagcccaucggcgcccuggacaucuccgccagcaucguggccgggggcaucguggcgaucgucgugaccugccucgccuacuacuucaugcgcuuccggcgcgccuucggggaguacagccacguggucgccuucaacacccugcuguuccucauguccuucaccgugcugugccugaccccgguguacagcuuccuccccggcgucuacuccgugaucuaccuguaccugaccuucuaccucacgaacgacgugagcuuccuggcccacauccaguggauggucauguucacgccccuggugcccuucuggaucaccaucgcguacaucaucugcaucuccaccaagcacuucuacugguucuucagcaacuaccucaagcggcgcguggucuucaacgggguguccuucagcaccuucgaggaggccgcccugugcaccuuccugcucaacaaggagauguaccugaagcugcgguccgacgugcuccugccgcugacccaguacaaccgcuaccucgcccuguacaacaaguacaaguacuucagcggcgccauggacaccacguccuaccgggaggcggccugcugccaccuggccaaggcccucaacgacuucagcaacuccggcagcgacguccuguaccagccgccccagaccuccaucaccagcgcggugcugcaguga

SEQ ID NO: 18422 - RNA, 1506 nt, Artificial Sequence
  SARS-CoV-2__MT499188.1__non-structural protein 4 (NSP4) CDS gc
augaagaucgugaacaacuggcugaagcagcucaucaaggucacccugguguuccuguucguggccgccaucuucuaccucaucacccccguccacgugaugagcaagcacacggacuucuccagcgagaucaucggcuacaaggcgaucgacgggggcgugacccgcgacaucgccuccaccgacacgugcuucgccaacaagcacgccgacuucgacaccugguucagccagcggggcggcuccuacaccaacgacaaggccugcccccugaucgcggccgucaucacccgcgaggugggguucgugguccccggccugcccggcaccgugcuccggacgaccaacggggacuuccugcacuuccugccccgcguguucagcgccgucggcaacaucugcuacaccccguccaagcucaucgaguacaccgacuucgccacgagcgcgugcgugcuggccgccgagugcaccaucuucaaggacgccuccgggaagcccgugcccuacugcuacgacaccaacguccuggagggcagcguggccuacgagucccuccggcccgacacccgcuacgugcugauggacgggagcaucauccaguucccgaacacguaccuggagggcuccguccggguggugaccaccuucgacagcgaguacugccgccacgggaccugcgagcgguccgaggcgggggucugcgugagcacguccggccgcugggugcucaacaacgacuacuaccggagccugcccggggucuucugcggcguggacgccgucaaccugcucaccaacauguucacgccccugauccagcccaucggcgcccuggacaucuccgccagcaucguggccgggggcaucguggcgaucgucgugaccugccucgccuacuacuucaugcgcuuccggcgcgccuucggggaguacagccacguggucgccuucaacacccugcuguuccucauguccuucaccgugcugugccugaccccgguguacagcuuccuccccggcgucuacuccgugaucuaccuguaccugaccuucuaccucacgaacgacgugagcuuccuggcccacauccaguggauggucauguucacgccccuggugcccuucuggaucaccaucgcguacaucaucugcaucuccaccaagcacuucuacugguucuucagcaacuaccucaagcggcgcguggucuucaacgggguguccuucagcaccuucgaggaggccgcccugugcaccuuccugcucaacaaggagauguaccugaagcugcgguccgacgugcuccugccgcugacccaguacaaccgcuaccucgcccuguacaacaaguacaaguacuucagcggcgccauggacaccacguccuaccgggaggcggccugcugccaccuggccaaggcccucaacgacuucagcaacuccggcagcgacguccuguaccagccgccccagaccuccaucaccagcgcggugcugcaguga

SEQ ID NO: 18423 - RNA, 1506 nt, Artificial Sequence
  SARS-CoV-2__MT499209.1__non-structural protein 4 (NSP4) CDS gc
augaagaucgugaacaacuggcugaagcagcucaucaaggucacccugguguuccuguucguggccgccaucuucuaccucaucacccccguccacgugaugagcaagcacacggacuucuccagcgagaucaucggcuacaaggcgaucgacgggggcgugacccgcgacaucgccuccaccgacacgugcuucgccaacaagcacgccgacuucgacaccugguucagccagcggggcggcuccuacaccaacgacaaggccugcccccugaucgcggccgucaucacccgcgaggugggguucgugguccccggccugcccggcaccauccuccggacgaccaacggggacuuccugcacuuccugccccgcguguucagcgccgugggcaacaucugcuacaccccguccaagcucaucgaguacaccgacuucgccacgagcgcgugcguccuggccgccgagugcaccaucuucaaggacgccuccgggaagcccgugcccuacugcuacgacaccaacgugcuggagggcagcgucgccuacgagucccuccggcccgacacccgcuacgugcugauggacgggagcaucauccaguucccgaacacguaccuggaguccagcgugcgggucgugaccaccuucgacuccgaguacugccgccacgggaccugcgagcggagcgaggcgggcgugugcgucuccacgagcgggcgcugggugcucaacaacgacuacuaccggucccugcccggcguguucugcggggucgacgccgugaaccugcucaccaacauguucacgccccugauccagcccaucggcgcccuggacaucagcgccagcaucgucgccggcgggaucguggcgaucguggugaccugccucgccuacuacuucaugcgcuuccggcgcgccuucggcgaguacucccacgucguggccuucaacacccugcuguuccucaugagcuucaccguccugugccugaccccgguguacuccuuccuccccgggguguacagcgucaucuaccuguaccugaccuucuaccucacgaacgacguguccuuccuggcccacauccaguggauggugauguucacgccccugguccccuucuggaucaccaucgcguacaucaucugcaucagcaccaagcacuucuacugguucuucuccaacuaccucaagcggcgcgugguguucaacggcgucagcuucuccaccuucgaggaggccgcccugugcaccuuccugcucaacaaggagauguaccugaagcugcggagcgacgugcuccugccgcugacccaguacaaccgcuaccucgcccuguacaacaaguacaaguacuucuccggggccauggacaccacgagcuaccgggaggcggccugcugccaccuggccaaggcccucaacgacuucuccaacagcggcuccgacgugcuguaccagccgccccagaccagcaucaccuccgcgguccugcaguga

SEQ ID NO: 18424 - RNA, 1506 nt, Artificial Sequence
  SARS-CoV-2__MT477852.1__non-structural protein 4 (NSP4) CDS gc
augaagaucgugaacaacuggcugaagcagcucaucaaggucacccugcuguuccucuucguggccgccaucuucuaccugaucacccccgugcacgucaugagcaagcacacggacuucuccagcgagaucaucggcuacaaggcgaucgacgggggcgugacccgcgacaucgccuccaccgacacgugcuucgccaacaagcacgccgacuucgacaccugguucagccagcggggcggcuccuacaccaacgacaaggccugcccccugaucgcggccgugaucacccgcgaggucggguucguggugcccggccuccccggcaccauccugcggacgaccaacggggacuuccugcacuuccucccccgcgucuucagcgccgugggcaacaucugcuacaccccguccaagcugaucgaguacaccgacuucgccacgagcgcgugcgugcuggccgccgagugcaccaucuucaaggacgccuccgggaagcccguccccuacugcuacgacaccaacgugcucgagggcagcguggccuacgagucccugcggcccgacacccgcuacguccugauggacgggagcaucauccaguucccgaacacguaccucgagggcuccgugcggguggucaccaccuucgacagcgaguacugccgccacgggaccugcgagcgguccgaggcgggggugugcgugagcacguccggccgcuggguccugaacaacgacuacuaccggagccugcccgggguguucugcggcguggacgccgucaaccuccugaccaacauguucacgccccugauccagcccaucggcgcccucgacaucuccgccagcaucguggccgggggcaucgucgcgaucguggugaccugccuggccuacuacuucaugcgcuuccggcgcgccuucggggaguacagccacgucguggccuucaacacccuccuguuccugauguccuucaccgugcugugccucaccccggucuacagcuuccugcccggcguguacuccgugaucuaccuguaccucaccuucuaccugacgaacgacgucagcuuccuggcccacauccaguggauggugauguucacgccccucgugcccuucuggaucaccaucgcguacaucaucugcaucuccaccaagcacuucuacugguucuucagcaacuaccugaagcggcgcgucguguucaacgggguguccuucagcaccuucgaggaggccgcccugugcaccuuccuccugaacaaggagauguaccugaagcuccgguccgacguccugcugccgcucacccaguacaaccgcuaccuggcccuguacaacaaguacaaguacuucagcggcgccauggacaccacguccuaccgggaggcggccugcugccaccucgccaaggcccugaacgacuucagcaacuccggcagcgacgugcuguaccagccgccccagaccuccaucaccagcgcggugcugcaguga

SEQ ID NO: 18425 - RNA, 1506 nt, Artificial Sequence
  SARS-CoV-2__MT481932.1__non-structural protein 4 (NSP4) CDS gc
augaagaucgugaacaacuggcugaagcagcucaucaaggucacccugguguuccuguucguggccgccaucuucuaccucaucacccccguccacgugaugagcaagcacacggacuucuccagcgagaucaucggcuacaaggcgaucgacgggggcgugacccgcgacaucgccuccaccgacacgugcuucgccaacaagcacgccgacuucgacaccugguucagccagcggggcggcuccuacaccaacgacaaggccugcccccugaucgcggccgucaucacccgcgaggugggguucgugguccccggccugcccggcaccauccuccggacgaccaacggggacuuccugcacuuccugccccgcguguucagcgccgugggcaacaucugcuacaccccguccaagcucaucgaguacaccgacuucgccacgagcgcgugcguccuggccgccgagugcaccaucuucaaggacgccuccgggaagcccgugcccuacugcuacgacaccaacgugcuggagggcagcgucgccuacgagucccuccggcccgacacccgcuacgugcugauggacgggagcaucauccaguucccgaacacguaccuggagggcuccgugcgggucgugaccaccuucgacagcgaguacugccgccacgggaccugcgagcgguccgaggcgggggugugcgucagcacguccggccgcugggugcucaacaacgacuacuaccggagccugcccgggguguucugcggcgucgacgccgugaaccugcucaccaacauguucacgccccugauccagcccaucggcgcccuggacaucuccgccagcaucgucgccgggggcaucguggcgaucguggugaccugccucgccuacuacuucaugcgcuuccggcgcgccuucggggaguacagccacgucguggccuucaacacccugcuguuccucauguccuucaccguccugugccugaccccgguguaccucuuccugcccggcguguacagcgucaucuaccuguaccucaccuucuaccugacgaacgacguguccuuccuggcccacauccaguggauggugauguucacgccccucguccccuucuggaucaccaucgcguacaucaucugcaucagcaccaagcacuucuacugguucuucuccaacuaccugaagcggcgcgugguguucaacggggucagcuucuccaccuucgaggaggccgcccugugcaccuuccuccugaacaaggagauguaccugaagcuccggagcgacgugcugcugccgcucacccaguacaaccgcuaccuggcccuguacaacaaguacaaguacuucuccggcgccauggacaccacgagcuaccgggaggcggccugcugccaccucgccaaggcccugaacgacuucuccaacagcggcuccgacgugcuguaccagccgccccagaccagcaucaccuccgcgguccugcaguga

SEQ ID NO: 18426 - RNA, 1506 nt, Artificial Sequence
  SARS-CoV-2__MT482148.1__non-structural protein 4 (NSP4) CDS gc
augaagaucgugaacaacuggcugaagcagcucaucaaggucacccugguguuccuguucguggccgccaucuucuaccucaucacccccguccacgugaugagcaagcacacggacuucuccagcgagaucaucggcuacaaggcgaucgacgggggcgugacccgcgacaucgccuccaccgacacgugcuucgccaacaagcacgccgacuucgacaccugguucagccagcggggcggcuccuacaccaacgacaaggccugcccccugaucgcggccgucaucacccgcgaggugggguucgugguccccggccugcccagcaccauccuccggacgaccaacggcgacuuccugcacuuccugccccgcguguucuccgccguggggaacaucugcuacaccccgagcaagcucaucgaguacaccgacuucgccacguccgcgugcguccuggccgccgagugcaccaucuucaaggacgccagcggcaagcccgugcccuacugcuacgacaccaacgugcuggagggguccgucgccuacgagagccuccggcccgacacccgcuacgugcugauggacggcuccaucauccaguucccgaacacguaccuggaggggagcgugcgggucgugaccaccuucgacuccgaguacugccgccacgggaccugcgagcggagcgaggcgggcgugugcgucuccacgagcgggcgcugggugcucaacaacgacuacuaccggucccugcccggcguguucugcggggucgacgccgugaaccugcucaccaacauguucacgccccugauccagcccaucggcgcccuggacaucagcgccagcaucgucgccggcgggaucguggcgaucguggugaccugccucgccuacuacuucaugcgcuuccggcgcgccuucggcgaguacucccacgucguggccuucaacacccugcuguuccucaugagcuucaccguccugugccugaccccgguguacuccuuccuccccgggguguacagcgucaucuaccuguaccugaccuucuaccucacgaacgacguguccuuccuggcccacauccaguggauggugauguucacgccccugguccccuucuggaucaccaucgcguacaucaucugcaucagcaccaagcacuucuacugguucuucuccaacuaccucaagcggcgcgugguguucaacggcgucagcuucuccaccuucgaggaggccgcccugugcaccuuccugcucaacaaggagauguaccugaagcugcggagcgacgugcuccugccgcugacccaguacaaccgcuaccucgcccuguacaacaaguacaaguacuucuccggggccauggacaccacgagcuaccgggaggcggccugcugccaccuggccaaggcccucaacgacuucuccaacagcggcuccgacgugcuguaccagccgccccagaucagcaucaccuccgcgguccugcaguga

SEQ ID NO: 18427 - RNA, 1506 nt, Artificial Sequence
  SARS-CoV-2__MT079843.1__non-structural protein 4 (NSP4) CDS gc
augaagaucgugaacaacuggcugaagcagcucaucaaggucacccugguguuccuguucguggccgccaucuucuaccucaucacccccguccacgugaugagcaagcacacggacuucuccagcgagaucaucggcuacaaggcgaucgacgggggcgugacccgcgacaucgccuccaccgacacgugcuucgccaacaagcacgccgacuucgacaccugguucagccagcggggcggcuccuacaccaacgacaaggccugcccccugaucgcggccgucaucacccgcgaggugggguucgugguccccggccugcccggcaccaucagccggacgaccaacggggacuuccuccacuuccugccccgcguguucuccgccgugggcaacaucugcuacaccccgagcaagcugaucgaguacaccgacuucgccacguccgcgugcguccucgccgccgagugcaccaucuucaaggacgccagcgggaagcccgugcccuacugcuacgacaccaacgugcuggagggcuccgucgccuacgagagccugcggcccgacacccgcuacgugcucauggacggguccaucauccaguucccgaacacguaccuggagggcagcgugcgggucgugaccaccuucgacuccgaguacugccgccacgggaccugcgagcggagcgaggcgggggugugcgucuccacgagcggccgcugggugcugaacaacgacuacuaccggucccuccccgggguguucugcggcgucgacgccgugaaccugcugaccaacauguucacgccccucauccagcccaucggcgcccuggacaucagcgccagcaucgucgccgggggcaucguggcgaucguggugaccugccuggccuacuacuucaugcgcuuccggcgcgccuucggggaguacucccacgucguggccuucaacacccuccuguuccugaugagcuucaccguccucugccugaccccgguguacuccuuccugcccggcguguacagcgucaucuaccucuaccugaccuucuaccugacgaacgacguguccuuccucgcccacauccaguggauggugauguucacgccccugguccccuucuggaucaccaucgcguacaucaucugcaucagcaccaagcacuucuacugguucuucuccaacuaccugaagcggcgcgugguguucaacggggucagcuucuccaccuucgaggaggccgcccucugcaccuuccugcugaacaaggagauguaccucaagcugcggagcgacgugcugcucccgcugacccaguacaaccgcuaccuggcccucuacaacaaguacaaguacuucuccggcgccauggacaccacgagcuaccgggaggcggccugcugccaccuggccaaggcccugaacgacuucuccaacagcggcuccgacgugcucuaccagccgccccagaccagcaucaccuccgcgguccugcaguga

SEQ ID NO: 18428 - RNA, 1506 nt, Artificial Sequence
  SARS-CoV-2__MT459878.1__non-structural protein 4 (NSP4) CDS gc
augaagaucgugaacaacuggcugaagcagcucaucaaggucacccugguguuccuguucguggccgccaucuucuaccucaucacccccguccacgugaugagcaagcacacggacuucuccagcgagaucaucggcuacaaggcgaucgacgggggcgugacccgcgacaucgccuccaccgacacgugcuucgccaacaagcacgccgacuucgacaccugguucagccagcggggcggcuccuacaccaacgacaaggccugcccccugaucgcggccgucaucacccgcgaggugggguucgugguccccggccugcccggcaccauccuccggacgaccaacggggacuuccugcacuuccugccccgcguguucagcgccgugggcaacaucugcuacaccccguccaagcucaucgaguacaccgacuucgccacgagcgcgugcguccuggccgccgagugcaccaucuucaaggacguguccgggaagcccgugcccuacugcuacgacaccaacguccuggagggcagcguggccuacgagucccuccggcccgacacccgcuacgugcugauggacgggagcaucauccaguucccgaacacguaccuggagggcuccguccggguggugaccaccuucgacagcgaguacugccgccacgggaccugcgagcgguccgaggccggggucugcgugagcacguccggccgcugggugcucaacaacgacuacuaccggagccugcccggggucuucugcggcguggacgcggucaaccugcucaccaacauguucacgccccugauccagcccaucggcgcccuggacaucuccgccagcaucguggccgggggcaucguggccaucgucgugaccugccucgcguacuacuucaugcgcuuccggcgcgccuucggggaguacagccacguggucgccuucaacacccugcuguuccucauguccuucaccgugcugugccugaccccgguguacagcuuccuccccggcgucuacuccgugaucuaccuguaccugaccuucuaccucacgaacgacgugagcuuccuggcccacauccaguggauggucauguucacgccccuggugcccuucuggaucaccaucgccuacaucaucugcaucuccaccaagcacuucuacugguucuucagcaacuaccucaagcggcgcguggucuucaacgggguguccuucagcaccuucgaggaggcggcccugugcaccuuccugcucaacaaggagauguaccugaagcugcgguccgacgugcuccugccgcugacccaguacaaccgcuaccucgcccuguacaacaaguacaaguacuucagcggcgccauggacaccacguccuaccgggaggccgcgugcugccaccuggccaaggcccucaacgacuucagcaacuccggcagcgacguccuguaccagccgccccagaccuccaucaccagcgccgugcugcaguga

SEQ ID NO: 18429 - RNA, 1506 nt, Artificial Sequence
  SARS-CoV-2__MT459985.1__non-structural protein 4 (NSP4) CDS gc
augaagaucgugaacaacuggcugaagcagcucaucaaggucacccugguguuccuguucguggccgccaucuucuaccucaucacccccguccacgugaugagcaagcacacggacuucuccagcgagaucaucggcuacaaggcgaucgacgggggcgugacccgcgacaucgccuccaccgacacgugcuucgccaacaagcacgccgacuucgacaccugguucagccagcggggcggcuccuacaccaacgacaaggccugcccccugaucgcggccgucaucacccgcgagguggggcuggugguccccggccuccccggcaccauccugcggacgaccaacggggacuuccugcacuuccucccccgcguguucagcgccgugggcaacaucugcuacaccccguccaagcugaucgaguacaccgacuucgccacgagcgcgugcguccuggccgccgagugcaccaucuucaaggacgccuccgggaagcccgugcccuacugcuacgacaccaacgugcucgagggcagcgucgccuacgagucccugcggcccgacacccgcuacgugcugauggacgggagcaucauccaguucccgaacacguaccucgagggcuccgugcgggucgugaccaccuucgacagcgaguacugccgccacgggaccugcgagcgguccgaggcgggggugugcgucagcacguccggccgcugggugcugaacaacgacuacuaccggagccugcccgggguguucugcggcgucgacgccgugaaccuccugaccaacauguucacgccccugauccagcccaucggcgcccucgacaucuccgccagcaucgucgccgggggcaucguggcgaucguggugaccugccuggccuacuacuucaugcgcuuccggcgcgccuucggggaguacagccacgucguggccuucaacacccuccuguuccugauguccuucaccguccugugccucaccccgguguacagcuuccugcccggcguguacuccgucaucuaccuguaccucaccuucuaccugacgaacgacgugagcuuccuggcccacauccaguggauggugauguucacgccccucguccccuucuggaucaccaucgcguacaucaucugcaucuccaccaagcacuucuacugguucuucagcaacuaccugaagcggcgcgugguguucaacggggucuccuucagcaccuucgaggaggccgcccugugcaccuuccuccugaacaaggagauguaccugaagcuccgguccgacgugcugcugccgcucacccaguacaaccgcuaccuggcccuguacaacaaguacaaguacuucagcggcgccauggacaccacguccuaccgggaggcggccugcugccaccucgccaaggcccugaacgacuucagcaacuccggcagcgacgugcuguaccagccgccccagaccuccaucaccagcgcgguccugcaguga

SEQ ID NO: 18430 - RNA, 1506 nt, Artificial Sequence
  SARS-CoV-2__MT451244.1__non-structural protein 4 (NSP4) CDS gc
augaagaucgugaacaacuggcugaagcagcucaucaaggucacccugguguuccuguucguggccgccaucuucuaccucaucacccccguccacgugaugagcaaguacacggacuucuccagcgagaucaucggcuacaaggcgaucgacgggggcgugacccgcgacaucgccuccaccgacacgugcuucgccaacaagcacgccgacuucgacaccugguucagccagcggggcggcuccuacaccaacgacaaggccugcccccugaucgcggccgucaucacccgcgaggugggguucgugguccccggccugcccggcaccauccuccggacgaccaacggggacuuccugcacuuccugccccgcguguucagcgccgugggcaacaucugcuacaccccguccaagcucaucgaguacaccgacuucgccacgagcgcgugcguccuggccgccgagugcaccaucuucaaggacgccuccgggaagcccgugcccuacugcuacgacaccaacgugcuggagggcagcgucgccuacgagucccuccggcccgacacccgcuacgugcugauggacgggagcaucauccaguucccgaacacguaccuggagggcuccgugcgggucgugaccaccuucgacagcgaguacugccgccacgggaccugcgagcgguccgaggcgggggugugcgucagcacguccggccgcugggugcucaacaacgacuacuaccggagccugcccgggguguucugcggcgucgacgccgugaaccugcucaccaacauguucacgccccugauccagcccaucggcgcccuggacaucuccgccagcaucgucgccgggggcaucguggcgaucguggugaccugccucgccuacuacuucaugcgcuuccggcgcgccuucggggaguacagccacgucguggccuucaacacccugcuguuccucauguccuucaccguccugugccugaccccgguguacagcuuccuccccggcguguacuccgucaucuaccuguaccugaccuucuaccucacgaacgacgugagcuuccuggcccacauccaguggauggugauguucacgccccugguccccuucuggaucaccaucgcguacaucaucugcaucuccaccaagcacuucuacugguucuucagcaacuaccucaagcggcgcgugguguucaacggggucuccuucagcaccuucgaggaggccgcccugugcaccuuccugcucaacaaggagauguaccugaagcugcgguccgacgugcuccugccgcugacccaguacaaccgcuaccucgcccuguacaacaaguacaaguacuucagcggcgccauggacaccacguccuaccgggaggcggccugcugccaccuggccaaggcccucaacgacuucagcaacuccggcagcgacgugcuguaccagccgccccagaccuccaucaccagcgcgguccugcaguga

SEQ ID NO: 18431 - RNA, 1506 nt, Artificial Sequence
  SARS-CoV-2__MT451712.1__non-structural protein 4 (NSP4) CDS gc
augaagaucgugaacaacuggcugaagcagcucaucaaggucacccugguguuccuguucguggccgccaucuucuaccucaucacccccguccacgugaugagcaagcacacggacuucuccagcgagaucaucggcuacaaggcgaucgacgggggcgugacccgcgacaucgccuccaccgacacgugcuucgccaacaagcacgccgacuucgacaccugguucagccagcggggcggcuccuacaccaacgacaaggccugcccccugaucgcggccgucaucacccgcgaggugagcuucgugguccccgggcugcccggcaccauccuccggacgaccaacggcgacuuccugcacuuccugccccgcguguucuccgccguggggaacaucugcuacaccccgagcaagcucaucgaguacaccgacuucgccacguccgcgugcguccuggccgccgagugcaccaucuucaaggacgccagcggcaagcccgugcccuacugcuacgacaccaacgugcuggagggguccgucgccuacgagagccuccggcccgacacccgcuacgugcugauggacggcuccaucauccaguucccgaacacguaccuggaggggagcgugcgggucgugaccaccuucgacuccgaguacugccgccacgggaccugcgagcggagcgaggcgggcgugugcgucuccacgagcgggcgcugggugcucaacaacgacuacuaccggucccugcccggcguguucugcggggucgacgccgugaaccugcucaccaacauguucacgccccugauccagcccaucggcgcccuggacaucagcgccagcaucgucgccggcgggaucguggcgaucguggugaccugccucgccuacuacuucaugcgcuuccggcgcgccuucggcgaguacucccacgucguggccuucaacacccugcuguuccucaugagcuucaccguccugugccugaccccgguguacuccuuccuccccgggguguacagcgucaucuaccuguaccugaccuucuaccucacgaacgacguguccuuccuggcccacauccaguggauggugauguucacgccccugguccccuucuggaucaccaucgcguacaucaucugcaucagcaccaagcacuucuacugguucuucuccaacuaccucaagcggcgcgugguguucaacggcgucagcuucuccaccuucgaggaggccgcccugugcaccuuccugcucaacaaggagauguaccugaagcugcggagcgacgugcuccugccgcugacccaguacaaccgcuaccucgcccuguacaacaaguacaaguacuucuccggggccauggacaccacgagcuaccgggaggcggccugcugccaccuggccaaggcccucaacgacuucuccaacagcggcuccgacgugcuguaccagccgccccagaccagcaucaccuccgcgguccugcaguga

SEQ ID NO: 18432 - RNA, 1506 nt, Artificial Sequence
  SARS-CoV-2__MT451755.1__non-structural protein 4 (NSP4) CDS gc
augaagaucgugaacaacuggcugaagcagcucaucaaggucacccugguguuccuguucguggccgccaucuucuaccucaucacccccguccacgugaugagcaagcacacggacuucuccagcgagaucaucggcuacaaggcgaucgacgggggcgugacccgcgacaucgccuccaccgacacgugcuucgccaacaagcacgccgacuucgacaccugguucagccagcggggcggcuccuacaccaacgacaaggccugcccccugaucgcggccgucaucacccgcgaggugggguucgugguccccggccugcccggcaccauccuccggacgaccaacggggacuuccugcacuuccugccccgcguguucagcgccgugggcaacaucugcuacaccccguccaagcucaucgaguacaccgacuucgccacgagcgcgugcguccuggccgccgagugcaccaucuucaaggacgccuccgggaagcccgugcccuacugcuacgacaccaacgugcuggagggcagcgucgccuacgagucccuccggcccgacacccgcuacgugcugauggacgggagcaucauccaguucccgaacacguaccuggagggcuccgugcgggucgugaccaccuucgacagcgaguacugccgccacgggaccugcgagcgguccgaggcgggggugugcgucagcacguccggccgcugggugcucaacaacgacuacuaccggagccugcccgggguguucugcggcgucgacgccgugaaccugcucaccaacauguucacgccccugauccagcccaucggcgcccuggacaucuccgccagcaucgucgccgggggcaucguggcgaucguggugaccugccucgccuacuacuucaugcgcuuccggcgcgccuucggggaguacagccacgucguggccuucaacacccugcuguuccucauguccuucaccguccugugccugaccccgguguacagcuuccuccccggcguguacuccgucaucuaccuguaccugaccuucuaccucacgaacgacgugagcuuccuggcccacauccaguggauggugauguucacgccccugguccccuucuggaucaccaucgcguacaucaucugcguguccaccaagcacuucuacugguucuucagcaacuaccucaagcggcgcguggucuucaacgggguguccuucagcaccuucgaggaggccgcccugugcaccuuccugcucaacaaggagauguaccugaagcugcgguccgacgugcuccugccgcugacccaguacaaccgcuaccucgcccuguacaacaaguacaaguacuucagcggcgccauggacaccacguccuaccgggaggcggccugcugccaccuggccaaggcccucaacgacuucagcaacuccggcagcgacguccuguaccagccgccccagaccuccaucaccagcgcggugcugcaguga

SEQ ID NO: 18433 - RNA, 1506 nt, Artificial Sequence
  SARS-CoV-2__MT276600.1__non-structural protein 4 (NSP4) CDS gc
augaagaucgugaacaacuggcugaagcagcucaucaaggucacccugguguuccuguucguggccgccaucuucuaccucaucacccccguccacgugaugagcaagcacacggacuucuccagcgagaucaucggcuacaaggcgaucgacgggggcgugacccgcgacaucgccuccaccgacacgugcuucgccaacaagcacgccgacuucgacaccugguucagccagcggggcggcuccuacaccaacgacaaggccugcccccugaucgcggccgucaucacccgcgaggugggguucgugguccccggccugcccggcaccauccuccggacgaccaacggggacuuccugcacuuccugccccgcguguucagcgccgugggcaacaucugcuacaccccguccaagcucaucgaguacaccgacuucgccacgagcgcgugcguccuggccgccgagugcaccaucuucaaggacgccuccgggaagcccgugcccuacugcuacgacaccaacgugcuggagggcagcgucgccuacgagucccuccggcccgacacccgcuacgugcugauggacgggagcaucauccaguucccgaacacguaccuggagggcuccgugcgggucgugaccaccuucgacagcgaguacugccgccacgggaccugcgagcgguccgaggcgggggugugcgucagcacguccggccgcugggugcucaacaacgacuacuaccggagccugcccgggguguucugcggcgucgacgccgugaaccugcucaccaacauguucacgccccugauccagcccaucggcgcccuggacaucuccgccagcaucgucgccgggggcaucguggcgaucguggugaccugccucgccuacuacuucaugcgcuuccggcgcgccuucggggaguacagccacgucguggccuucaacacccugcuguuccucauguccuucaccguccugugccugaccccgguguacagcuuccuccccggcguguacuccgucaucuaccuguaccugaccuucuaccucacgaacgacgugagcuuccuggcccacauccaguggauggugauguucacgccccugguccccuucuggaucaccaucgcguacaucaucugcaucuccaccaagcacuucuacugguucuucagcaacuaccucaagcggcgcgugguguucaacggggucuccuucagcaccuucgaggaggccgcccugugcaccuuccugcucaacaaggagauguaccugaagcugcgguccgacgugcuccugccgcugacccaguacaaccgcuaccucgcccuguacaacaaguacaaguacuucagcggcgccauggacaccacguccuaccgggaggcggccugcugcuaccuggccaaggcccucaacgacuucagcaacuccggcagcgacgugcuguaccagccgccccagaccuccaucaccagcgcgguccugcaguga

SEQ ID NO: 18434 - RNA, 1506 nt, Artificial Sequence
  SARS-CoV-2__MT412337.1__non-structural protein 4 (NSP4) CDS gc
augaagaucgugaacaacuggcugaagcagcucaucaaggucacccugguguuccuguucguggccgccaucuucuaccucaucacccccguccacgugaugagcaagcacacggacuucuccagcgagaucaucggcuacaaggcgaucgacgggggcgugacccgcgacaucgccuccaccgacacgugcuucgccaacaagcacgccgacuucgacaccugguucagccagcggggcggcuccuacaccaacgacaaggccugcccccugaucgcggccgucaucacccgcgaggugggguucgugguccccggccugcccggcaccauccuccggacgaccaacggggacuuccugcacuuccugccccgcguguucagcgccgugggcaacaucugcuacaccccguccaagcucaucgaguacaccgacuucgccacgagcgcgugcguccuggccgccgagugcaccaucuucaaggacgccuccgggaagcccgugcccuacugcuacgacaccaacgugcuggagggcagcgucgccuacgagucccuccggcccgacacccgcuacgugcugauggacgggagcaucauccaguucccgaacacguaccuggagggcuccgugcgggucgugaccaccuucgacagcgaguacugccgccacgggaccugcgagcgguccgaggcgggggugugcgucagcacguccggccgcugggugcucaacaacgacuacuaccggagccugcccgggguguucugcggcgucgacgccgugaaccugcucaccaacauguucaucccccugauccagcccaucggcgcccuggacaucuccgccagcaucgucgccgggggcaucguggcgaucguggugaccugccucgccuacuacuucaugcgcuuccggcgcgccuucggggaguacagccacgucguggccuucaacacccugcuguuccucauguccuucacgguccugugccugaccccgguguacagcuuccuccccggcguguacuccgucaucuaccuguaccugaccuucuaccucaccaacgacgugagcuuccuggcccacauccaguggauggugauguucacgccccugguccccuucuggaucaccaucgcguacaucaucugcaucuccaccaagcacuucuacugguucuucagcaacuaccucaagcggcgcgugguguucaacggggucuccuucagcaccuucgaggaggccgcccugugcacguuccugcucaacaaggagauguaccugaagcugcgguccgacgugcuccugccgcugacccaguacaaccgcuaccucgcccuguacaacaaguacaaguacuucagcggcgccauggacaccaccuccuaccgggaggcggccugcugccaccuggccaaggcccucaacgacuucagcaacuccggcagcgacgugcuguaccagccgccccagacguccaucaccagcgcgguccugcaguga

SEQ ID NO: 18435 - RNA, 1506 nt, Artificial Sequence
  SARS-CoV-2__MT385450.1__non-structural protein 4 (NSP4) CDS gc
augaagaucgugaacaacuggcugaagcagcucaucaaggucacccugguguuccuguucguggccgccaucuucuaccucaucacccccguccacgugaugagcaagcacacggacuucuccagcgagaucaucggcuacaaggcgaucgacgggggcgugacccgcgacaucgccuccaccgacacgugcuucgccaacaagcacgccgacuucgacaccugguucagccagcggggcggcuccuacaccaacgacaaggccugcccccugaucgcggccgucaucacccgcgaggugggguucgugguccccggccugcccggcaccauccuccggacgaccaacggggacuuccugcacuuccugccccgcguguucagcgccgugggcaacaucugcuacaccccguccaagcucaucgaguacaccgacuucgccacgagcgcgugcguccuggccgccgagugcaccaucuucaaggacgccuccgggaaccccgugcccuacugcuacgacaccaacgugcuggagggcagcgucgccuacgagucccuccggcccgacacccgcuacgugcugauggacgggagcaucauccaguucccgaacacguaccuggagggcuccgugcgggucgugaccaccuucgacagcgaguacugccgccacgggaccugcgagcgguccgaggcgggggugugcgucagcacguccggccgcugggugcucaacaacgacuacuaccggagccugcccgggguguucugcggcgucgacgccgugaaccugcucaccaacauguucacgccccugauccagcccaucggcgcccuggacaucuccgccagcaucgucgccgggggcaucguggcgaucguggugaccugccucgccuacuacuucaugcgcuuccggcgcgccuucggggaguacagccacgucguggccuucaacacccugcuguuccucauguccuucaccguccugugccugaccccgguguacagcuuccuccccggcguguacuccgucaucuaccuguaccugaccuucuaccucacgaacgacgugagcuuccuggcccacauccaguggauggugauguucacgccccugguccccuucuggaucaccaucgcguacaucaucugcaucuccaccaagcacuucuacugguucuucagcaacuaccucaagcggcgcgugguguucaacggggucuccuucagcaccuucgaggaggccgcccugugcaccuuccugcucaacaaggagauguaccugaagcugcgguccgacgugcuccugccgcugacccaguacaaccgcuaccucgcccuguacaacaaguacaaguacuucagcggcgccauggacaccacguccuaccgggaggcggccugcugccaccuggccaaggcccucaacgacuucagcaacuccggcagcgacgugcuguaccagccgccccagaccuccaucaccagcgcgguccugcaguga

SEQ ID NO: 18436 - RNA, 1506 nt, Artificial Sequence
  SARS-CoV-2__MT252823.1__non-structural protein 4 (NSP4) CDS gc
augaagaucgugaacaacuggcugaagcagcucaucaaggucacccugguguuccuguucguggccgccaucuucuaccucaucacccccguccacgugaugagcaagcacacggacuucuccagcgagaucaucggcuacaaggcgaucgacgggggcgugacccgcgacaucgccuccaccgacacgugcuucgccaacaagcacgccgacuucgacaccugguucagccagcggggcggcuccuacaccaacgacaaggccugcccccugaucgcggccgucaucacccgcgaggugggguucgugguccccggccugcccggcaccauccuccggacgaccaacggggacuuccugcacuuccugccccgcguguucagcgccgugggcaacaucugcuacaccccguccaagcucaucgaguacaccgacuucgccacgagcgcgugcguccuggccgccgagugcaccaucuucaaggacgccuccgggaagcccgugcccuacugcuacgacaccaacgugcuggagggcagcgucgccuacgagucccuccggcccgacacccgcuacgugcugauggacgggagcaucauccaguucccgaacacguaccuggagggcuccgugcgggucgugaccaccuucgacagcgaguacugccgccacgggaccugcgagcgguccgaggcgggggugugcgucagcacguccggccgcugggugcucaacaacgacuacuaccggagccugcccgggguguucugcggcgucgacgccgugaaccugcucaccaacauguucacgccccugauccagcccaucggcgcccuggacaucuccgccagcaucgucgccgggggcaucguggcgaucguggugaccugccucgccuacuacuucaugcgcuuccggcgcgccuucggggaguacagccacgucguggccuucaacacccugcuguuccucauguccuucaccguccugugccugaccccgguguacagcuuccuccccggcguguacuccgucaucuaccuguaccugaccuucuaccucacgaacgacgugagcuuccuggcccacauccaguggauggugauguucacgccccugguccccuucuggaucaccaucgcguacaucauccucaucuccaccaagcacuucuacugguucuucagcaacuaccugaagcggcgcgugguguucaacggggucuccuucagcaccuucgaggaggccgcccugugcaccuuccuccugaacaaggagauguaccugaagcuccgguccgacgugcugcugccgcucacccaguacaaccgcuaccuggcccuguacaacaaguacaaguacuucagcggcgccauggacaccacguccuaccgggaggcggccugcugccaccucgccaaggcccugaacgacuucagcaacuccggcagcgacgugcuguaccagccgccccagaccuccaucaccagcgcgguccugcaguga

SEQ ID NO: 18437 - RNA, 1506 nt, Artificial Sequence
  SARS-CoV-2__MT358730.1__non-structural protein 4 (NSP4) CDS gc
augaagaucgugaacaacuggcugaagcagcucaucaaggucacccugguguuccuguucguggccgccaucuucuaccucaucacccccguccacgugaugagcaagcacacggacuucuccagcgagaucaucggcuacaaggcgaucgacgggggcgugacccgcgacaucgccuccaccgacacgugcuucgccaacaagcacgccgacuucgacaccugguucagccagcgcgggggcuccuacaccaacgacaaggccugcccccugaucgcggccgucaucacccgggaggugggguucgugguccccggccugcccggcaccacgaagcggaccaccaacggggacuuccuccacuuccugccccgcguguucagcgccgugggcaacaucugcuacaccccguccaagcugaucgaguacacggacuucgccaccagcgcgugcguccucgccgccgagugcaccaucuucaaggacgccuccgggaagcccgugcccuacugcuacgacaccaacgugcuggagggcagcgucgccuacgagucccugcggcccgacacgcgcuacgugcucauggacgggagcaucauccaguucccgaacaccuaccuggagggcuccgugcgggucgugaccaccuucgacagcgaguacugccgccacggcacgugcgagcgguccgaggcgggggugugcgucagcaccuccggccgcugggugcugaacaacgacuacuaccggagccuccccgggguguucugcggcgucgacgccgugaaccugcugaccaacauguucaccccgcucauccagcccaucggcgcccuggacaucuccgccagcaucgucgccgggggcaucguggcgaucguggucacgugccuggccuacuacuucaugcgcuuccggcgcgccuucggggaguacagccacgugguggccuucaacacccuccuguuccugauguccuucaccguccucugccugacccccguguacagcuuccugcccggcguguacuccgucaucuaccucuaccugacguucuaccugaccaacgacgugagcuuccucgcccacauccaguggauggugauguucacgccccugguccccuucuggaucaccaucgcguacaucaucugcaucuccaccaagcacuucuacugguucuucagcaacuaccugaagcggcgcgugguguucaacggggucuccuucagcaccuucgaggaggccgcccucugcaccuuccugcugaacaaggagauguaccucaagcugcgguccgacgugcugcucccgcugacccaguacaaccgcuaccuggcccucuacaacaaguacaaguacuucagcggcgccauggacacgaccuccuaccgggaggcggccugcugccaccuggccaaggcccugaacgacuucagcaacuccggcagcgacgugcucuaccagccgccccagaccuccaucaccagcgcgguccugcaguga

SEQ ID NO: 18438 - RNA, 1506 nt, Artificial Sequence
  SARS-CoV-2__MT345830.1__non-structural protein 4 (NSP4) CDS gc
augaagaucgugaacaacuggcugaagcagcucaucaaggucacccugguguuccuguucguggccgccaucuucuaccucaucacccccguccacgugaugagcaagcacacggacuucuccagcgagaucaucggcuacaaggcgaucgacgggggcgugacccgcgacaucgccuccaccgacacgugcuucgccaacaagcacgccgacuucgacaccugguucagccagcggggcggcuccuacaccaacgacaaggccugcccccugaucgcggccgucaucacccgcgaggugggguucgugguccccggccugcccggcaccauccuccggacgaccaacggggacuuccugcacuuccugccccgcguguucagcgccgugggcaacaucugcuacaccccguccaagcucaucgaguacaccgacuucgccacgagcgcgugcguccuggccgccgagugcaccaucuucaaggacgccuccgggaagcccgugcccuacugcuacgacaccaacgugcuggagggcagcgucgccuacgagucccuccggcccgacacccgcuacgugcugauggacgggagcaucauccaguucccgaacacguaccuggagggcuccgugcgggucgugaccaccuucgacagcgaguacugccgccacgggaccugcgagcgguccgaggcgggggugugcgucagcacguccggccgcugggugcucaacaacgacuacuaccggagccugcccgggguguucugcggcgucgacgccgugaaccugcucaccaacauguucacgccccugauccagcccaucggcgcccuggacaucuccgccagcaucgucgccgggggcaucguggcgaucguggugaccugccucgccuacuacuucaugcgcuuccggcgcgccuucggggaguacagccacgucguggccuucaacacccugcuguuccucauguccuucaccguccugugccugaccccgguguacagcuuccuccccggcguguacuccgucaucuaccuguaccugaccuucuaccucacgaacgacgugagcuuccuggcccacauccaguggauggugauguucacgccccugguccccuucuggaucaccaucgcguacaucaucugcaucuccaccaagcacuucuacugguucuucagcaacuaccucaagcggcgcgugguguucaacggggucuccuucagcaccuucgaggaggccgcccugugcaccuuccugcucaacaaggagauguaccugaagcugcgguccgacgugcuccugccgcugacccaguacaaccgcuaccucgcccuguacaacaaguacaaguacuucagcggcgccauggacaccacguccuaccgggagguggcgugcugccaccuggccaaggcccucaacgacuucagcaacuccggcagcgacguccuguaccagccgccccagaccuccaucaccagcgccgugcugcaguga

SEQ ID NO: 18439 - RNA, 1506 nt, Artificial Sequence
  SARS-CoV-2__MT345869.1__non-structural protein 4 (NSP4) CDS gc
augaagaucgugaacaacuggcugaagcagcucaucaaggucacccugguguuccuguucguggccgccaucuucuaccucaucacccccguccacgugaugagcaagcacacggacuucuccagcgagaucaucggcuacaaggcgaucgacgggggcgugacccgcgacaucgccuccaccgacacgugcuucgccaacaagcacgccgacuucgacaccugguucagccagcggggcggcuccuacaccaacgacaaggccugcccccugaucgcggccgucaucacccgcgaggugggguucgugguccccggccugcccggcaccauccuccggacgaccaacggggacuuccugcacuuccugccccgcguguucagcgccgugggcaacaucugcuacaccccguccaagcucaucgaguacaccgacuucgccacgagcgcgugcguccuggccgccgagugcaccaucuucaaggacgccuccgggaagcccgugcccuacugcuacgacaccaacgugcuggagggcagcgucgccuacgagucccuccggcccgacacccgcuacgugcugauggacgggagcaucauccaguucccgaacacguaccuggagggcuccgugcgggucgugaccaccuucgacagcgaguacugccgccacgggaccugcgagcgguccgaggcgggggugugcgucagcacguccggccgcugggugcucaacaacgacuacuaccggagccugcccgggguguucugcggcgucgacgccgugaaccugcucaccaacauguucacgccccugauccagcccaucggcgcccuggacaucuccgccagcaucgucgccgggggcaucguggcgaucguggugaccugccucgccuacuacuucaugcgcuuccggcgcgccuucggggaguacagccacgucguggccuucaacacccugcuguuccucauguccuucaccguccugugccugaccccgguguacagcuuccuccccggcguguacuccgucaucuaccuguaccugaccuucuaccucacgaacgacgugagcuuccuggcccacauccaguggauggugauguucacgccccugguccccuucuggaucaccaucgcguacaucaucugcaucuccaccaagcacuucuacugguucuucagcaacuaccucaagcggcgcgugguguucaacggggucuccuucagcaccuucgaggaggccgcccugugcaccuuccugcucaacaaggagauguaccugaagcugcgguccgacgugcuccugccgcugacccaguacaaccgcuaccucgcccuguacaacaaguacaaguacuucagcggcgccauggacaccacguccuaccgggaggcggccugcugccaccuggccaaggcccucaacgacuucagcaacgcgggcuccgacgugcuguaccagccgccccagaccagcaucaccuccgccguccugcaguga

SEQ ID NO: 18440 - RNA, 1506 nt, Artificial Sequence
  SARS-CoV-2__MT326052.1__non-structural protein 4 (NSP4) CDS gc
augaagaucgugaacaacuggcugaagcagcucaucaaggucacccugguguuccuguucguggccgccaucuucuaccucaucacccccguccacgugaugagcaagcacacggacuucuccagcgagaucaucggcuacaaggcgaucgacgggggcgugacccgcgacaucgccuccaccgacacgugcuucgccaacaagcacgccgacuucgacaccugguucagccagcggggcggcuccuacaccaacgacaaggccugcccccugaucgcggccgucaucacccgcgaggugggguucgugguccccggccugcccggcaccauccuccggacgaccaacggggacuuccugcacuuccugccccgcguguucagcgccgugggcaacaucugcuacaccccguccaagcucaucgaguacaccgacuucgccacgagcgcgugcguccuggccgccgagugcaccaucuucaaggacgccuccgggaagcccgugcccuacugcuacgacaccaacgugcuggagggcagcgucgccuacgagucccuccggcccgacacccgcuacgugcugauggacgggagcaucauccaguucccgaacacguaccuggagggcuccgugcgggucgugaccaccuucgacagcgaguacugccgccacgggaccugcgagcgguccgaggcgggggugugcgucagcacguccggccgcugggugcucaacaacgacuacuaccggagccugcccgggguguucugcggcgucgacgccgugaaccugcucaccaacauguucacgccccugauccagcccaucggcgcccuggacaucuccgccagcaucgucgccgggggcaucguggcgaucguggugaccugccucgccuacuacuucaugcgcuuccggcgcgccuucggggaguacagccacgucguggccuucaacacccugcuguuccucauguccuucaccguccugugccugaccccgguguacagcuuccuccccggcguguacuccgucaucuaccuguaccugaccuucuaccucacgaacgacgugagcuuccuggcccacauccaguggauggugauguucacgccccugguccccuucuggaucaccaucgcguacaucaucugcaucuccaccaagcacuucuacugguucuucagcaacuaccucaagcggcgcgugguguucaacggggucuccuucagcaccuucgaggaggccgcccugugcaccuuccugcucaacaaggagauguaccugaagcugcgguccgacgugcuccugccgcugacccaguacaaccgcuaccucgcccuguacaacaaguacaaguacuucagcggcgccauggacaccacguccuaccgggaggcggccugcugccaccuggccaaggcccucaacgacuucagcaacuccggcuucgacgugcuguaccagccgccccagaccagcaucaccuccgcgguccugcaguga

SEQ ID NO: 18441 - RNA, 1506 nt, Artificial Sequence
  SARS-CoV-2__MT293186.1__non-structural protein 4 (NSP4) CDS gc
augaagaucgugaacaacuggcugaagcagcucaucaaggucacccugguguuccuguucguggccgccaucuucuaccucaucacccccguccacgugaugagcaagcacacggacuucuccagcgagaucaucggcuacaaggcgaucgacgggggcgugacccgcgacaucgccuccaccgacacgugcuucgccaacaagcacgccgacuucgacaccugguucagccagcggggcggcuccuacaccaacgacaaggccugcccccugaucgcggccgucaucacccgcgaggugggguucgugguccccggccugcccggcaccauccuccggacgaccaacggggacuuccugcacuuccugccccgcguguucagcgccgugggcaacaucugcuacaccccguccaagcucaucgaguacaccgacuucgccacgagcgcgugcguccuggccgccgagugcaccaucuucaaggacgccuccgggaagcccgugcccuacugcuacgacaccaacgugcuggagggcagcgucgccuacgagucccuccggcccgacacccgcuacgugcugauggacgggagcaucauccaguucccgaacacguaccuggagggcuccgugcgggucgugaccaccuucgacagcgaguacugccgccacgggaccugcgagcgguccgaggcgggggugugcgucagcacguccggccgcugggugcucaacaacgacuacuaccggagccugcccgggguguucugcggcgucgacgccgugaaccugcucaccaacauguucacgccccugauccagcccaucggcgcccuggacaucuccgccagcaucgucgccgggggcaucguggcgaucguggugaccugccucgccuacuacuucaugcgcuuccggcgcgccuucggggaguacagccacgucguggccuucaacacccugcuguuccucauguccuucaccguccugugccugaccccgguguacagcuuccuccccggcguguacuccgucaucuaccuguaccugaccuucuaccucacgaacgacgugagcuucuucgcccacauccaguggauggugauguucacgccccugguccccuucuggaucaccaucgcguacaucaucugcaucuccaccaagcacuucuacugguucuucagcaacuaccugaagcggcgcgugguguucaacggggucuccuucagcaccuucgaggaggccgcccucugcaccuuccugcugaacaaggagauguaccucaagcugcgguccgacgugcugcucccgcugacccaguacaaccgcuaccuggcccucuacaacaaguacaaguacuucagcggcgccauggacaccacguccuaccgggaggcggccugcugccaccuggccaaggcccugaacgacuucagcaacuccggcagcgacgugcucuaccagccgccccagaccuccaucaccagcgcgguccugcaguga

SEQ ID NO: 18442 - RNA, 1506 nt, Artificial Sequence
  SARS-CoV-2__MT262993.1__non-structural protein 4 (NSP4) CDS gc
augaagaucgugaacaacuggcugaagcagcucaucaaggucacccugguguuccuguucguggccgccaucuucuaccucaucacccccguccacgugaugagcaagcacacggacuucuccagcgagaucaucggcuacaaggcgaucgacgggggcgugacccgcgacaucgccuccaccgacacgugcuucgccaacaagcacgccgacuucgacaccugguucagccagcggggcggcuccuacaccaacgacaaggccugcccccugaucgcggccgucaucacccgcgaggugggguucgugguccccggccugcccggcaccauccuccggacgaccaacggggacuuccugcacuuccugccccgcguguucagcgccgugggcaacaucugcuacaccccguccaagcucaucgaguacaccgacuucgccacgagcgcgugcguccuggccgccgagugcaccaucuucaaggacgccuccgggaagcccgugcccuacugcuacgacaccaacgugcuggagggcagcgucgccuacgagucccuccggcccgacacccgcuacgugcugauggacgggagcaucauccaguucccgaacacguaccuggagggcuccgugcgggucgugaccaccuucgacagcgaguacugccgccacgggaccugcgagcgguccgaggcgggggugugcgucagcacguccggccgcugggugcucaacaacgacuacuaccggagccugcccgggguguucugcggcgucgacgccgugaaccugcucaccaacauguucacgccccugauccagcccaucggcgcccuggacaucuccgccagcaucgucgccgggggcaucguggcgaucguggugaccugccucgccuacuacuucaugcgcuuccggcgcgccuucggggaguacagccacgucguggccuucaacacccugcuguuccucauguccuucaccguccugugccugaccccgguguacagcuuccuccccggcguguacuccgucaucuaccuguaccugaccuucuaccucacgaacgacgugagcuuccuggcccacauccaguggauggugauguucacgccccugguccccuucuggaucaccaucgcguacaucaucugcaucuccaccaagcacagcaacuaccucaagcggcgcgugguguucaacggggucuccuucagcaccuucgaggaggccgcccugugcaccuuccugcucaacaaggagauguaccugaagcugcgguccgacgugcuccugccgcugacccaguacaaccgcuaccucgcccuguacaacaaguacaaguacuucagcggcgccauggacaccacguccuaccgggaggcggccugcugccaccuggccaaggcccucaacgacuucagcaacuccggcagcgacgugcuguaccagccgccccagaccuccaucaccagcgcgguccugcaguccggguuccgcaaguga

SEQ ID NO: 18443 - RNA, 1506 nt, Artificial Sequence
  SARS-CoV-2__MT263074.1__non-structural protein 4 (NSP4) CDS gc
augaagaucgugaacaacuggcugaagcagcucaucaaggucacccugguguuccuguucguggccgccaucuucuaccucaucacccccguccacgugaugagcaagcacacggacuucuccagcgagaucaucggcuacaaggcgaucgacgggggcgugacccgcgacaucgccuccaccgacacgugcuucgccaacaagcacgccgacuucgacaccugguucagccagcggggcggcuccuacaccaacgacaaggccugcccccugaucgcggccgucaucacccgcgaggugggguucgugguccccggccugcccggcaccauccuccggacgaccaacggggacuuccugcacuuccugccccgcguguucagcgccgugggcgacaucugcuacaccccguccaagcucaucgaguacaccgacuucgccacgagcgcgugcguccuggccgccgagugcaccaucuucaaggacgccuccgggaagcccgugcccuacugcuacgacaccaacgugcuggagggcagcgucgccuacgagucccuccggcccgacacccgcuacgugcugauggacgggagcaucauccaguucccgaacacguaccuggagggcuccgugcgggucgugaccaccuucgacagcgaguacugccgccacgggaccugcgagcgguccgaggcgggggugugcgucagcacguccggccgcugggugcucaacaacgacuacuaccggagccugcccgggguguucugcggcgucgacgccgugaaccugcucaccaacauguucacgccccugauccagcccaucggcgcccuggacaucuccgccagcaucgucgccgggggcaucguggcgaucguggugaccugccucgccuacuacuucaugcgcuuccggcgcgccuucggggaguacagccacgucguggccuucaacacccugcuguuccucauguccuucaccguccugugccugaccccgguguacagcuuccuccccggcguguacuccgucaucuaccuguaccugaccuucuaccucacgaacgacgugagcuuccuggcccacauccaguggauggugauguucacgccccugguccccuucuggaucaccaucgcguacaucaucugcaucuccaccaagcacuucuacugguucuucagcaacuaccucaagcggcgcgugguguucaacggggucuccuucagcaccuucgaggaggccgcccugugcaccuuccugcucaacaaggagauguaccugaagcugcgguccgacgugcuccugccgcugacccaguacaaccgcuaccucgcccuguacaacaaguacaaguacuucagcggcgccauggacaccacguccuaccgggaggcggccugcugccaccuggccaaggcccucaacgacuucagcaacuccggcagcgacgugcuguaccagccgccccagaccuccaucaccagcgcgguccugcaguga

SEQ ID NO: 18444 - RNA, 1506 nt, Artificial Sequence
  SARS-CoV-2__MT263411.1__non-structural protein 4 (NSP4) CDS gc
augaagaucgugaacaacuggcugaagcagcucaucaaggucacccugguguuccuguucguggccgccaucuucuaccucaucacccccguccacgugaugagcaagcacacggacuucuccagcgagaucaucggcuacaaggcgaucgacgggggcgugacccgcgacaucgccuccaccgacacgugcuucgccaacaagcacgccgacuucgacaccugguucagccagcggggcggcuccuacaccaacgacaaggccugcccccugaucgcggccgucaucacccgcgaggugggguucgugguccccggccugcccggcaccauccuccggacgaccaacggggacuuccugcacuuccugccccgcguguucagcgccgugggcaacaucugcuacaccccguccaagcucaucgaguacaccgacuucgccacgagcgcgugcguccuggccgccgagugcaccaucuucaaggacgccuccgggaagcccgugcccuacugcuacgacaccaacgugcuggagggcagcgucgccuacgagucccuccggcccgacacccgcuacgugcugauggacgggagcaucauccaguucccgaacacguaccuggagggcuccgugcgggucgugaccaccuucgacagcgaguacugccgccacgggaccugcgagcgguccgaggcgggggugugcgucagcacguccggccgcugggugcucaacaacgacuacuaccggagccugcccgggguguucugcggcgucgacgccgugaaccugcucaccaacauguucacgccccugauccagcccaucggcgcccuggacaucuccgccagcaucgucgccgggggcaucguggcgaucguggugaccugccucgccuacuacuucaugcgcuuccggcgcgccuucggggaguacagccacgucguggccuucaacacccugcuguuccucauguccuucaacguccugugccugaccccgguguacagcuuccuccccggcguguacuccgucaucuaccuguaccugaccuucuaccucaccaacgacgugagcuuccuggcccacauccaguggauggugauguucacgccccugguccccuucuggaucaccaucgcguacaucaucugcaucuccaccaagcacuucuacugguucuucagcaacuaccucaagcggcgcgugguguucaacggggucuccuucagcaccuucgaggaggccgcccugugcacguuccugcucaacaaggagauguaccugaagcugcgguccgacgugcuccugccgcugacccaguacaaccgcuaccucgcccuguacaacaaguacaaguacuucagcggcgccauggacaccaccuccuaccgggaggcggccugcugccaccuggccaaggcccucaacgacuucagcaacuccggcagcgacgugcuguaccagccgccccagacguccaucaccagcgcgguccugcaguga

SEQ ID NO: 18445 - RNA, 1506 nt, Artificial Sequence
  SARS-CoV-2__MT240479.1__non-structural protein 4 (NSP4) CDS gc
augaagaucgugaacaacuggcugaagcagcucaucaaggucacccugguguuccuguucguggccgccaucuucuaccucaucacccccguccacgugaugagcaagcacacggacuucuccagcgagaucaucggcuacaaggcgaucgacgggggcgugacccgcgacaucgccuccaccgacacgugcuucgccaacaagcacgccgacuucgacaccugguucagccagcggggcggcuccuacaccaacgacaaggccugcccgcugaucgcggccgucaucacccgcgaggugggguucgugguccccggccugcccggcaccauccuccggacgaccaacggggacuuccugcacuuccugccccgcguguucagcgccgugggcaacaucugcuacaccccguccaagcucaucgaguacaccgacuucgccacgagcgcgugcguccuggccgccgagugcaccaucuucaaggacgccuccgggaagcccgugcccuacugcuacgacaccaacgugcuggagggcagcgucgccuacgagucccuccggcccgacacccgcuacgugcugauggacgggagcaucauccaguuccugaacacguaccucgagggcuccgugcgggucgugaccaccuucgacagcgaguacugccgccacgggaccugcgagcgguccgaggcgggggugugcgucagcacguccggccgcugggugcugaacaacgacuacuaccggagccugccggggguguucugcggcgucgacgccgugaaccuccugaccaacauguucacgccccugauccagcccaucggcgcccucgacaucuccgccagcaucgucgccgggggcaucguggcgaucguggugaccugccuggccuacuacuucaugcgcuuccggcgcgccuucggggaguacagccacgucguggccuucaacacccuccuguuccugauguccuucaccguccugugccucacccccguguacagcuuccugccgggcguguacuccgucaucuaccuguaccucaccuucuaccugacgaacgacgugagcuuccuggcccacauccaguggauggugauguucacgccccucguccccuucuggaucaccaucgcguacaucaucugcaucuccaccaagcacuucuacugguucuucagcaacuaccugaagcggcgcgugguguucaacggggucuccuucagcaccuucgaggaggccgcccugugcaccuuccuccugaacaaggagauguaccugaagcuccgguccgacgugcugcugccccucacccaguacaaccgcuaccuggcccuguacaacaaguacaaguacuucagcggcgccauggacaccacguccuaccgggaggcggccugcugccaccucgccaaggcccugaacgacuucagcaacuccggcagcgacgugcuguaccagccgccccagaccuccaucaccagcgcgguccugcaguga

SEQ ID NO: 18446 - RNA, 882 nt, Artificial Sequence
  MERS-CoV/MERS-CoV-Jeddah-human-1__KF958702.1__non-structural protein 6 (NSP6) CDS gc
augagcggcgugcgcaaggucaccuacgggaccgcccacuggcuguucgccacccucguguccaccuacgugaucauccugcaggcgaccaaguucacccuguggaacuaccucuucgagacgauccccacccagcuguucccgcuccuguucgucaccauggccuucgugaugcugcuggugaagcacaagcacaccuuccucacgcuguuccugcuccccgucgccaucugccugaccuacgccaacaucguguacgagcccaccacccccaucagcuccgcccugaucgcgguggccaacuggcucgccccgacgaacgccuacaugcggaccacccacaccgacaucggcgucuacaucagcaugucccuggugcuggugaucgucgugaagcgccucuacaaccccagccuguccaacuucgcgcuggcccucugcagcggggugauguggcuguacacguacuccaucggcgaggccagcucccccaucgccuaccuggucuucgugaccacccucaccagcgacuacacgaucaccguguucgucaccgugaaccuggccaaggugugcaccuacgcgaucuucgccuacagcccccagcugacgcucgucuucccggaggugaagaugauccugcugcucuacacgugccugggguucaugugcacgugcuacuucggcguguucucccugcucaaccugaagcugcgggcccccaugggcgucuacgacuucaagguguccacccaggaguuccgcuucaugaccgccaacaaccucaccgcgccccggaacagcugggaggccauggcccugaacuucaagcugaucgggaucggcgggacccccugcaucaaggucgccgccaugcaguga

SEQ ID NO: 18447 - RNA, 882 nt, Artificial Sequence; identical to SEQ ID NO: 18446
  MERS-CoV/Al-Hasa_4_2013__KF186564.1__non-structural protein 6 (NSP6) CDS gc

SEQ ID NO: 18448 - RNA, 882 nt, Artificial Sequence; identical to SEQ ID NO: 18446
  MERS-CoV/Riyadh_14_2013__KJ156934.1__non-structural protein 6 (NSP6) CDS gc

SEQ ID NO: 18449 - RNA, 882 nt, Artificial Sequence; identical to SEQ ID NO: 18446
  MERS-CoV/England 1__NC_038294.1__non-structural protein 6 (NSP6) CDS gc

SEQ ID NO: 18450 - RNA, 876 nt, Artificial Sequence
  SARS-CoV/Tor2__NC_004718.3__non-structural protein 6 (NSP6) CDS gc
augggcaaguucaagaagaucgugaaggggacccaccacuggaugcugcucaccuuccugacgagccugcucauccugguccaguccacccaguggagccuguucuucuucguguacgagaacgccuuccuccccuucacccugggcaucauggccaucgcggccugcgccaugcugcucgugaagcacaagcacgccuuccugugccuguuccuccugccgucccuggccaccgucgcguacuucaacaugguguacaugcccgccagcugggugaugcgcaucaugacguggcucgagcuggccgacaccucccugagcggguaccggcucaaggacugcgucauguacgccuccgcgcuggugcugcucauccugaugaccgcccgcaccguguacgacgacgccgcccggcgcgucuggacgcugaugaacgugaucacccucguguacaaggucuacuacggcaacgcccuggaccaggcgaucagcaugugggcccuggugaucuccgugaccagcaacuacuccggggucgugaccacgaucauguuccucgcccgggccaucguguucgucugcguggaguacuacccccugcuguucaucaccggcaacacccuccagugcaucaugcugguguacugcuuccugggcuacugcugcugcugcuacuucggccucuucugccugcugaaccgcuacuuccggcucacccugggggucuacgacuaccuggugagcacgcaggaguuccgcuacaugaacucccaggggcuccugcccccgaaguccagcaucgacgccuucaagcugaacaucaagcuccugggcaucgggggcaagcccugcaucaagguggcgaccguccaguga

SEQ ID NO: 18451 - RNA, 867 nt, Artificial Sequence
  HCoV/OC43__NC_006213.1__non-structural protein 6 (NSP6) CDS gc
augagcaagcgcacccggcuguucaagggcaccgugugcuggaucauggccuccacguuccucuucagcugcaucaucaccgccuucgucaaguggaccauguucauguacgugaccacgaacauguucuccaucaccuucugcgcgcugugcgugaucagccuggccaugcuccuggucaagcacaagcaccuguaccucaccauguacaucacccccgugcuguucacgcugcucuacaacaacuaccugguggucuacaagcacaccuuccgcggguacguguacgccuggcuguccuacuacgugccgagcgucgaguacaccuacaccgacgaggugaucuacggcaugcuccugcugguggggauggucuucgugacgcuccgguccaucaaccacgaccuguucagcuucaucauguucgugggccgccugaucuccgucuucagccucugguacaagggguccaaccuggaggaggagauccugcucaugcuggccagccuguucggcaccuacaccuggaccacggugcucuccauggccguggcgaaggucaucgccaaguggguggccgugaacguccuguacuucaccgacaucccccagaucaagaucgugcugcucugcuaccuguucaucggcuacaucaucagcugcuacugggggcuguucucccucaugaacagccuguuccggaugccccugggcguguacaacuacaagaucuccguccaggagcuccgcuacaugaacgccaacgggcugcggcccccgaagaacagcuucgaggcgcugaugcucaacuucaagcugcugggcaucgggggcgugcccaucaucgaggucucccaguuccaguga

SEQ ID NO: 18452 - RNA, 867 nt, Artificial Sequence
  HCoV/HKU1__NC_006577.2__non-structural protein 6 (NSP6) CDS gc
augagcaagaccaagcgcuucaucaaggagaccaucuacuggauccugaucuccacguuccucuucagcugcaucaucuccgccuucgugaaguggaccaucuucauguacaucaacacccacaugaucggcgucacccugugcgugcugugcuucgugagcuucaugaugcuccuggucaagcacaagcacuucuaccugacgauguacaucauccccgugcucugcacccuguucuacgugaacuaccuggucguguacaaggagggguuccggggcuucaccuacguguggcucuccuacuucgucccggccgugaacuucaccuacguguacgaggucuucuacgggugcauccugugcguguucgcgaucuucaucacgaugcacagcaucaaccacgacaucuucucccugauguuccucgugggccgcaucgucacccugaucagcaugugguacuucggguccaaccuggaggaggacgugcuccuguucaucaccgccuuccugggcaccuacacguggaccaccauccucagccuggccaucgccaagaucguggccaacuggcuguccgucaacaucuucuacuucaccgacgugcccuacaucaagcucauccugcugagcuaccucuucaucggcuacauccuguccugcuacuggggguucuucagccugcucaacuccguguuccggaugcccaugggcgucuacaacuacaagaucagcgugcaggagcugcgcuacaugaacgcgaacgggcugcggcccccgcgcaacuccuucgaggccauccuccugaaccugaagcuccugggcaucgggggcgugcccgucaucgaggugagccagauccaguga

SEQ ID NO: 18453 - RNA, 843 nt, Artificial Sequence
  HCoV/229E/BN1/GER/2015__KU291448.1__non-structural protein 6 (NSP6) CDS gc
augagcggcaagaccaccuccauguucaagagcaucucccuguucgccggguucuucgugauguucugggccgagcuguucgucuacacgaccaccaucugggugaaccccggcuuccucaccccguucaugauccugcucguggcgcugagccugugccucacguucgucgugaagcacaaggugcuguuccugcaggucuuccuccugcccuccaucaucguggccgccauccagaacugcgccugggacuaccacaucaccaaggugcuggccgagaaguucgacuacaacgucagcgugaugcagauggacauccagggguucgugaacaucuucaucugccucuucgucgcgcugcugcacaccuggcgcuucgccaaggagcggugcacccacuggugcacguaccucuucucccugaucgccgugcuguacaccgcccucuacagcuacgacuacgugucccugcuggucaugcuccugugcgcgaucagcaacgagugguacaucggcgccaucaucuuccgcaucugccgguucgggguggccuuccugcccguggaguacgucuccuacuucgacggcgugaagaccgugcuccuguucuacaugcugcucggcuucgucagcugcauguacuacgggcugcuguacuggaucaaccgcuucugcaagugcacccucggcguguacgacuucugcgugucccccgccgaguucaaguacauggucgccaacgggcugaacgcgccgaacggccccuucgacgcccuguuccucagcuucaagcugauggggaucggcggcccccggacgaucaagguguccaccguccaguga

SEQ ID NO: 18454 - RNA, 843 nt, Artificial Sequence
  HCoV/NL63/RPTEC/2004__JX504050.1__non-structural protein 6 (NSP6) CDS gc
augagcggcaaggugaucuucgggcugaagaccauguuccucuucuccgucuucuucaccauguucugggccgagcuguucaucuacacgaacaccaucuggaucaaccccgugauccugaccccgaucuucugccuccugcuguuccucagccuggugcugaccauguuccucaagcacaaguuccuguuccugcaggucuuccuccugcccacggugaucgccaccgcgcuguacaacugcgugcucgacuacuacaucgucaaguuccuggccgaccacuucaacuacaacguguccgugcugcagauggacguccagggccucgugaacgugcuggucugccuguucgugguguuccuccacaccuggcgcuucagcaaggagcgguucacccacugguucacguacgucugcucccugaucgccguggccuacaccuacuucuacagcggggacuuccugucccuccuggugauguuccugugcgccaucagcuccgacugguacaucggcgcgaucgucuuccgccucagccggcugaucguguucuucucccccgagagcguguucuccgucuucggggacgugaagcugacccucguggucuaccugaucugcggcuaccuggugugcaccuacuggggcauccucuacugguucaaccgcuucuucaagugcacgaugggggucuacgacuucaaggugagcgccgccgaguucaaguacaugguggccaacggccugcacgcgccccacgggccguucgacgcccuguggcucuccuucaagcugcugggcaucgggggcgaccggugcaucaagaucagcaccguccaguga

SEQ ID NO: 18455 - RNA, 876 nt, Artificial Sequence
  Bat SARS-like CoV/WIV1__KF367457.1__non-structural protein 6 (NSP6) CDS gc
augggcaaguucaagaagaucgugaaggggacccaccacuggaugcugcucaccuuccugacgagccugcucauccugguccaguccacccaguggagccuguucuucuucguguacgagaacgccuuccuccccuucacccugggcaucauggccaucgcggccugcgccaugcugcucgugaagcacaagcacgccuuccugugccuguuccuccugccgucccuggccaccgucgcguacuucaacaugguguacaugcccgccagcugggugaugcgcaucaugacgugguucgagcucgccgacaccucccugagcggguaccggcugaaggacugcgucauguacgccuccgcgcucgugcugcugauccucaugaccgcccgcaccguguacgacgacgccgcccggcgcgucuggacgcugaugaacgugaucacccugguguacaaggucuacuacggcaacgcccucgaccaggcgaucagcaugugggcccuggugaucuccgugaccagcaacuacuccggggucgugaccacgaucauguuccuggcccgggccaucguguucgucugcguggaguacuacccccuccuguucaucaccggcaacacccugcagugcaucaugcucguguacugcuuccugggcuacugcugcugcugcuacuucgggcuguucugccuccugaaccgcuacuuccggcugacccucggcgucuacgacuaccuggugagcacgcaggaguuccgcuacaugaacucccaggggcugcucccgcccaagagcuccaucgacgccuucaagcugaacaucaagcugcucggcaucgggggcaagcccugcaucaagguggcgaccguccaguga

SEQ ID NO: 18456 - RNA, 876 nt, Artificial Sequence
  BatCoV/HKU9-1 BF_005I__NC_009021.1__non-structural protein 6 (NSP6) CDS gc
augggcaaguuccagagcauguuccgcuggacccugcagugguucgccaucaucuucgugcucaccauccugauccugcuccagcuggcccaguggacguucgucggggcgcugcccuucacccuccugcugccccucaucggcuucguggccgugugcgucggguucgugucccugcugaucaagcacaagcacaccuaccucaccguguaccugcugcccgucgccauggugacggccuacuacaacuuccaguacacccccgagggcgugcagggguaccuccugagccuguacaacuacgucaaccccggccggaucgacgugaucggcaccgaccuccugaccaugcugaucaucuccguggccugcacgcuccugagcguccgcauggugcggaccgacgcguacucccgcaucugguacgugugcaccgccgucggguggcuguacaacugcuggaccggcagcgccgacacgguggccaucuccuaccucaccuucauggugagcgucuucaccaacuacaccgggguggcgugcgccucccuguacgccgcccaguucaugguguggguccugaaguuccucgacccgacgauccugcugcucuacggccgguuccgcugcgugcuggugugcuaccugcucgucggguaccugugcacgugcuacuucggcguguucaaccugaucaaccgccucuuccggugcacccugggcaacuacgaguacgucgugagcucccaggagcugcgguacaugaacagccacgggcuccugccgcccaccaacuccuggcaggcccugaugcucaacaucaagcuggcgggcaucgggggcauccccaucuaccgcgugagcaccauccaguga

SEQ ID NO: 18457 - RNA, 846 nt, Artificial Sequence
  PEDV/NPL-PEDv/2013/P10__KJ778616.1__non-structural protein 6 (NSP6) CDS gc
augagcggcuacgugucccgcgccugccggaacguccugcucguggggagcuuccugaccuucuucugguccgagcuggugagcuacaccaaguucuucugggucaaccccggcuacgugacgccgauguucgccugccucucccugcugagcucccuccugauguucacccugaagcacaagacccucuucuuccagguguuccugauccccgcgcugaucgucaccagcugcaucaaccucgccuucgacguggagguguacaacuaccuggccgagcacuucgacuaccacgucucccugaugggguucaacgcccagggccucgugaacaucuucgugugcuucgucgugacgauccugcacgggaccuacaccuggcgcuucuucaacacccccgugagcuccgucacguacgugguggcccugcucaccgcggccuacaacuacuucuacgccagcgacauccuguccugcgccaugacccuguucgcgagcgucaccggcaacugguucgugggcgccgugugcuacaaggccgccgucuacauggcccuccgguuccccacguucguggcgaucuucggggacaucaaguccgugauguucugcuaccugguccugggcuacuucacgugcugcuucuacgggauccucuacugguucaaccgcuucuucaaggugagcgucggcguguacgacuacaccguguccgccgccgaguucaaguacauggucgccaacgggcugcgggccccgaccggcacccuggacagccuccugcuguccgcgaagcucaucggcaucgggggcgagcgcaacaucaagaucagcagcgugcaguga

SEQ ID NO: 18458 - RNA, 867 nt, Artificial Sequence
  MHV/A59__NC_048217.1__non-structural protein 6 (NSP6) CDS gc
augagcaagcgcacccgggugaucaaggggaccugcugcuggauccuggccuccacguuccucuucugcagcaucaucuccgccuucgucaaguggaccauguucauguacgugaccacccacaugcugggcgugacgcugugcgcgcucugcuucgucagcuucgccaugcugcugaucaagcacaagcaccucuaccugaccauguacaucaugcccgugcugugcacccucuucuacaccaacuaccugguggucuacaagcaguccuuccgcggccuggccuacgccuggcucagccacuucgugccggccguggacuacacguacauggacgagguccuguacgggguggugcugcucgucgcgaugguguucgugaccaugcgguccaucaaccacgacgucuucagcaucauguuccuggugggccgccuggugucccucgucagcaugugguacuucggggccaaccuggaggaggaggugcuccuguuccugaccucccuguucggcaccuacacguggaccaccaugcucagccuggccaccgccaaggugaucgcgaaguggcuggccgucaacgugcucuacuucacggacgugccccagaucaagcugguccugcucuccuaccugugcaucggcuacgugugcugcugcuacugggggauccugagccuccugaacuccaucuuccggaugccccugggcgucuacaacuacaagaucagcgugcaggagcuccgcuacaugaacgccaacgggcugcggcccccgcgcaacuccuucgaggcccugaugcucaacuucaagcugcugggcaucgggggcgugcccgucaucgaggugagccagauccaguga

SEQ ID NO: 18459 - RNA, 876 nt, Artificial Sequence
  SARS-CoV-2/Wuhan-Hu-1__NC_045512.2/MN908947.2/EPI_ISL_402128__non -structural protein 6 (NSP6) CDS gc
augagcgccgugaagcgcaccaucaagggcacccaccacuggcugcuccugacgauccugaccucccuccugguccuggugcagagcacccaguggucccucuucuucuuccuguacgagaacgccuuccugcccuucgcgauggggaucaucgccaugagcgccuucgccaugauguucgugaagcacaagcacgccuuccucugccuguuccugcucccgucccuggcgaccgucgccuacuucaacaugguguacaugcccgccagcugggugaugcggaucaugacguggcuggacauggucgacaccucccucagcggcuucaagcugaaggacugcgugauguacgccuccgcggugguccugcucauccugaugaccgcccgcaccguguacgacgacggggcccggcgcguguggacgcugaugaacguccucacccugguguacaagguguacuacggcaacgcccuggaccaggccaucagcaugugggcgcucaucaucuccgucaccagcaacuacuccgggguggugaccacggucauguuccuggcccggggcaucguguucaugugcguggaguacugccccaucuucuucaucaccggcaacacccugcagugcaucaugcucgucuacugcuuccugggguacuucugcacgugcuacuucggccuguucugccuccugaaccgcuacuuccggcugacccucgggguguacgacuaccuggugagcacccaggaguuccgcuacaugaacucccagggccugcugcccccgaagaacagcaucgacgccuucaagcucaacaucaagcugcucggggucggcggcaagcccugcaucaagguggccaccguccaguga

SEQ ID NO: 18460 - RNA, 876 nt, Artificial Sequence
  SARS-CoV-2__MT919768.1__non-structural protein 6 (NSP6) CDS gc
augagcgccgugaagcgcaccaucaagggcacccaccacuggcugcuccugacgauccugaccucccuccugguccuggugcagagcacccaguggucccucuucuucuucuucuacgagaacgccuuccugcccuucgcgauggggaucaucgccaugagcgccuucgccaugauguucgugaagcacaagcacgccuuccugugccucuuccugcugccgucccucgcgaccgucgccuacuucaacaugguguacaugcccgccagcugggugaugcggaucaugacguggcuggacauggucgacaccucccugagcggcuucaagcucaaggacugcgugauguacgccuccgcggugguccugcugauccucaugaccgcccgcaccguguacgacgacggggcccggcgcguguggacgcugaugaacguccugacccucguguacaagguguacuacggcaacgcccuggaccaggccaucagcaugugggcgcugaucaucuccgucaccagcaacuacuccgggguggugaccacggucauguuccucgcccggggcaucguguucaugugcguggaguacugccccaucuucuucaucaccggcaacacccugcagugcaucaugcuggucuacugcuuccucggguacuucugcacgugcuacuucggccuguucugccugcucaaccgcuacuuccggcugacccuggggguguacgacuaccucgugagcacccaggaguuccgcuacaugaacucccagggccugcugcccccgaagaacagcaucgacgccuucaagcucaacaucaagcugcugggggucggcggcaagcccugcaucaagguggccaccguccaguga

SEQ ID NO: 18461 - RNA, 876 nt, Artificial Sequence
  SARS-CoV-2__MT920039.1__non-structural protein 6 (NSP6) CDS gc
augagcgccgugaagcgcaccaucaagggcacccaccacuggcugcuccugacgauccugaccucccuccugguccuggugcagagcacccaguggucccucuucuucuuccuguacgagaacgccuuccugcccuucgcgauggggaucaucgccaugagcgccuucgccaugauguucgugaagcacaagcacgccuuccucugccuguuccugcucccgucccuggcgaccgucgccuacuucaacaugguguacaugcccgccagcugggugaugcggaucaugacguggcuggacauggucgacaccucccucagcggcuucaagcugaaggacugcgugauguacgccuccgcggugguccugcucauccuggugaccgcccgcaccguguacgacgacggggcccggcgcgucuggacgcugaugaacgugcucacccugguguacaaggucuacuacggcaacgcccuggaccaggccaucagcaugugggcgcucaucaucuccgugaccagcaacuacuccgggguggucaccacggugauguuccuggcccggggcaucguguucaugugcgucgaguacugccccaucuucuucaucaccggcaacacccugcagugcaucaugcucguguacugcuuccugggguacuucugcacgugcuacuucggccuguucugccuccugaaccgcuacuuccggcugacccucgggguguacgacuaccuggucagcacccaggaguuccgcuacaugaacucccagggccugcugcccccgaagaacagcaucgacgccuucaagcucaacaucaagcugcucggggugggcggcaagcccugcaucaaggucgccaccgugcaguga

SEQ ID NO: 18462 - RNA, 876 nt, Artificial Sequence
  SARS-CoV-2__MT913118.1__non-structural protein 6 (NSP6) CDS gc
augagcgccgugaagcgcaccaucaagggcacccaccacuggcugcuccugacgauccugaccucccuccugguccuggugcagagcacccaguggucccucuucuucuuccuguacgagaacgccuuccugcccuucgcgauggggaucaucgccaugagcgccuucgccaugauguucgugaagcacaagcacgccuuccucugccuguuccugcucccgucccuggcgaccgucgccuacuucaacgugguguacaugcccgccagcugggucaugcggaucaugacguggcuggacaugguggacaccucccucagcggcuucaagcugaaggacugcgugauguacgccuccgcggucgugcugcucauccugaugaccgcccgcaccguguacgacgacggggcccggcgcgucuggacgcugaugaacgugcucacccugguguacaaggucuacuacggcaacgcccuggaccaggccaucagcaugugggcgcucaucaucuccgugaccagcaacuacuccgggguggucaccacggugauguuccuggcccggggcaucguguucaugugcgucgaguacugccccaucuucuucaucaccggcaacacccugcagugcaucaugcucguguacugcuuccugggguacuucugcacgugcuacuucggccuguucugccuccugaaccgcuacuuccggcugacccucgggguguacgacuaccuggucagcacccaggaguuccgcuacaugaacucccagggccugcugcccccgaagaacagcaucgacgccuucaagcucaacaucaagcugcucggggugggcggcaagcccugcaucaaggucgccaccgugcaguga

SEQ ID NO: 18463 - RNA, 876 nt, Artificial Sequence
  SARS-CoV-2__MT913130.1__non-structural protein 6 (NSP6) CDS gc
augagcgccgugaagcgcaccaucaagggcacccaccacuggcugcuccugacgauccugaccucccuccugguccuggugcagagcacccaguggucccucuucuucuuccuguacgagaacgccuuccugcccuucgcgauggggaucaucgccaugagcgccuucgccaugauguucgugaagcacaagcacgccuuccucugccuguuccugcucccgucccuggcgaccgucgccuacuucaacaugguguacaugcccgccagcugggugaugcggaucaugacguggcuggacauggucgacaccucccucagcggcuucaagcugaaggacugcgugauguacgccuccgcggugguccugcucauccugaugaccgcccgcaccguguacgacgacggggcccggcgcguguggacgcugaugaacguccucacccugguguacaagguguacuacggcaacgcccuggaccaggccaucagcaugugggcgcucaucaucuccgucaccagcaacuacuccgggguggugaccacggucauguuccuggcccggggcaucguguucaugugcguggaguacugccccaucuucuucaucaccggcaacacccugcagugcaucaugcucgucuacugcuuccugggguacuucugcacgugcuacuucggccuguucugccuccugaaccgcuacuuccggcugacccucgggguguacgacuaccuggugagcacccaggaguuccgcuacaugaacucccagggccugcugcccccgaagaacagcaucgacgccuuccggcucaacaucaagcugcucggggucggcggcaagcccugcaucaagguggccaccguccaguga

SEQ ID NO: 18464 - RNA, 876 nt, Artificial Sequence
  SARS-CoV-2__MT893668.1__non-structural protein 6 (NSP6) CDS gc
augagcgccgugaagcgcaccaucaagggcacccaccacuggcugcuccugacgauccugaccucccuccugguccuggugcagagcacccaguggucccucuucuucuuccuguacgagaacgccuuccugcccuucgcgauggggaucaucgccaugagcgccuucgccaugauguucgugaagcacaagcacgccuuccucugccuguuccugcucccgucccuggcgaccgucgccuacuucaacaugguguacaugcccgccagcugggugaugcggaucaugacguggcuggacauggucgacaccucccucagcggcuucaagcugaaggacugcgugauguacgccuccgcggugguccugcucauccugaugaccgcccgcaccguguacgacgacggggcccggcgcguguggacgcugaugaacguccucacccugguguacaagguguacuacggcaacgcccuggaccaggccaucagcaugugggcgcucaucaucuccgucaccagcaacuacuccgggguggugaccacggucauguuccuggcccggggcaucguguucaugugcguggaguacugccccaucuucuucaucaccggcaacacccugcagugcaucaugcucgucuacugcuuccugggguacuucugcacgugcuacuucggccuguucugccuccugaaccgcuaccugcggcucacccuggggguguacgacuaccuggugagcacccaggaguuccgcuacaugaacucccagggccuccugcccccgaagaacagcaucgacgccuucaagcugaacaucaagcuccugggggucggcggcaagcccugcaucaagguggccaccguccaguga

SEQ ID NO: 18465 - RNA, 876 nt, Artificial Sequence
  SARS-CoV-2__MT890238.1__non-structural protein 6 (NSP6) CDS gc
augagcgccgugaagcgcaccaucaagggcacccaccacuggcugcuccugacgauccugaccucccuccugguccuggugcagagcacccaguggucccucuucuucuuccuguacgagaacgccuuccugcccuucgcgauggggaucaucgccaugagcgccuucgccaugauguucgugaagcacaagcacgccuuccucugccuguuccugcucccgucccuggcgaccgucgccuacuucaacaugguguacauccccgccagcugggugaugcggaucaugacguggcuggacauggucgacaccucccucagcggcuucaagcugaaggacugcgugauguacgccuccgcggugguccugcucauccugaugaccgcccgcaccguguacgacgacggggcccggcgcguguggacgcugaugaacguccucacccugguguacaagguguacuacggcaacgcccuggaccaggccaucagcaugugggcgcucaucaucuccgucaccagcaacuacuccgggguggugaccacggucauguuccuggcccggggcaucguguucaugugcguggaguacugccccaucuucuucaucaccggcaacacccugcagugcaucaugcucgucuacugcuuccugggguacuucugcacgugcuacuucggccuguucugccuccugaaccgcuacuuccggcugacccucgggguguacgacuaccuggugagcacccaggaguuccgcuacaugaacucccagggccugcugcccccgaagaacagcaucgacgccuucaagcucaacaucaagcugcucggggucggcggcaagcccugcaucaagguggccaccguccaguga

SEQ ID NO: 18466 - RNA, 876 nt, Artificial Sequence
  SARS-CoV-2__MT890355.1__non-structural protein 6 (NSP6) CDS gc
augagcgccgugaagcgcaccaucaagggcacccaccacuggcugcuccugacgauccugaccucccuccugguccuggugcagagcacccaguggucccucuucuucuuccuguacgagaacgccuuccugcccuucgcgauggggaucaucgccaugagcgccuucgccaugauguucgugaagcacaagcacgccuuccucugccuguuccugcucccgucccuggcgaccgucgccuacuucaacaugguguacaugcccgccagcugggugaugcggaucaugacguggcuggacauggucgacaccucccucagcggcuucaagcugaaggacugcgugauguacgccuccgcggugguccugcucauccugaugaccgcccgcaccguguacgacgacggggcccggcgcguguggacgcugaugaacguccucacccugguguacaagguguacuacggcaacgcccuggaccaggccaucagcaugugggcgcucaucaucuccgucaccagcaacuacuccgggguggugaccacggucauguuccuggcccggggcaucguguucaugugcguggaguacugccccaucuucuucaucaccggcaacacccugcacugcaucaugcucgucuacugcuuccugggguacuucugcacgugcuacuucggccuguucugccuccugaaccgcuacuuccggcugacccucgggguguacgacuaccuggugagcacccaggaguuccgcuacaugaacucccagggccugcugcccccgaagaacagcaucgacgccuucaagcucaacaucaagcugcucggggucggcggcaagcccugcaucaagguggccaccguccaguga

SEQ ID NO: 18467 - RNA, 876 nt, Artificial Sequence
  SARS-CoV-2__MT889692.1__non-structural protein 6 (NSP6) CDS gc
augagcgccgugaagcgcaccaucaagggcacccaccacuggcugcuccugacgauccugaccucccuccugguccuggugcagagcacccaguggucccucuucuucuuccuguacgagaacgccuuccugcccuucgcgauggggaucaucgccaugagcgccuucgccaugauguucgugaagcacaagaacgccuuccucugccuguuccugcucccgucccuggcgaccgucgccuacuucaacaugguguacaugcccgccagcugggugaugcggaucaugacguggcuggacauggucgacaccucccucagcggcuucaagcugaaggacugcgugauguacgccuccgcggugguccugcucauccugaugaccgcccgcaccguguacgacgacggggcccggcgcguguggacgcugaugaacguccucacccugguguacaagguguacuacggcaacgcccuggaccaggccaucagcaugugggcgcucaucaucuccgucaccagcaacuacuccgggguggugaccacggucauguuccuggcccggggcaucguguucaugugcguggaguacugccccaucuucuucaucaccggcaacacccugcagugcaucaugcucgucuacugcuuccugggguacuucugcacgugcuacuucggccuguucugccuccugaaccgcuacuuccggcugacccucgggguguacgacuaccuggugagcacccaggaguuccgcuacaugaacucccagggccugcugcccccgaagaacagcaucgacgccuucaagcucaacaucaagcugcucggggucggcggcaagcccugcaucaagguggccaccguccaguga

SEQ ID NO: 18468 - RNA, 876 nt, Artificial Sequence
  SARS-CoV-2__MT886314.1__non-structural protein 6 (NSP6) CDS gc
augagcgccgugaagcgcaccaucaagggcacccaccacuggcugcuccugacgauccugaccucccuccugguccuggugcagagcacccaguggucccucuucuucuuccuguacgagaacgccuuccugcccuucgcgauggggaucaucgccaugagcgccuucgccaugauguucgugaagcacaagcacgccuuccucugccuguuccugcucccgucccuggcgaccgucgccuacuucaacaugguguacaugcccgccagcugggugaugcggaucaugacguggcuggacauggucgacaccucccucagcggcuucaagcugaaggacugcgugauguacgccuccgcggugguccugcucauccugaugaccgcccgcaccguguacgacgacggggcccggcgcguguggacgcugaugaacguccucacccugguguacaagguguacuacggcaacgcccuggaccaggccaucagcaugugggcgcucaucaucuccgucaccagcaacuacuccgggguggugaccacggucauguuccuggcccggagcaucguguucaugugcguggaguacugccccaucuucuucaucaccggcaacacccugcagugcaucaugcucgucuacugcuuccugggcuacuucugcacgugcuacuucgggcuguucugccuccugaaccgcuacuuccggcugacccucggcguguacgacuaccugguguccacccaggaguuccgcuacaugaacagccaggggcugcugcccccgaagaacuccaucgacgccuucaagcucaacaucaagcugcucggcgucgggggcaagcccugcaucaagguggccaccguccaguga

SEQ ID NO: 18469 - RNA, 876 nt, Artificial Sequence
  SARS-CoV-2__MT886376.1__non-structural protein 6 (NSP6) CDS gc
augagcgccgugaagcgcaccaucaagggcacccaccacuggcugcuccugacgauccugaccucccuccugguccuggugcagagcacccaguggucccucuucuucuuccuguacgagaacgccuuccugcccuucgcgauggggaucaucgccaugagcgccuucgccaugauguucgugaagcacaagcacgccuuccucugccuguuccugcucccgucccuggcgaccgucgccuacuucaacauguucuacaugcccgccagcugggugaugcggaucaugacguggcuggacaugguggacaccucccucagcggcuucaagcugaaggacugcgucauguacgccuccgcgguggugcugcucauccugaugaccgcccgcaccgucuacgacgacggggcccggcgcguguggacgcugaugaacgugcucacccuggucuacaagguguacuacggcaacgcccuggaccaggccaucagcaugugggcgcucaucaucuccgugaccagcaacuacuccggggucgugaccacggugauguuccuggcccggggcaucgucuucaugugcguggaguacugccccaucuucuucaucaccggcaacacccugcagugcaucaugcucguguacugcuuccugggguacuucugcacgugcuacuucggccuguucugccuccugaaccgcuacuuccggcugacccucggggucuacgacuaccuggugagcacccaggaguuccgcuacaugaacucccagggccugcugcccccgaagaacagcaucgacgccuucaagcucaacaucaagcugcucggggugggcggcaagcccugcaucaaggucgccaccgugcaguga

SEQ ID NO: 18470 - RNA, 876 nt, Artificial Sequence
  SARS-CoV-2__MT873090.1__non-structural protein 6 (NSP6) CDS gc
augagcgccgugaagcgcaccaucaagggcacccaccacuggcugcuccugacgauccugaccucccuccugguccuggugcagagcacccaguggucccucuucuucuuccuguacgagaacgccuuccugcccuucgcgauggggaucaucgccaugagcgccuucgccaugauguucgugaagcacaagcacgccuuccucugccuguuccugcucccgucccuggcgaccgucgccuacuucaacaugguguacaugcccgccagcugggugaugcggaucaugacguggcuggacauggucgacaccucccucagcggcuucaagcugaaggacugcgugauguacgccuccgcggugguccugcucauccugaugaccgcccgcaccguguacgacgacggggcccggcgcguguggacgcugaugaacguccucacccugguguacaagguguacuacggcaacgcccuggaccaggucaucagcaugugggcccucaucaucuccgugaccagcaacuacuccgggguggucaccacggugauguuccuggcgcggggcaucguguucaugugcgucgaguacugccccaucuucuucaucaccggcaacacccugcagugcaucaugcucguguacugcuuccugggguacuucugcacgugcuacuucggccuguucugccuccugaaccgcuacuuccggcugacccucgggguguacgacuaccuggucagcacccaggaguuccgcuacaugaacucccagggccugcugcccccgaagaacagcaucgacgccuucaagcucaacaucaagcugcucggggugggcggcaagcccugcaucaaggucgccaccgugcaguga

SEQ ID NO: 18471 - RNA, 876 nt, Artificial Sequence
  SARS-CoV-2__MT873137.1__non-structural protein 6 (NSP6) CDS gc
augagcgccgugaagcgcaccaucaagggcacccaccacuggcugcuccugacgauccugaccucccuccugguccuggugcagagcacccaguggucccucuucuucuuccuguacgagaacgccuuccugcccuucgcgauggggaucaucgccaugagcgccuucgccaugauguucgugaagcacaagcacgccuuccucugccuguuccugcucccgucccuggcgaccgucgccuacuucaacaugguguacaugcccgccagcugggugaugcggaucaugacguggcuggacauggucgacaccucccucagcggcuucaagcugaaggacugcgugauguacgccuccgcggugguccugcucauccugaugaccgcccgcaccguguacgacgacggggcccggcgcguguggacgcugaugaacguccucacccuguucuacaagguguacuacggcaacgcccuggaccaggccaucagcaugugggcgcucaucaucuccgugaccagcaacuacuccggggucgugaccacggugauguuccuggcccggggcaucgucuucaugugcguggaguacugccccaucuucuucaucaccggcaacacccugcagugcaucaugcucguguacugcuuccugggguacuucugcacgugcuacuucggccuguucugccuccugaaccgcuacuuccggcugacccucggggucuacgacuaccuggugagcacccaggaguuccgcuacaugaacucccagggccugcugcccccgaagaacagcaucgacgccuucaagcucaacaucaagcugcucggggugggcggcaagcccugcaucaaggucgccaccgugcaguga

SEQ ID NO: 18472 - RNA, 876 nt, Artificial Sequence
  SARS-CoV-2__MT873178.1__non-structural protein 6 (NSP6) CDS gc
augagcgccgugaagcgcaccaucaagggcacccaccacuggcugcuccugacgauccugaccucccuccugguccuggugcagagcacccaguggucccucuucuucuuccuguacgagaacgccuuccugcccuucgcgauggggaucaucgccaugagcgccuucgccaugauguucgugaagcacaagcacgccuuccucugccuguuccugcucccgucccuggcgaccgucgccuacuucaacaugguguacaugcccgccagcugggugaugcggaucaugacguggcuggacauggucgacaccucccucagcggcuucaagcugaaggacugcgugauguacgccuccgcggugguccugcucauccugaugaccgcccgcaccguguacgacgacggggcccggcgcguguggacgcugaugaacguccucacccugguguacaagguguacuacggcaacgcccuggaccaggccaucagcaugugggcgcucaucaucuccgucaccagcaacuacuccgggguggugaccacggucauguuccuggcccggggcaucguguucaugugcguggaguacugccccaucuucuucaucaccggcaacacccugcagugcaucaugcucgucuacugcuuccugggguacuucugcacgugcuacuucggccuguucugccuccugaaccgcuacuuccggcugacccucgggguguacgacuaccuggugagcacccaggaguuccgcuacaugaacucccagggccugcugcccccgaagaacagcaucggggccuucaagcucaacaucaagcugcucggcgucggcgggaagcccugcaucaagguggccaccguccaguga

SEQ ID NO: 18473 - RNA, 876 nt, Artificial Sequence
  SARS-CoV-2__MT873456.1__non-structural protein 6 (NSP6) CDS gc
augagcgccgugaagcgcaccaucaagggcacccaccacuggcugcuccugacgauccugaccucccuccugguccuggugcagagcacccaguggucccucuucuucuuccuguacgagaacgccuuccugcccuucgcgauggggaucaucgccaugagcgccuucgccaugauguucgugaagcacaagcacgccuuccucugccuguuccugcucccgucccuggcgaccgucgccuacuucaacaugguguacaugcccgccagcugggugaugcggaucaugacguggcuggacauggucgacaccucccucagcggcuucaagcugaaggacugcgugauguacgccuccgcggugguccugcucauccugaugaccgcccgcaccguguacgacgacggggcccggcgcguguggacgcugaugaacguccucacccugguguacaagguguacuacggcaacgcccugaaccaggccaucagcaugugggcgcucaucaucuccgucaccagcaacuacuccgggguggugaccacggucauguuccuggcccggggcaucguguucaugugcguggaguacugccccaucuucuucaucaccggcaacacccugcagugcaucaugcucgucuacugcuuccugggguacuucugcacgugcuacuucggccuguucugccuccugaaccgcuacuuccggcugacccucgggguguacgacuaccuggugagcacccaggaguuccgcuacaugaacucccagggccugcugcccccgaagaacagcaucgacgccuucaagcucaacaucaagcugcucggggucggcggcaagcccugcaucaagguggccaccguccaguga

SEQ ID NO: 18474 - RNA, 876 nt, Artificial Sequence
  SARS-CoV-2__MT876554.1__non-structural protein 6 (NSP6) CDS gc
augagcgccgugaagcgcaccaucaagggcacccaccacuggcugcuccugacgauccugaccucccuccuguuccugguccagagcacccaguggucccucuucuucuuccuguacgagaacgccuuccugcccuucgcgauggggaucaucgccaugagcgccuucgccaugauguucgugaagcacaagcacgccuuccucugccuguuccugcucccgucccuggcgaccguggccuacuucaacauggucuacaugcccgccagcugggugaugcggaucaugacguggcuggacaugguggacaccucccucagcggcuucaagcugaaggacugcgucauguacgccuccgcgguggugcugcucauccugaugaccgcccgcaccgucuacgacgacggggcccggcgcguguggacgcugaugaacgugcucacccuggucuacaagguguacuacggcaacgcccuggaccaggccaucagcaugugggcgcucaucaucuccgugaccagcaacuacuccggggucgugaccacggugauguuccuggcccggggcaucgucuucaugugcguggaguacugccccaucuucuucaucaccggcaacacccugcagugcaucaugcucguguacugcuuccugggguacuucugcacgugcuacuucggccuguucugccuccugaaccgcuacuuccggcugacccucggggucuacgacuaccuggugagcacccaggaguuccgcuacaugaacucccagggccugcugcccccgaagaacagcaucgacgccuucaagcucaacaucaagcugcucggggugggcggcaagcccugcaucaaggucgccaccgugcaguga

SEQ ID NO: 18475 - RNA, 876 nt, Artificial Sequence
  SARS-CoV-2__MT876555.1__non-structural protein 6 (NSP6) CDS gc
augagcgccgugaagcgcaccaucaagggcacccaccacuggcugcuccugacgauccugaccuccauccucguccuggugcagagcacccaguggucccuguucuucuuccucuacgagaacgccuuccugcccuucgcgauggggaucaucgccaugagcgccuucgccaugauguucgugaagcacaagcacgccuuccugugccucuuccugcugccgucccucgcgaccgucgccuacuucaacaugguguacaugcccgccagcugggugaugcggaucaugacguggcuggacauggucgacaccucccugagcggcuucaagcucaaggacugcgugauguacgccuccgcggugguccugcugauccucaugaccgcccgcaccguguacgacgacggggcccggcgcguguggacgcugaugaacguccugacccucguguacaagguguacuacggcaacgcccuggaccaggccaucagcaugugggcgcugaucaucuccgucaccagcaacuacuccgggguggugaccacggucauguuccucgcccggggcaucguguucaugugcguggaguacugccccaucuucuucaucaccggcaacacccugcagugcaucaugcuggucuacugcuuccucggguacuucugcacgugcuacuucggccuguucugccugcucaaccgcuacuuccggcugacccuggggguguacgacuaccucgugagcacccaggaguuccgcuacaugaacucccagggccugcugcccccgaagaacagcaucgacgccuucaagcucaacaucaagcugcugggggucggcggcaagcccugcaucaagguggccaccguccaguga

SEQ ID NO: 18476 - RNA, 876 nt, Artificial Sequence
  SARS-CoV-2__MT877304.1__non-structural protein 6 (NSP6) CDS gc
augagcgccgugaagcgcaccaucaagggcacccaccacuggcugcuccugacgauccugaccucccuccugguccuggugcagagcacccaguggucccucuucuucuuccuguacgagaacgccuuccugcccuucgcgauggggaucaucgccaugagcgccuucgccaugauguucaucaagcacaagcacgccuuccucugccuguuccugcucccgucccuggcgaccguggccuacuucaacauggucuacaugcccgccagcugggugaugcggaucaugacguggcuggacaugguggacaccucccucagcggcuucaagcugaaggacugcgucauguacgccuccgcgguggugcugcucauccugaugaccgcccgcaccgucuacgacgacggggcccggcgcguguggacgcugaugaacgugcucacccuggucuacaagguguacuacggcaacgcccuggaccaggccaucagcaugugggcgcucaucaucuccgugaccagcaacuacuccggggucgugaccacggugauguuccuggcccggggcaucgucuucaugugcguggaguacugccccaucuucuucaucaccggcaacacccugcagugcaucaugcucguguacugcuuccugggguacuucugcacgugcuacuucggccuguucugccuccugaaccgcuacuuccggcugacccucggggucuacgacuaccuggugagcacccaggaguuccgcuacaugaacucccagggccugcugcccccgaagaacagcaucgacgccuucaagcucaacaucaagcugcucggggugggcggcaagcccugcaucaaggucgccaccgugcaguga

SEQ ID NO: 18477 - RNA, 876 nt, Artificial Sequence
  SARS-CoV-2__MT873803.1__non-structural protein 6 (NSP6) CDS gc
augagcgccgugaagcgcaccaucaagggcacccaccacuggcugcuccugacgauccugaccucccuccugguccuggugcagagcacccaguggucccucuucuucuuccuguacgagaacgccuuccugcccuucgcgauggggaucaucgccaugagcgccuucgccaugauguucgugaagcacaagcacgccuuccucugccuguuccugcucccgucccuggcgaccgucgccuacuucaacaugguguacaugcccgccagcugggugaugcggaucaugacguggcuggacauggucgacaccucccucagcggcuucaagcugaaggacugcgugauguacgccuccgcggugguccugcucauccugaugaccgcccgcaccguguacgacgacggggugcggcgcgucuggacgcugaugaacgugcucacccugguguacaaggucuacuacggcaacgcccuggaccaggccaucagcaugugggcccucaucaucuccgugaccagcaacuacuccgggguggucaccacggugauguuccuggcgcggggcaucguguucaugugcgucgaguacugccccaucuucuucaucaccggcaacacccugcagugcaucaugcucguguacugcuuccugggguacuucugcacgugcuacuucggccuguucugccuccugaaccgcuacuuccggcugacccucgggguguacgacuaccuggucagcacccaggaguuccgcuacaugaacucccagggccugcugcccccgaagaacagcaucgacgccuucaagcucaacaucaagcugcucggggugggcggcaagcccugcaucaaggucgccaccgugcaguga

SEQ ID NO: 18478 - RNA, 876 nt, Artificial Sequence
  SARS-CoV-2__MT856453.1__non-structural protein 6 (NSP6) CDS gc
augagcgccgugaagcgcaccaucaagggcacccaccacuggcugcuccugacgauccugaccucccuccugguccuggugcagagcacccaguggucccucuucuucuuccuguacgagaacgccuuccugcccuucgcgauggggaucaucgccaugagcgccuucgccaugauguucgugaagcacaagcacgccuuccucugccuguuccugcucccgucccuggcgaccgucgccuacuucaacaugguguacaugcccgccagcugggugaugcggaucaugacguggcuggacauggucgacaccucccucagcggcuucaagcugaaggacugcgugauguacgccuccgcggugguccugcucacccugaugaccgcccgcacgguguacgacgacggggcccggcgcguguggacccugaugaacguccucacccugguguacaagguguacuacggcaacgcccuggaccaggccaucagcaugugggcgcucaucaucuccgucaccagcaacuacuccgggguggugacgaccgucauguuccuggcccggggcaucguguucaugugcguggaguacugccccaucuucuucaucaccggcaacacccugcagugcaucaugcucgucuacugcuuccugggguacuucugcacgugcuacuucggccuguucugccuccugaaccgcuacuuccggcugacccucgggguguacgacuaccuggugagcacccaggaguuccgcuacaugaacucccagggccugcugcccccgaagaacagcaucgacgccuucaagcucaacaucaagcugcucggggucggcggcaagcccugcaucaagguggccaccguccaguga

SEQ ID NO: 18479 - RNA, 876 nt, Artificial Sequence
  SARS-CoV-2__MT856455.1__non-structural protein 6 (NSP6) CDS gc
augagcgccgugaagcgcaccaucaagggcacccaccacuggcugcuccugacgauccugaccucccuccugguccuggugcagagcacccaguggucccucuucuucuuccuguacgagaacgccuuccugcccuucgcgauggggaucaucgccaugagcgccuucgccaugauguucgugaagcacaagcacgccuuccucugccuguuccugcucccgucccuggcgaccgucgccuacuucaacaugguguacaugcccgccagcugggugaugcggaucaugacguggcuggacauggucgacaccucccucagcggcuucaagcugaaggacugcgugauguacgccuccgcggugguccugcucauccugaugaccgcccgcaccguguacgacgacggggcccggcgcguguggacgcugaugaacguccucacccugguguacaagguguacuacggcaacgcccuggaccaggccaucagcaugugggcgcucaucaucuccgucaccagcaacuacuccgggguggugaccacggucauguuccuggcccggggcaucguguucaugugcguggaguacugccccaucuucuucaucaccggcaacacccugcagugcgucaugcucguguacugcuuccugggguacuucugcacgugcuacuucggccuguucugccuccugaaccgcuacuuccggcugacccucgggguguacgacuaccuggucagcacccaggaguuccgcuacaugaacucccagggccugcugcccccgaagaacagcaucgacgccuucaagcucaacaucaagcugcucggggugggcggcaagcccugcaucaaggucgccaccgugcaguga

SEQ ID NO: 18480 - RNA, 876 nt, Artificial Sequence
  SARS-CoV-2__MT846438.1__non-structural protein 6 (NSP6) CDS gc
augagcgccgugaagcgcaccaucaagggcacccaccacuggcugcuccugacgauccugaccucccuccugguccuggugcagagcacccaguggucccucuucuucuuccuguacgagaacgccuuccugcccuucgcgauggggaucaucgugaugagcgccuucgccaugauguucgucaagcacaagcacgccuuccucugccuguuccugcucccgucccuggccaccguggcguacuucaacaugguguacaugcccgccagcugggucaugcggaucaugacguggcuggacaugguggacaccucccucagcggcuucaagcugaaggacugcgugauguacgccuccgccgucgugcugcucauccugaugaccgcgcgcaccguguacgacgacggggcccggcgcgucuggacgcugaugaacgugcucacccugguguacaaggucuacuacggcaacgcccuggaccaggccaucagcaugugggcccucaucaucuccgugaccagcaacuacuccgggguggucaccacggugauguuccuggcgcggggcaucguguucaugugcgucgaguacugccccaucuucuucaucaccggcaacacccugcagugcaucaugcucguguacugcuuccugggguacuucugcacgugcuacuucggccuguucugccuccugaaccgcuacuuccggcugacccucgggguguacgacuaccuggucagcacccaggaguuccgcuacaugaacucccagggccugcugcccccgaagaacagcaucgacgccuucaagcucaacaucaagcugcucggggugggcggcaagcccugcaucaaggucgccaccgugcaguga

SEQ ID NO: 18481 - RNA, 876 nt, Artificial Sequence
  SARS-CoV-2__MT846506.1__non-structural protein 6 (NSP6) CDS gc
augagcgccgugaagcgcaccaucaagggcacccaccacuggcugcuccugacgauccugaccucccuccugguccuggugcagagcacccaguggucccucuucuucuuccuguacgagaacgccuuccugcccuucgcgauggggaucaucgccaugagcgccuucgccaugauguucgugaagcacaagcacgccuuccucugccuguuccugcucccgucccuggcgaccgucgccuacuucaacaugguguacaugcccgccagcugggugaugcggaucaugacguggcuggacauggucgacaccucccucagcggcuucaagcugaaggacugcgugauguacgccuccgcggugguccugcucauccugaugaccgcccgcaccguguacgacgacggggcccggcgcguguggacgcugaugaacguccucacccugguguacaagguguacuacggcaacgcccuggaccaggccaucagcaugugggcgcucaucaucuccgucaccagcaacuacuccgggguggugaccacggucauguuccuggcccggggcaucguguucaugugcguggaguacugccccaucuucuucaucaccggcaacacccugcagugcaucaugcucgucuacugcuuccugggguacuucugcacgugcuacuucggccuguucugccuccugaaccgcuacuuccggcugacccucgggguguacgacuaccuggugagcacccaggaguuccgcuacaugaacucccagggccugcugcccccgaagaacagcaucgaggccuucaagcucaacaucaagcugcucggggucggcggcaagcccugcaucaagguggccaccguccaguga

SEQ ID NO: 18482 - RNA, 876 nt, Artificial Sequence
  SARS-CoV-2__MT846514.1__non-structural protein 6 (NSP6) CDS gc
augagcgccgugaagcgcaccaucaagggcacccaccacuggcugcuccugacgauccugaccucccuccugguccuggugcagagcacccaguggucccucuucuucuuccuguacgagaacgccuuccugcccuucgcgauggggaucaucgccaugagcgccuucgccaugauguucgugaagcacaagcacgccuuccucugccuguuccugcucccgucccuggcgaccgucgccuacuucaacaugguguacaugcccgccagcugggugaugcggaucaugacguggcuggacauggucgacaccucccucagcggcuucaagcugaaggacugcgugauguacgccuccgcggugguccugcucauccugaugaccgcccgcaccguguacgacgacggggcccggcgcguguggacgcugaugaacguccucacccugguguacaagguguacuacggcaacgcccuggaccaggccaucagcaugugggcgcucaucaucuccgucaccagcaacuacuccgggguggugaccacggucauguuccuggcccggggcaucguguucaugugcguggaguacugccccaucuucuucaucaccggcaacacccugcagugcaucaugcucgucuacugcuuccugggguacuucugcacgugcuacuucggccuguucugccuccugaaccgcuacuuccggcugacccucgggguguacgacuaccuggugagcacccaggaguuccgcuacaugaacucccagggccugcugcccccgaacaacagcaucgacgccuucaagcucaacaucaagcugcucggggucggcggcaagcccugcaucaagguggccaccguccaguga

SEQ ID NO: 18483 - RNA, 876 nt, Artificial Sequence
  SARS-CoV-2__MT843314.1__non-structural protein 6 (NSP6) CDS gc
augagcgccgugaagcgcaccaucaagggcacccaccacuggcugcuccugacgauccugaccucccuccugguccuggugcagagcacccaguggucccucuucuucuuccuguacgagaacgccuuccugcccuucgugauggggaucaucgcgaugagcgccuucgccaugauguucgucaagcacaagcacgccuuccucugccuguuccugcucccgucccuggccaccguggcguacuucaacaugguguacaugcccgccagcugggucaugcggaucaugacguggcuggacaugguggacaccucccucagcggcuucaagcugaaggacugcgugauguacgccuccgccgucgugcugcucauccugaugaccgcgcgcaccguguacgacgacggggcccggcgcgucuggacgcugaugaacgugcucacccugguguacaaggucuacuacggcaacgcccuggaccaggccaucagcaugugggcccucaucaucuccgugaccagcaacuacuccgggguggucaccacggugauguuccuggcgcggggcaucguguucaugugcgucgaguacugccccaucuucuucaucaccggcaacacccugcagugcaucaugcucguguacugcuuccugggguacuucugcacgugcuacuucggccuguucugccuccugaaccgcuacuuccggcugacccucgggguguacgacuaccuggucagcacccaggaguuccgcuacaugaacucccagggccugcugcccccgaagaacagcaucgacgccuucaagcucaacaucaagcugcucggggugggcggcaagcccugcaucaaggucgccaccgugcaguga

SEQ ID NO: 18484 - RNA, 876 nt, Artificial Sequence
  SARS-CoV-2__MT831149.1__non-structural protein 6 (NSP6) CDS gc
augagcgccgugaagcgcaccaucaagggcacccaccacuggcugcuccugacgauccugaccucccuccugguccuggugcagagcacccaguggucccucuucuucuuccuguacgagaacgccuuccugcccuucgcgauggggaucaucgccaugagcgccuucgccaugauguucgugaagcacaagcacgccuuccucugccuguuccugcucccgucccuggcgaccgucgccuacuucaacaugguguacaugcccgccagcugggugaugcggaucaugacguggcuggacauggucgacaccucccucagcggcuucaagcugaaggacugcgugauguacgccuccgcggugguccugcucauccugaugaccgcccgcaccguguacgacgacggggcccggcgcguguggacgcugaugaacguccucacccugguguacaagguguacuacggcaacgcccuggaccaggccaucagcaugugggcguucaucaucuccgucaccagcaacuacuccgggguggugaccacggucauguuccucgcccggggcaucguguucaugugcguggaguacugccccaucuucuucaucaccggcaacacccugcagugcaucaugcuggucuacugcuuccucggguacuucugcacgugcuacuucggccuguucugccugcucaaccgcuacuuccggcugacccuggggguguacgacuaccucgugagcacccaggaguuccgcuacaugaacucccagggccugcugcccccgaagaacagcaucgacgccuucaagcucaacaucaagcugcugggggucggcggcaagcccugcaucaagguggccaccguccaguga

SEQ ID NO: 18485 - RNA, 876 nt, Artificial Sequence
  SARS-CoV-2__MT831152.1__non-structural protein 6 (NSP6) CDS gc
augagcgccgugaagcgcaccaucaacggcacccaccacuggcugcuccugacgauccugaccucccuccugguccuggugcagagcacccaguggucccucuucuucuuccuguacgagaacgccuuccugcccuucgcgauggggaucaucgccaugagcgccuucgccaugauguucgugaagcacaagcacgccuuccucugccuguuccugcucccgucccuggcgaccgucgccuacuucaacaugguguacaugcccgccagcugggugaugcggaucaugacguggcuggacauggucgacaccucccucagcggcuucaagcugaaggacugcgugauguacgccuccgcggugguccugcucauccugaugaccgcccgcaccguguacgacgacggggcccggcgcguguggacgcugaugaacguccucacccugguguacaagguguacuacggcaacgcccuggaccaggccaucagcaugugggcgcucaucaucuccgucaccagcaacuacuccgggguggugaccacggucauguuccuggcccggggcaucguguucaugugcguggaguacugccccaucuucuucaucaccggcaacacccugcagugcaucaugcucgucuacugcuuccugggguacuucugcacgugcuacuucggccuguucugccuccugaaccgcuacuuccggcugacccucgggguguacgacuaccuggugagcacccaggaguuccgcuacaugaacucccagggccugcugcccccgaagaacagcaucgacgccuucaagcucaacaucaagcugcucggggucggcggcaagcccugcaucaagguggccaccguccaguga

SEQ ID NO: 18486 - RNA, 876 nt, Artificial Sequence
  SARS-CoV-2__MT831226.1__non-structural protein 6 (NSP6) CDS gc
augagcgccgugaagcgcaccaucaagggcacccaccacuggcugcuccugacgaaccugaccucccuccugguccuggugcagagcacccaguggucccucuucuucuuccuguacgagaacgccuuccugcccuucgcgauggggaucaucgccaugagcgccuucgccaugauguucgugaagcacaagcacgccuuccucugccuguuccugcucccgucccuggcgaccgucgccuacuucaacaugguguacaugcccgccagcugggugaugcggaucaugacguggcuggacauggucgacaccucccucagcggcuucaagcugaaggacugcgugauguacgccuccgcggugguccugcucauccugaugaccgcccgcaccguguacgacgacggggcccggcgcguguggacgcugaugaacguccucacccugguguacaagguguacuacggcaacgcccuggaccaggccaucagcaugugggcgcucaucaucuccgucaccagcaacuacuccgggguggugaccacggucauguuccuggcccggggcaucguguucaugugcguggaguacugccccaucuucuucaucaccggcaacacccugcagugcaucaugcucgucuacugcuuccugggguacuucugcacgugcuacuucggccuguucugccuccugaaccgcuacuuccggcugacccucgggguguacgacuaccuggugagcacccaggaguuccgcuacaugaacucccagggccugcugcccccgaagaacagcaucgacgccuucaagcucaacaucaagcugcucggggucggcggcaagcccugcaucaagguggccaccguccaguga

SEQ ID NO: 18487 - RNA, 876 nt, Artificial Sequence
  SARS-CoV-2__MT831341.1__non-structural protein 6 (NSP6) CDS gc
augagcgccgugaagcgcaccaucaagggcacccaccacuggcugcuccugacgauccugaccucccuccugguccuggugcagagcacccaguggucccucuucuucuucuucuacgagaacgccuuccugcccuucgcgauggggaucaucgccaugagcgccuucgccaugauguucgugaagcacaagcacgccuuccugugccucuuccugcugccgucccucgcgaccgucgccuacuucaacaugguguacaugcccgccagcugggugaugcggaucaugacguggcuggacauggucgacaccucccugagcggcuucaagcucaaggacugcgugauguacgccuccgcggugguccugcugauccucaugaccgcccgcaccguguacgacgacggggcccggcgcguguggacgcugaugaacguccugacccucuucuacaagguguacuacggcaacgcccuggaccaggccaucagcaugugggcgcugaucaucuccgugaccagcaacuacuccggggucgugaccacggugauguuccucgcccggggcaucgucuucaugugcguggaguacugccccaucuucuucaucaccggcaacacccugcagugcaucaugcugguguacugcuuccucggguacuucugcacgugcuacuucggccuguucugccugcucaaccgcuacuuccggcugacccugggggucuacgacuaccucgugagcacccaggaguuccgcuacaugaacucccagggccugcugcccccgaagaacagcaucgacgccuucaagcucaacaucaagcugcugggggugggcggcaagcccugcaucaaggucgccaccgugcaguga

SEQ ID NO: 18488 - RNA, 876 nt, Artificial Sequence
  SARS-CoV-2__MT831729.1__non-structural protein 6 (NSP6) CDS gc
augagcgccgugaagcgcaccaucaagggcacccaccacuggcugcuccugacgauccugaccucccuccugguccuggugcagagcacccaguggucccucuucuucuuccuguacgagaacgccuuccugcccuucgcgauggggaucaucgccaugagcgccuucgccaugauguucgugaagcacaagcacgccuuccucugccuguuccugcucccgucccuggcgaccgucgccuacuucaacaugguguacaugcccgccagcugggugaugcggaucaugacguggcuggacauggucgacaccucccucagcggcuucaagcugaaggacugcgugauguacguguccgccgucgugcugcucauccugaugaccgcgcgcaccguguacgacgacggggcccggcgcgucuggacgcugaugaacgugcucacccugguguacaaggucuacuacggcaacgcccuggaccaggccaucagcaugugggcccucaucaucuccgugaccagcaacuacuccgggguggucaccacggugauguuccuggcgcggggcaucguguucaugugcgucgaguacugccccaucuucuucaucaccggcaacacccugcagugcaucaugcucguguacugcuuccugggguacuucugcacgugcuacuucggccuguucugccuccugaaccgcuacuuccggcugacccucgggguguacgacuaccuggucagcacccaggaguuccgcuacaugaacucccagggccugcugcccccgaagaacagcaucgacgccuucaagcucaacaucaagcugcucggggugggcggcaagcccugcaucaaggucgccaccgugcaguga

SEQ ID NO: 18489 - RNA, 876 nt, Artificial Sequence
  SARS-CoV-2__MT834038.1__non-structural protein 6 (NSP6) CDS gc
augagcgccgugaagcgcaccaucaagggcacccaccacuggcugcuccugacgauccugaccucccuccugguccuggugcagagcacccaguggucccucuucuucuuccuguacgagaacgccuuccugcccuucgcgauggggaucaucgccaugagcgccuucgccaugauguucgugaagcacaagcacgccuuccucugccuguuccugcucccgucccuggcgaccgucgccuacuucaacaugguguacaugcccgccagcugggugaugcggaucaugacguggcuggacauggucgacaccucccucagcggcuucaagcugaaggacugcgggauguacgccuccgcgguggugcugcucauccugaugaccgcccgcaccgucuacgacgacggcgcccggcgcguguggacgcugaugaacgugcucacccuggucuacaagguguacuacgggaacgcccuggaccaggccaucagcaugugggcgcucaucaucuccgugaccagcaacuacuccggcgucgugaccacggugauguuccuggcccggggcaucgucuucaugugcguggaguacugccccaucuucuucaucaccgggaacacccugcagugcaucaugcucguguacugcuuccugggcuacuucugcacgugcuacuucgggcuguucugccuccugaaccgcuacuuccggcugacccucggcgucuacgacuaccuggugagcacccaggaguuccgcuacaugaacucccaggggcugcugcccccgaagaacagcaucgacgccuucaagcucaacaucaagcugcucggcgugggcgggaagcccugcaucaaggucgccaccgugcaguga

SEQ ID NO: 18490 - RNA, 876 nt, Artificial Sequence
  SARS-CoV-2__MT834100.1__non-structural protein 6 (NSP6) CDS gc
augagcgccgugaagcgcaccaucaagggcaccuaccacuggcugcuccugacgauccugaccucccuccugguccuggugcagagcacccaguggucccucuucuucuuccuguacgagaacgccuuccugcccuucgcgauggggaucaucgccaugagcgccuucgccaugauguucgugaagcacaagcacgccuuccucugccuguuccugcucccgucccuggcgaccgucgccuacuucaacaugguguacaugcccgccagcugggugaugcggaucaugacguggcuggacauggucgacaccucccucagcggcuucaagcugaaggacugcgugauguacgccuccgcggugguccugcucauccugaugaccgcccgcaccguguacgacgacggggcccggcgcguguggacgcugaugaacguccucacccugguguacaagguguacuacggcaacgcccuggaccaggccaucagcaugugggcgcucaucaucuccgucaccagcaacuacuccgggguggugaccacggucauguuccuggcccggggcaucguguucaugugcguggaguacugccccaucuucuucaucaccggcaacacccugcagugcaucaugcucgucuacugcuuccugggguacuucugcacgugcuacuucggccuguucugccuccugaaccgcuacuuccggcugacccucgggguguacgacuaccuggugagcacccaggaguuccgcuacaugaacucccagggccugcugcccccgaagaacagcaucgacgccuucaagcucaacaucaagcugcucggggucggcggcaagcccugcaucaagguggccaccguccaguga

SEQ ID NO: 18491 - RNA, 876 nt, Artificial Sequence
  SARS-CoV-2__MT834849.1__non-structural protein 6 (NSP6) CDS gc
augagcgccgugaagcgcaccaucaagggcacccaccacuggcugcuccugacgauccugaccucccuccugguccuggugcagagcacccaguggucccucuucuucuuccuguacgagaacgccuuccugcccuucgcgauggggaucaucgccaugagcgccuucgccaugauguucgugaagcacaagcacgccuuccucugccuguuccugcucccgucccuggcgaccgucgccuacuucaacaugguguacaugcccgccagcugggugaugcggaucaugacguggcuggacauggucgacaccucccucagcggcuucaagcugaaggacugcgugauguacgccuccgcggugguccugcucauccugaugaccgcccgcaccguguacgacgacggggcccggcgcguguggacgcugaugaacguccucacccuggccuacaagguguacuacggcaacgcccuggaccaggcgaucagcaugugggcccucaucaucuccgugaccagcaacuacuccggggucgugaccacggugauguuccuggcccggggcaucgucuucaugugcguggaguacugccccaucuucuucaucaccggcaacacccugcagugcaucaugcucguguacugcuuccugggguacuucugcacgugcuacuucggccuguucugccuccugaaccgcuacuuccggcugacccucggggucuacgacuaccuggugagcacccaggaguuccgcuacaugaacucccagggccugcugcccccgaagaacagcaucgacgccuucaagcucaacaucaagcugcucggggugggcggcaagcccugcaucaaggucgccaccgugcaguga

SEQ ID NO: 18492 - RNA, 876 nt, Artificial Sequence
  SARS-CoV-2__MT825091.1__non-structural protein 6 (NSP6) CDS gc
augagcgccgugaagcgcaccaucaagggcacccaccacuggcugcuccugacgauccugaccucccuccugguccuggugcagagcacccaguggucccucuucuucuuccuguacgagaacgccuuccugcccuucgcgauggacaucaucgccauguacgccuucgccaugauguucgugaagcacaagaacgccuuccucuaccuguaccugcucccgagccuggcgaccgucgccuacuucaacaugguguacaugcuggccuccugggugaugcggaucaugacguggcucgacaugggggacaccagccuguccggcuucaagcugaaggacugcgucauguacgccagcgggguggugcuccugauccugaugaccgcgcgcaccgucuacgacgacggcgcccggcgcgugcucacgcugaugaacgugcugacccucgucuacaagguguacuacgggaacgcccuggaccaggccaucuccaugugggcccugaucaucagcgugaccuccaacuacagcggcgucgugaccacggugaugucccucgcgcgggacaucgucuucaugugcguggaguacugccccaucuucuucaucaccggcaacacccugcagugcaucaugcugguguacugcuuccucggguacagcuacacgugcuacuucggccuguucugccugcucaaccgcuacuuccggcugacccugggggucuacgacuaccucguguccacccaggaguuccgcuacaugaacagccagggccugcugccgcccaagaacuccaucgacgccuucaagcucaacaucaagcugcugggggugggcggcaagcccugcaucaaggucgccaccgugcaguga

SEQ ID NO: 18493 - RNA, 876 nt, Artificial Sequence
  SARS-CoV-2__MT821674.1__non-structural protein 6 (NSP6) CDS gc
augagcgccgugaagcgcaccaucaagggcacccaccacuggcugcuccugacgauccugaccucccuccugguccuggugcagagcacccaguggucccucuucuucuuccuguacgagaacguguuccugcccuucgccauggggaucaucgcgaugagcgccuucgccaugauguucgucaagcacaagcacgccuuccucugccuguuccugcucccgucccuggccaccguggcguacuucaacaugguguacaugcccgccagcugggucaugcggaucaugacguggcuggacaugguggacaccucccucagcggcuucaagcugaaggacugcgugauguacgccuccgccgucgugcugcucauccugaugaccgcgcgcaccguguacgacgacggggcccggcgcgucuggacgcugaugaacgugcucacccugguguacaaggucuacuacggcaacgcccuggaccaggccaucagcaugugggcccucaucaucuccgugaccagcaacuacuccgggguggucaccacggugauguuccuggcgcggggcaucguguucaugugcgucgaguacugccccaucuucuucaucaccggcaacacccugcagugcaucaugcucguguacugcuuccugggguacuucugcacgugcuacuucggccuguucugccuccugaaccgcuacuuccggcugacccucgggguguacgacuaccuggucagcacccaggaguuccgcuacaugaacucccagggccugcugcccccgaagaacagcaucgacgccuucaagcucaacaucaagcugcucggggugggcggcaagcccugcaucaaggucgccaccgugcaguga

SEQ ID NO: 18494 - RNA, 876 nt, Artificial Sequence
  SARS-CoV-2__MT821782.1__non-structural protein 6 (NSP6) CDS gc
augagcgccgugaagcgcaccaucaagggcacccaccacuggcugcuccugacgauccugaccuccuuccucguccuggugcagagcacccaguggucccuguucuucuuccucuacgagaacgccuuccugcccuucgcgauggggaucaucgccaugagcgccuucgccaugauguucgugaagcacaagcacgccuuccugugccucuuccugcugccgucccucgcgaccgucgccuacuucaacaugguguacaugcccgccagcugggugaugcggaucaugacguggcuggacauggucgacaccucccugagcggcuucaagcucaaggacugcgugauguacgccuccgcggugguccugcugauccucaugaccgcccgcaccguguacgacgacggggcccggcgcguguggacgcugaugaacguccugacccucguguacaagguguacuacggcaacgcccuggaccaggccaucagcaugugggcgcugaucaucuccgucaccagcaacuacuccgggguggugaccacggucauguuccucgcccggggcaucguguucaugugcguggaguacugccccaucuucuucaucaccggcaacacccugcagugcaucaugcuggucuacugcuuccucggguacuucugcacgugcuacuucggccuguucugccugcucaaccgcuacuuccggcugacccuggggguguacgacuaccucgugagcacccaggaguuccgcuacaugaacucccagggccugcugcccccgaagaacagcaucgacgccuucaagcucaacaucaagcugcugggggucggcggcaagcccugcaucaagguggccaccguccaguga

SEQ ID NO: 18495 - RNA, 876 nt, Artificial Sequence
  SARS-CoV-2__MT821787.1__non-structural protein 6 (NSP6) CDS gc
augagcgccgugaagcgcaccaucaagggcacccaccacuggcugcuccugacgauccugaccucccuccugguccuggugcagagcacccaguggucccucuucuucuuccuguacgagaacgccuuccugcccuucgcgauggggaucaucgccaugagcgccuucgccaugauguucgugaagcacaagcacgccuuccucugccuguuccugcucccgucccuggcgaccgucguguacuucaacaugguguacaugcccgccagcugggucaugcggaucaugacguggcuggacaugguggacaccucccucagcggcuucaagcugaaggacugcgugauguacgccuccgccgucgugcugcucauccugaugaccgcgcgcaccguguacgacgacggggcccggcgcgucuggacgcugaugaacgugcucacccugguguacaaggucuacuacggcaacgcccuggaccaggccaucagcaugugggcccucaucaucuccgugaccagcaacuacuccgggguggucaccacggugauguuccuggcgcggggcaucguguucaugugcgucgaguacugccccaucuucuucaucaccggcaacacccugcagugcaucaugcucguguacugcuuccugggguacuucugcacgugcuacuucggccuguucugccuccugaaccgcuacuuccggcugacccucgggguguacgacuaccuggucagcacccaggaguuccgcuacaugaacucccagggccugcugcccccgaagaacagcaucgacgccuucaagcucaacaucaagcugcucggggugggcggcaagcccugcaucaaggucgccaccgugcaguga

SEQ ID NO: 18496 - RNA, 876 nt, Artificial Sequence
  SARS-CoV-2__MT810523.1__non-structural protein 6 (NSP6) CDS gc
augagcgccgugaagcgcaccaucaagggcacccaccacuggcugcuccugacgauccugaccucccuccugguccuggugcagagcacccaguggucccucuucuucuuccuguacgagaacgccuuccugcccuucgcgauggggaucaucgccaugagcgccuucuccaugauguucgugaagcacaagcacgccuuccucugccuguuccugcucccgagccuggccaccgucgcguacuucaacaugguguacaugcccgccuccugggugaugcggaucaugacguggcuggacauggucgacaccagccucuccggcuucaagcugaaggacugcgugauguacgccagcgccgugguccugcucauccugaugaccgcgcgcaccguguacgacgacggggcccggcgcguguggacgcugaugaacguccucacccugguguacaagguguacuacggcaacgcccuggaccaggccaucuccaugugggcccucaucaucagcgucaccuccaacuacagcgggguggugaccacggucauguuccuggcgcggggcaucguguucaugugcguggaguacugccccaucuucuucaucaccggcaacacccugcagugcaucaugcucgucuacugcuuccugggguacuucugcacgugcuacuucggccuguucugccuccugaaccgcuacuuccggcugacccucgggguguacgacuaccugguguccacccaggaguuccgcuacaugaacagccagggccugcugcccccgaagaacuccaucgacgccuucaagcucaacaucaagcugcucggggucggcggcaagcccugcaucaagguggccaccguccaguga

SEQ ID NO: 18497 - RNA, 876 nt, Artificial Sequence
  SARS-CoV-2__MT810568.1__non-structural protein 6 (NSP6) CDS gc
augagcgccgugaagcgcaccaucaagggcacccaccacuggcugcuccugacgauccugaccucccuccugguccuggugcagagcacccaguggucccucuucuucuuccuguacgagaacgccuuccugagcuucgcgauggggaucaucgccauguccgccuucgccaugauguucgugaagcacaagcacgccuuccucugccuguuccugcuccccagccuggcgaccgucgccuacuucaacaugguguacaugccggccuccugggugaugcggaucaugacguggcuggacauggucgacaccagccucuccggcuucaagcugaaggacugcgugauguacgccagcgcggugguccugcucauccugaugaccgcccgcaccguguacgacgacggggcccggcgcguguggacgcugaugaacguccucacccugguguacaagguguacuacggcaacgcccuggaccaggccaucuccaugugggcgcucaucaucagcgucaccuccaacuacagcgggguggugaccacggucauguuccuggcccggggcaucguguucaugugcguggaguacugccccaucuucuucaucaccggcaacacccugcagugcaucaugcucgucuacugcuuccugggguacuucugcacgugcuacuucggccuguucugccuccugaaccgcuacuuccggcugacccucgggguguacgacuaccugguguccacccaggaguuccgcuacaugaacagccagggccugcucccgcccaagaacuccaucgacgccuucaagcugaacaucaagcugcucggggucggcggcaagcccugcaucaagguggccaccguccaguga

SEQ ID NO: 18498 - RNA, 876 nt, Artificial Sequence
  SARS-CoV-2__MT810731.1__non-structural protein 6 (NSP6) CDS gc
augagcgccgugaagcgcaccaucaagggcacccaccacuggcugcuccugacgauccugaccucccuccugguccuggugcagagcacccaguggucccucuucuucuuccuguacgagaacgccuuccugcccuucgcgauggggaucaucgccaugagcgccuucgccaugauguucgugaagcacaagcacgccuuccucugccuguuccugcucccgucccuggcgaccgucgccuacuucaacaugguguacaugcccgccagcugggugaugcggaucaugacguggcuggacauggucgacaccucccucuucggcuucaagcugaaggacugcgugauguacgccagcgcggugguccugcucauccugaugaccgcccgcaccguguacgacgacggggcccggcgcguguggacgcugaugaacguccucacccugguguacaagguguacuacggcaacgcccuggaccaggccaucuccaugugggcgcucaucaucagcgucaccuccaacuacagcgggguggugaccacggucauguuccuggcccggggcaucguguucaugugcguggaguacugccccaucuucuucaucaccggcaacacccugcagugcaucaugcucgucuacugcuuccugggguacuucugcacgugcuacuucggccuguucugccuccugaaccgcuacuuccggcugacccucgggguguacgacuaccugguguccacccaggaguuccgcuacaugaacagccagggccugcugcccccgaagaacuccaucgacgccuucaagcucaacaucaagcugcucggggucggcggcaagcccugcaucaagguggccaccguccaguga

SEQ ID NO: 18499 - RNA, 876 nt, Artificial Sequence
  SARS-CoV-2__MT811234.1__non-structural protein 6 (NSP6) CDS gc
augagcgccgugaagcgcaccaucaagggcacccaccacuggcugcuccugacgauccugaccucccuccugguccuggugcagagcacccaguggucccucuucuucuuccuguacgagaacgccuuccugcccuucgcgauggggaucaucgccaugagcgccuucgccaugauguucgugaagcacaagcacgccuuccucugccuguuccugcucccgucccuggcgaccgucgccuacuucaacaugguguacaugcccgccagcuggcugaugcggaucaugacguggcucgacaugguggacaccucccugagcggcuucaagcugaaggacugcgucauguacgccuccgcgguggugcuccugauccugaugaccgcccgcaccgucuacgacgacggggcccggcgcguguggacgcucaugaacgugcugacccuggucuacaagguguacuacggcaacgcccucgaccaggccaucagcaugugggcgcugaucaucuccgugaccagcaacuacuccggggucgugaccacggugauguuccuggcccggggcaucgucuucaugugcguggaguacugccccaucuucuucaucaccggcaacacccuccagugcaucaugcugguguacugcuuccugggguacuucugcacgugcuacuucggccucuucugccugcugaaccgcuacuuccggcucacccugggggucuacgacuaccuggugagcacccaggaguuccgcuacaugaacucccagggccuccugcccccgaagaacagcaucgacgccuucaagcugaacaucaagcuccugggggugggcggcaagcccugcaucaaggucgccaccgugcaguga

SEQ ID NO: 18500 - RNA, 876 nt, Artificial Sequence
  SARS-CoV-2__MT811513.1__non-structural protein 6 (NSP6) CDS gc
augagcgccgugaagcgcaccaucaagggcacccaccacuggcugcuccugacgauccugaccucccuccugguccuggugcagagcacccagugguuccucuucuucuuccuguacgagaacgccuuccugcccuucgcgauggggaucaucgccauguccgccuucgccaugauguucgugaagcacaagcacgccuuccucugccuguuccugcucccgagccuggcgaccgucgccuacuucaacaugguguacaugcccgccuccugggugaugcggaucaugacguggcuggacauggucgacaccagccucuccggcuucaagcugaaggacugcgugauguacgccagcgcggugguccugcucauccugaugaccgcccgcaccguguacgacgacggggcccggcgcguguggacgcugaugaacguccucacccugguguacaagguguacuacggcaacgcccuggaccaggccaucuccaugugggcgcucaucaucagcgucaccuccaacuacagcgggguggugaccacggucauguuccuggcccggggcaucguguucaugugcguggaguacugccccaucuucuucaucaccggcaacacccugcagugcaucaugcucgucuacugcuuccugggguacuucugcacgugcuacuucggccuguucugccuccugaaccgcuacuuccggcugacccucgggguguacgacuaccugguguccacccaggaguuccgcuacaugaacagccagggccugcugcccccgaagaacuccaucgacgccuucaagcucaacaucaagcugcucggggucggcggcaagcccugcaucaagguggccaccguccaguga

SEQ ID NO: 18501 - RNA, 876 nt, Artificial Sequence
  SARS-CoV-2__MT811530.1__non-structural protein 6 (NSP6) CDS gc
augagcgccgugaagcgcaccaucaagggcacccaccacuggcugcuccugacgauccugaccucccuccugguccuggugcagagcacccaguggucccucuucuucuuccuguacgagaacgccuuccugcccuucgcgauggggaucaucgccaugagcgccuucgccaugauguucgugaagcacaagcacgccuuccucugccuguuccugcucccgucccuggcgaccgucgccuacuucaacaugguguacaugcccgccagcugggugaugcggaucaugacguggcuggacauggucgacaccucccucagcggcuucaagcugaaggacugcgugauguacgccuccgcggugguccugcucauccugaugaccgcccgcaccguguacgacgacggggcccggcgcguguggacgcugaugaacguccucacccugguguacaagguguacuacggcaacgcccuggaccaggccaucagcaugugggcgcucaucaucuccgucaccagcaacuacuccgggguggugaccacggucauguuccuggcccggggcaucguguucaugugcguggaguacugccccaucuucuucaucaccggcaacacccugcagugcaucaugcucgucuacugcuuccugggguacuucugcacgugcuacuucggccuguucugccuccugaaccgcuacuuccggcugacccucgggguguacgacuaccuggugagcacccaggaguuccgcuacaugaacucccacggccugcugcccccgaagaacagcaucgacgccuucaagcucaacaucaagcugcucggggucggcggcaagcccugcaucaagguggccaccguccaguga

SEQ ID NO: 18502 - RNA, 876 nt, Artificial Sequence
  SARS-CoV-2__MT811552.1__non-structural protein 6 (NSP6) CDS gc
augagcgccgugaagcgcaccaucaagggcacccaccacuggcugcuccugacgauccugaccucccuccugguccuggugcagagcacccaguggucccucuucuucuucuucuucuacgagaacgccuuccugcccuucgcgauggggaucaucgccaugagcgccuucgccaugauguucgugaagcacaagcacgccuuccugugccucuuccugcugccgucccucgcgaccgucgccuacuucaacaugguguacaugcccgccagcugggugaugcggaucaugacguggcuggacauggucgacaccucccugagcggcuucaagcucaaggacugcgugauguacgccuccgcggugguccugcugauccucaugaccgcccgcaccguguacgacgacggggcccggcgcguguggacgcugaugaacguccugacccucguguacaagguguacuacggcaacgcccuggaccaggccaucagcaugugggcgcugaucaucuccgucaccagcaacuacuccgggguggugaccacggucauguuccucgcccggggcaucguguucaugugcguggaguacugccccaucuucuucaucaccggcaacacccugcagugcaucaugcuggucuacugcuuccucggguacuucugcacgugcuacuucggccuguucugccugcucaaccgcuacuuccggcugacccuggggguguacgacuaccucgugagcacccaggaguuccgcuacaugaacucccagggccugcugcccccgaagaacagcaucgacgccuucaagcucaacaucaagcugcugggggucggcggcaagcccugcaucaagguggccaccgucuga

SEQ ID NO: 18503 - RNA, 876 nt, Artificial Sequence
  SARS-CoV-2__MT800794.1__non-structural protein 6 (NSP6) CDS gc
augagcgccgugaagcgcaccaucaagggcacccaccacuggcugcuccugacgauccugaccucccuccugguccuggugcagagcacccaguggucccucuucuucuuccuguacgagaacgccuuccugcccuucgcgauggggaucaucgccaugagcgccuucgccaugauguucgugaagcacaagcacgccuuccucugccuguuccugcucccgucccuggcgaccgucgccuacuucaacaugguguacaugcccgccagcugggugaugcggaucaugacguggcuggacauggucgacaccucccucagcggcuucaagcugaaggacugcgugauguacgccuccgcggugguccugcucauccugaugaccgcccgcaccguguacgacgacggggcccggcgcguguggacguucaugaacguccugacccucguguacaagguguacuacggcaacgcccuggaccaggccaucagcaugugggcgcugaucaucuccgucaccagcaacuacuccgggguggugaccacggucauguuccucgcccggggcaucguguucaugugcguggaguacugccccaucuucuucaucaccggcaacacccugcagugcaucaugcuggucuacugcuuccucggguacuucugcacgugcuacuucggccuguucugccugcucaaccgcuacuuccggcugacccuggggguguacgacuaccucgugagcacccaggaguuccgcuacaugaacucccagggccugcugcccccgaagaacagcaucgacgccuucaagcucaacaucaagcugcugggggucggcggcaagcccugcaucaagguggccaccguccaguga

SEQ ID NO: 18504 - RNA, 876 nt, Artificial Sequence
  SARS-CoV-2__MT786438.1__non-structural protein 6 (NSP6) CDS gc
augagcgccgugaagcgcaccaucaagggcaccuaccacuggcugcuccugacgauccugaccucccuccugguccuggugcagagcacccaguggucccucuucuucuucuucuacgagaacgccuuccugcccuucgcgauggggaucaucgccaugagcgccuucgccaugauguucgugaagcacaagcacgccuuccugugccucuuccugcugccgucccucgcgaccgucgccuacuucaacaugguguacaugcccgccagcugggugaugcggaucaugacguggcuggacauggucgacaccucccugagcggcuucaagcucaaggacugcgugauguacgccuccgcggugguccugcugauccucaugaccgcccgcaccguguacgacgacggggcccggcgcguguggacgcugaugaacguccugacccucguguacaagguguacuacggcaacgcccuggaccaggccaucagcaugugggcgcugaucaucuccgucaccagcaacuacuccgggguggugaccacggucauguuccucgcccggggcaucguguucaugugcguggaguacugccccaucuucuucaucaccggcaacacccugcagugcaucaugcuggucuacugcuuccucggguacuucugcacgugcuacuucggccuguucugccugcucaaccgcuacuuccggcugacccuggggguguacgacuaccucgugagcacccaggaguuccgcuacaugaacucccagggccugcugcccccgaagaacagcaucgacgccuucaagcucaacaucaagcugcugggggucggcggcaagcccugcaucaagguggccaccguccaguga

SEQ ID NO: 18505 - RNA, 876 nt, Artificial Sequence
  SARS-CoV-2__MT786845.1__non-structural protein 6 (NSP6) CDS gc
augagcgccgugaagcgcaccaucaagggcacccaccacuggcugcuccugacgauccugaccucccuccugguccuggugcagagcacccaguggucccucuucuucuuccuguacgagaacgccuuccugcccuucgcgauggggaucaucgccaugagcgccuucgccaugauguucgugaagcacaagcacgccuuccucugccuguuccugcucccgucccuggcgaccgucgccuacuucaacaugguguacaugcccgccagcugggugaugcggaucaugacguggcuggacauggucgacaccucccucagcggcuucaagcugaaggacugcgugauguacgccuccgcggugguccugcucauccugaugaccgcccgcaccguguacgacgacggggcccggcgcguguggacgcugaugaacguccucacccugguguacaagguguacuacggcaacgcccuggaccaggccaucagcaugugggcgcucaucaucuccgucaccagcaacuacuccgggguggugaccacggucauguuccuggcccggggcaucguguucaugugcguggaguacugccccaucuucuucaucaccggcaacacccugcagugcaucaugcucgucuacugcuuccugggguacuucugcacgugcuacuucggccuguucugccuccugaaccgcuacuuccggcugacccucgggguguacgacuaccuggugagcacccaggaguuccgcuacaugaacucccagggccuguucccgcccaagaacagcaucgacgccuucaagcucaacaucaagcugcugggggucggcggcaagcccugcaucaagguggccaccguccaguga

SEQ ID NO: 18506 - RNA, 876 nt, Artificial Sequence
  SARS-CoV-2__MT764170.1__non-structural protein 6 (NSP6) CDS gc
augagcgccgugaagcgcaccaucaagggcacccaccacuggcugcuccugacgauccugaccucccuccugguccuggugcagagcacccaguggucccucuucuucuuccuguacgagaacgccuuccugcccuucgcgauggggaucaucgccaugagcgccuucgccaugauguucgugaagcacaagcacgccuuccucugccuguuccugcucccgucccuggcgaccgucgccuacuucaacaugguguacaugcccgccagcugggugaugcggaucaugacguggcuggacauggucgacaccucccucagcggcuucaagcugaaggacugcgugauguacgccuccgcggugguccugcucauccugaugaccgcccgcaccguguacgacgacggggcccggcgcguguggacgcugaugaacguccucacccugguguacaagguguacuacggcaacgcccuggaccaggccaucagcaugugggcgcucaucaucuccgucaccagcaacuacuccgggguggugaccacggucaucuuccuggcccggggcaucguguucaugugcguggaguacugccccaucuucuucaucaccggcaacacccugcagugcaucaugcucgucuacugcuuccugggguacuucugcacgugcuacuucggccuguucugccuccugaaccgcuacuuccggcugacccucgggguguacgacuaccuggugagcacccaggaguuccgcuacaugaacucccagggccugcugcccccgaagaacagcaucgacgccuucaagcucaacaucaagcugcucggggucggcggcaagcccugcaucaagguggccaccguccaguga

SEQ ID NO: 18507 - RNA, 876 nt, Artificial Sequence
  SARS-CoV-2__MT755837.1__non-structural protein 6 (NSP6) CDS gc
augagcgccgugaagcgcaccaucaagggcacccaccacuggcugcuccugacgauccugaccucccuccugguccuggugcagagcacccaguggucccucuucuucuuccuguacgagaacgccuuccugcccuucgcgauggggaucaucgccaugagcgccuucgccaugauguucgugaagcacaagcacgccuuccucugccuguuccugcucccgucccuggcgaccgucgccuacuucaacaugguguacaugcccgccagcugggugaugcggaucaugacguggcuggacauggucgacaccucccucagcggcuucaagcugaaggacugcgugauguacgccuccgcggugguccugcucauccugaugaccgcccgcaccguguacgacgacggggcccggcgcguguggacgcugaugaacguccucacccugguguacaagguguacuacggcaacgcccuggaccaggccaucagcaugugggcgcucaucaucuccgucaccagcaacuacuccgggguggugaccacggucauguuccugacccggggcaucguguucaugugcguggaguacugccccaucuucuucaucaccggcaacacccugcagugcaucaugcucgucuacugcuuccugggguacuucugcacgugcuacuucggccuguucugccuccugaaccgcuacuuccggcugacccucgggguguacgacuaccuggugagcacccaggaguuccgcuacaugaacucccagggccugcugcccccgaagaacagcaucgacgccuucaagcucaacaucaagcugcucggggucggcggcaagcccugcaucaagguggccaccguccaguga

SEQ ID NO: 18508 - RNA, 876 nt, Artificial Sequence
  SARS-CoV-2__MT755955.1__non-structural protein 6 (NSP6) CDS gc
augagcgccgugaagcgcaccaucaagggcacccaccacuggcugcuccugacgauccugaccucccuccugguccuggugcagagcacccaguggucccucuucuucuuccuguacgagaacgccuuccugcccuucgcgauggggaucaucgccaugagcgccuucgccaugauguucgugaagcacaagcacgccuuccucugccuguuccugcucccgucccuggcgaccgucgccuacuucaacaugguguacaugcccgccagcugggugaugcggaucaugacguggcuggacauggucgacaccucccucagcggcuucaagcugaaggacugcgugauguacgccuccgcggugguccugcucauccugaugaccgcccgcaccguguacgacgacggggcccggcgcguguggacgcugaugaacguccucacccugguguacaagguguacuacggcaacgcccuggaccaggccaucagcaugugggcgcucaucaucuccgucaccagcaacuacuccgggguggugaccacggucauguuccuggcccggggcaucguguucaugugcguggaguacugccccaucuucuucaucaccggcaacacccugcagugcaucaugcucgucuacugcuuccugggguacuucugcacgugcuacuucggccuguucugccuccugaaccgcuacuuccggcugacccucgggguguacgacuaccuggugagcacccaggaguuccgcuacaugaacucccagggccugcugcccccgaagaacagcaucgacgccuucgagcucaacaucaagcugcucggggucggcggcaagcccugcaucaagguggccaccguccaguga

SEQ ID NO: 18509 - RNA, 876 nt, Artificial Sequence
  SARS-CoV-2__MT757073.1__non-structural protein 6 (NSP6) CDS gc
augagcgccgugaagcgcaccaucaagggcacccaccacuggcugcuccugacgauccugaccucccuccugguccuggugcagagcacccaguggucccucuucuucuuccuguacgagaacgccuuccugcccuucgcgauggggaucaucgccaugagcgccuucgccaugauguucgugaagcacaagcacgccuuccucugccuguuccugcucccguccuucgcgaccgucgccuacuucaacaugguguacaugcccgccagcugggugaugcggaucaugacguggcuggacauggucgacaccucccugagcggcuucaagcucaaggacugcgugauguacgccuccgcggugguccugcugauccucaugaccgcccgcaccguguacgacgacggggcccggcgcguguggacgcugaugaacguccugacccucguguacaagguguacuacggcaacgcccuggaccaggccaucagcaugugggcgcugaucaucuccgucaccagcaacuacuccgggguggugaccacggucauguuccucgcccggggcaucguguucaugugcguggaguacugccccaucuucuucaucaccggcaacacccugcagugcaucaugcuggucuacugcuuccucggguacuucugcacgugcuacuucggccuguucugccugcucaaccgcuacuuccggcugacccuggggguguacgacuaccucgugagcacccaggaguuccgcuacaugaacucccagggccugcugcccccgaagaacagcaucgacgccuucaagcucaacaucaagcugcugggggucggcggcaagcccugcaucaagguggccaccguccaguga

SEQ ID NO: 18510 - RNA, 876 nt, Artificial Sequence
  SARS-CoV-2__MT745644.1__non-structural protein 6 (NSP6) CDS gc
augagcgccgccaagcgcaccaucaagggcacccaccacuggcugcuccugacgauccugaccucccuccuggugcugguccagagcacccaguggucccucuucuucuuccuguacgagaacgcguuccugcccuucgccauggggaucaucgccaugagcgccuucgccaugauguucgugaagcacaagcacgcguuccucugccuguuccugcucccgucccuggccaccguggccuacuucaacauggucuacaugcccgccagcugggugaugcggaucaugacguggcuggacaugguggacaccucccucagcggcuucaagcugaaggacugcgucauguacgcguccgccguggugcugcucauccugaugaccgcccgcaccgucuacgacgacggggcccggcgcguguggacgcugaugaacgugcucacccuggucuacaagguguacuacggcaacgcccuggaccaggcgaucagcaugugggcccucaucaucuccgugaccagcaacuacuccggggucgugaccacggugauguuccuggcccggggcaucgucuucaugugcguggaguacugccccaucuucuucaucaccggcaacacccugcagugcaucaugcucguguacugcuuccugggguacuucugcacgugcuacuucggccuguucugccuccugaaccgcuacuuccggcugacccucggggucuacgacuaccuggugagcacccaggaguuccgcuacaugaacucccagggccugcugcccccgaagaacagcaucgacgccuucaagcucaacaucaagcugcucggggugggcggcaagcccugcaucaaggucgccaccgugcaguga

SEQ ID NO: 18511 - RNA, 876 nt, Artificial Sequence
  SARS-CoV-2__MT750188.1__non-structural protein 6 (NSP6) CDS gc
augagcgccgugaagcgcaccaucaagggcacccaccacuggcugcuccugacgauccugaccucccuccugguccuggugcagagcacccaguggucccucuucuucuuccuguacgagaacgccuuccugcccuucgcgauggggaucaucgccaugagcgccuucgccaugauguucgugaagcacaagcacgccuuccucugccuguuccugcucccgucccuggcgaccaucgccuacuucaacauggucuacaugcccgccagcugggugaugcggaucaugacguggcuggacaugguggacaccucccucagcggcuucaagcugaaggacugcgucauguacgccuccgcgguggugcugcucauccugaugaccgcccgcaccgucuacgacgacggggcccggcgcguguggacgcugaugaacgugcucacccuggucuacaagguguacuacggcaacgcccuggaccaggccaucagcaugugggcgcucaucaucuccgugaccagcaacuacuccggggucgugaccacggugauguuccuggcccggggcaucgucuucaugugcguggaguacugccccaucuucuucaucaccggcaacacccugcagugcaucaugcucguguacugcuuccugggguacuucugcacgugcuacuucggccuguucugccuccugaaccgcuacuuccggcugacccucggggucuacgacuaccuggugagcacccaggaguuccgcuacaugaacucccagggccugcugcccccgaagaacagcaucgacgccuucaagcucaacaucaagcugcucggggugggcggcaagcccugcaucaaggucgccaccgugcaguga

SEQ ID NO: 18512 - RNA, 876 nt, Artificial Sequence
  SARS-CoV-2__MT740392.1__non-structural protein 6 (NSP6) CDS gc
augagcgccgugaagcgcaccaucaagggcacccaccacuggcugcuccugacgauccugaccucccuccugguccuggugcagagcacccaguggucccucuucuucuuccuguacgagaacgccuuccugcccuucgcgauggggaucaucgccaugagcgccuucgccaugauguucgugaagcacaagcacgccuuccucugccuguuccugcucccgucccuggcgaccgucgccuacuucaacaugguguacaugcccgccagcugggugaugcggaucaugacguggcuggacauggucgacaccucccucagcggcuucaagcugaaggacugcgugauguacgccuccgcgcuggugcuccugauccugaugaccgcccgcaccgucuacgacgacggggcccggcgcguguggacgcucaugaacgugcugacccuggucuacaagguguacuacggcaacgcccucgaccaggccaucagcaugugggcgcugaucaucuccgugaccagcaacuacuccggggucgugaccacggugauguuccuggcccggggcaucgucuucaugugcguggaguacugccccaucuucuucaucaccggcaacacccuccagugcaucaugcugguguacugcuuccugggguacuucugcacgugcuacuucggccucuucugccugcugaaccgcuacuuccggcucacccugggggucuacgacuaccuggugagcacccaggaguuccgcuacaugaacucccagggccuccugcccccgaagaacagcaucgacgccuucaagcugaacaucaagcuccugggggugggcggcaagcccugcaucaaggucgccaccgugcaguga

SEQ ID NO: 18513 - RNA, 876 nt, Artificial Sequence
  SARS-CoV-2__MT738101.1__non-structural protein 6 (NSP6) CDS gc
augagcgccgugaagcgcaccaucaagggcacccaccacuggcugcuccugaucauccugacgucccuccugguccuggugcagagcacccaguggucccucuucuucuuccuguacgagaacgccuuccugcccuucgcgauggggaucaucgccaugagcgccuucgccaugauguucgugaagcacaagcacgccuuccucugccuguuccugcucccgucccuggcgaccgucgccuacuucaacaugguguacaugcccgccagcugggugaugcggaucaugaccuggcuggacauggucgacacgucccucagcggcuucaagcugaaggacugcgugauguacgccuccgcggugguccugcucauccugaugaccgcccgcaccguguacgacgacggggcccggcgcguguggacccugaugaacguccucacgcugguguacaagguguacuacggcaacgcccuggaccaggccaucagcaugugggcgcucaucaucuccgucaccagcaacuacuccgggguggugaccaccgucauguuccuggcccggggcaucguguucaugugcguggaguacugccccaucuucuucaucacgggcaacacccugcagugcaucaugcucgucuacugcuuccugggguacuucugcacgugcuacuucggccuguucugccuccugaaccgcuacuuccggcugacccucgggguguacgacuaccuggugagcacccaggaguuccgcuacaugaacucccagggccugcugcccccgaagaacagcaucgacgccuucaagcucaacaucaagcugcucggggucggcggcaagcccugcaucaagguggccaccguccaguga

SEQ ID NO: 18514 - RNA, 876 nt, Artificial Sequence
  SARS-CoV-2__MT706176.1__non-structural protein 6 (NSP6) CDS gc
augagcgccgugaagcgcaccauccggggcacccaccacuggcugcuccugacgauccugaccucccuccugguccuggugcagagcacccaguggucccucuucuucuuccuguacgagaacgccuuccugcccuucgcgauggggaucaucgccaugagcgccuucgccaugauguucgugaagcacaagcacgccuuccucugccuguuccugcucccgucccuggcgaccgucgccuacuucaacaugguguacaugcccgccagcugggugaugcgcaucaugacguggcuggacauggucgacaccucccucagcggcuucaagcugaaggacugcgugauguacgccuccgcggugguccugcucauccugaugaccgcccggaccguguacgacgacggggcccgccggguguggacgcugaugaacguccucacccugguguacaagguguacuacggcaacgcccuggaccaggccaucagcaugugggcgcucaucaucuccgucaccagcaacuacuccgggguggugaccacggucauguuccuggcccgcggcaucguguucaugugcguggaguacugccccaucuucuucaucaccggcaacacccugcagugcaucaugcucgucuacugcuuccugggguacuucugcacgugcuacuucggccuguucugccuccugaaccgguacuuccgccugacccucgggguguacgacuaccuggugagcacccaggaguuccgguacaugaacucccagggccugcugcccccgaagaacagcaucgacgccuucaagcucaacaucaagcugcucggggucggcggcaagcccugcaucaagguggccaccguccaguga

SEQ ID NO: 18515 - RNA, 876 nt, Artificial Sequence
  SARS-CoV-2__MT706225.1__non-structural protein 6 (NSP6) CDS gc
augagcgccgugaagcgcaccaucaagggcacccaccacuggcugcuccugacgauccugaccucccuccugguccuggugcagagcacccaguggucccucuucuucuuccuguacgagaacgccuuccugcccuucgcgauggggaucaucgccaugagcgccuucgccaugauguucgugaagcacaagcacgccuuccucugccuguuccugcucccgucccuggcgaccgucgccuacuucaacaugguguacaugcccgccagcugggugaugcggaucaugacguggcuggacauggucgacaccucccucagcggcuucaagcugaaggacugcgugauguacgccuccgcggugguccugcucauccugaugaccgcccgcaccguguacgacgacggggcccggcgcguguggacgcugaugaacguccucacccugguguacaagguguacuacggcaacgcccuggaccaggccaucagcaugugggcgcucaucaucuccgucaccagcaacuacuccgggguggugaccacggucauguuccuggcccggggcaucguguucaugugcguggaguacugccccaucuucuucaucaccggcaacaccuuccagugcaucaugcuggucuacugcuuccucggguacuucugcacgugcuacuucggccuguucugccugcucaaccgcuacuuccggcugacccuggggguguacgacuaccucgugagcacccaggaguuccgcuacaugaacucccagggccugcugcccccgaagaacagcaucgacgccuucaagcucaacaucaagcugcugggggucggcggcaagcccugcaucaagguggccaccguccaguga

SEQ ID NO: 18516 - RNA, 876 nt, Artificial Sequence
  SARS-CoV-2__MT703973.1__non-structural protein 6 (NSP6) CDS gc
augagcgccgugaagcgcaccaucaagggcacccaccacuggcugcucaucacgauccugaccucccugcucguccuggugcagagcacccaguggucccuguucuucuuccucuacgagaacgccuuccugcccuucgcgauggggaucaucgccaugagcgccuucgccaugauguucgugaagcacaagcacgccuuccugugccucuuccugcugccgucccucgcgaccgucgccuacuucaacaugguguacaugcccgccagcugggugaugcggaucaugacguggcuggacauggucgacaccucccugagcggcuucaagcucaaggacugcgugauguacgccuccgcggugguccugcugauccucaugaccgcccgcaccguguacgacgacggggcccggcgcguguggacgcugaugaacguccugacccucguguacaagguguacuacggcaacgcccuggaccaggccaucagcaugugggcgcugaucaucuccgucaccagcaacuacuccgggguggugaccacggucauguuccucgcccggggcaucguguucaugugcguggaguacugccccaucuucuucaucaccggcaacacccugcagugcaucaugcuggucuacugcuuccucggguacuucugcacgugcuacuucggccuguucugccugcucaaccgcuacuuccggcugacccuggggguguacgacuaccucgugagcacccaggaguuccgcuacaugaacucccagggccugcugcccccgaagaacagcaucgacgccuucaagcucaacaucaagcugcugggggucggcggcaagcccugcaucaagguggccaccguccaguga

SEQ ID NO: 18517 - RNA, 876 nt, Artificial Sequence
  SARS-CoV-2__MT704049.1__non-structural protein 6 (NSP6) CDS gc
augagcgccgugaagcgcaccaucaagggcacccaccacuggcugcuccugacgauccugaccucccuccugguccuggugcagagcacccaguggucccucuucuucuuccuguacgagaacgccuuccugcccuucgcgauggggaucaucgccaugagcgccuucgccaugauguucgugaagcacaagcacgccuuccucugccuguuccugcucccgucccuggcgaccgucgccuacuucaacaugguguacaugcccgccagcugggugaugcggaucaugacguggcuggacauggucgacaccucccucagcggcuucaagcugaaggacugcgugauguacgccuccgcggugguccugcucauccugaugaccgcccgcaccguguacgacgacggggcccggcgcguguggacgcugaugaacguccucacccugguguacaagguguacuacggcaacgcccuggaccaggccaucagcaugugggcgcucaucaucuccgucaccagcaacuacuccgggguggugaccacggucauguuccuggcccggggcaucguguucaugugcguggaguacugccccaucuucuucaucgccggcaacacccugcagugcaucaugcucgucuacugcuuccugggguacuucugcacgugcuacuucggccuguucugccuccugaaccgcuacuuccggcugacccucgggguguacgacuaccuggugagcacccaggaguuccgcuacaugaacucccagggccugcugcccccgaagaacagcaucgacgccuucaagcucaacaucaagcugcucggggucggcggcaagcccugcaucaagguggccaccguccaguga
